United States Patent Application Publication US 2011/0191912 A1 - sequence listing, part 13

SEQ ID NO: 15725 - DNA, 3003 bp, Unknown
  misc_feature (1)..( 3003): 2750-1469P.txt file - cDNA_ID_1016230; gDNA_ID_2684236; Annot_ID_192420
aacggtaggagagtgaaaaagagttggtcaagcagagagatataaggagaaagtgacattgttattttgaccgattcttaagtcttttatataatggaattacctgataaacaaaacaaaaaggaaatattacaacaactacttaaccatatgaggatcacatttcttcttaatcacacaaatgtctaaatacagttgagtttggaaacctctagtcggtccagagtgtcttacgcttttggacctttggtcagccaattattgcaatctttaaaatcagaccggacattaaaaccggtataatgtctaagcccctttaacggggttttacggtttgaagtcaatgtcggttctacactaaaaatcataaaagccaaaccgaactcaatcttcttcccgcaacttcataatctgctttcccaattctctctcgtcggcgaaggtcctgtgaaaccctagacaaatcgcaggtaagttcgactgtagaaatacacactgatatctcaatttatgttctattctctgcttttgaattgagaccatcgaattccattgtttctctgatgcttttttaatctcacaaaattgttaattttgatgatctttgagcagagatgcaagattcaaagattccacctttctctgaagcaaaaagaatgaagattcctactccaaaacaacccttgactcaactaccaccacgtatcgggaaaaaagtttcaaatcggagcaaatcgaaccaggttcatgcgatttcacatcaacttgagatgtctccaaattcagattcatctccaggaaacgagtacagagcactgagacgcaagtatttgctgctagaggaagatagtttcgcgttggagagagagttaaaggaagcagaggatgaggttaaagcacttgaagatgagaaacttgagctcttggacaaactcgttgttatggaaggtttagttgatccttgattctatagcttagcacttgttttatttgccacattcatatgtaaaaaatcgccttatctagtaacattgtttctgcttatataacttataagcttttgttgtgtgttgagagaattggagatggtaaagaaaactgttgtgttcacttgttgtgtctttcgagttaatacaatggtttgggagtaaagacttaaacttgctacagtttttactagattctagtgctaaatttaaccaaaactgtgaccaaatgtcgtttatttgcaccacgtgtccttcatccacaacagaatgatgatggattagatatttctattcaaaaactataacgtgtggctgcaaatcgattcaccgcttcagactctgttttagaccaaagtcgagtgagtgctttcatcttcttcttaagcatctatggccgcgtctctaacatctcttccgaccggtttttgtcttagccatggtgatgaatgttgcaaccgttcacctaccaaatcaccatttccaggccatcatcctctggctgggaggaggaagggtcacttgctccattacgaacgtagtacagtgaggagattggttgtgacggcggcgacggagggatctaaaaaatctaaagaaagtgaaccgtcttgggcgaatcctgactcagatgagccacctccttgggctagaaacgaaggtcgttcttctacgtcccaagagagctttgaggttcctttctttgtttatctgctagcttccgcgattactgccattgctgctgtatgcttcttcttctctctctttcactccttttgttgtttgcattgctgattctcatatcaaagatgttatcttaattatgcatcgtttggtcactgtagattggttctgttttcgagtacacaagcaagaatccagttttcgggatcttggaatctgacagcatcttttatactcctgtgcttggattctttgctcttactggaatccccacttctgtgagttccttgtctctctcttttcgtttttatccatttgatctgtatcagctgaaaaaatggtttttttgcgttcaggtgttcctatggttcaaatccgttgaagctgctaataaggaagctcaagaacaagataaaagagatggctttctttaaaatccttttgtgtgattctgcaactcatacagtgatgattgttgtctccacatatactttgaatataattctgcatttacaaaggagcttgcttctgttcactgtttatcacccgctagattttgtttgtaatttcaacaatatgccatgttccaacgagtaagtgcctgaaattcgatgatcagctgtcctctcttttatttgcccctgtgaaagatatgaatccacaaagaattcgatatgccatcctgcggtttgaatgtctgaagctgatggtaatgtcaccatttgttcaatgagttgatattcagatcaacaatttgttctggaaagacattgcctgctttcatttgttggtaggagattggagtcaaaatatcagttgaaagttaattccttggcgcttgaagattgtgcttgagcagaggctgtttccggggaatgatcacatacaaaatcatgtgtttaattggtttgtctatgaatgtattttcagttgaatataagtcgagctctaggctcaatttagcagccagaagtgatacctttggaaggaagatatctaattggtaagcaaaaactgttaaaagcacttacatacagataaatcaatgtcctttggcccaatattagctttaacaaaggcttaaccttttgaaaactccagttaggcaataattattacgggtcaaatgacaaagaatgaaccttgtcgggctctttaaagatgggttgttgtataaaaagttgggtagttaaaagattggttatttgggctctgcactcaagtgagagagaagatagatagatctgagtagaatcttcgattcattattcgttgtcgtcgttcatctgtgagaagcggacaaaccaaagaatccaccggagctagtgatatg

SEQ ID NO: 15726 - DNA, 3003 bp, Unknown
  misc_feature (1)..( 3003): 2750-1469P.txt file - cDNA_ID_1016268; gDNA_ID_1620720; Annot_ID_49176
agaagtcgtttattcagaaatgattctggtaatcgcacgaagcttattattcatcatcgttatctttcatactataagataataattaagaagatcctagtaaaatttggtctttgaatctgacctcttttctacgttctatattttgtcatgtaatgcgattattttgatatgatcatgcgtcatagaacacacgctccataagacaaaatgtgataacatattaaattcgataacaataaataagacagaaacaaaactaatcatgacgacgtctagttacaggaagatcgcctaaatgactaaattaaataaattatcgggtcaatacaattactaatttgtcttctcgttctaactttgaaatatttagatattgggtctttgttgaaaaaatatgatttaatcatgtcatgatttttctaatcttgacacctcgagttttaaatacaacactaggactatgtaattattaaataatacatgtagttaataaatacatgtgtcgtcgtgttcatgagtttgcctcacctttcctcttaggagactggtctggccgtcggggaccaatgctctgagatacaaaattatttttatactaataatttatagtataataatacgtattctttgtatgcaattcaaattgttttcatgcatccctctctttaaatgaattgcagcttgtccaaatggttaaaagttctcgttagttggaatcaaatatctatatcttcaacattctcagaactatatatattctaaagtttcaataatttttgttccaaacaacaaaattgactctttaaataaagtcaggaagattttggtaatggcgattgcaatctttttagtcaaaagacaccagcaaaatgatcaaaaggcgaatttaaataacttcatttgtaacttctgacgccccgactattctagctgttacaagtgaccaaaatggctaacaatgtacacgttaaacttttgattttcacactaccatattttataaaaatcatgatgttctaattgattatataaataaaatgctttacatatgcatgtagttcacattttttttttttggtttgcaattgtttcttaaataaataaataaaaaacctaatttaaaacaaatcagaagaaaaaaaaattgcaaaccaaagtaatccaaataagctagtattttaatcggattgtgagtactttctccacttctccttcgaggccacgcttatatattaatttgtacaatatgggtaacctaacttggttggaaaatagaaagtgccaaaaaaaacaaaatatgtatggctaaaaccaataaaacgtcccacgtcgactttcaagttaagtccctcaacaatattatttctgtttgacgaatcacattccaccaccaccatgattaccaatcttcttctcccacccgtttctaattcaggccattcacaatatttgatacagaataatgaaacttaatgttgaactattccgccattttactgtttcaattaattaaatatttatctaaacgaggtgctgttagtaaaaaaagttccaatatttttctagctaattctataaaaagacactttgtactgtaagagcagagacgataaaaacagaaaatgtaacgataatttgttacgtcctgtaatgaattgtttaaattcgagtaatgatatttatgcattttctacatatatgctactagtaatcaataaaagcatagtattatcaaaactagaatgcggtggaaataaatagatagaaatcattggataaataagtcccaacacaatctggccagatcaagagaaccgaacctaaaacaagaaagtggagatcacaatccgaaaccctaaataataatacaagaaaggggaatataaaaagaaattagaagaaattaattaaaaacccaatgtgtagtgtgaggaagttgaagattggtaggcaagctgacatgttacccatatctaccttcttcaagcaaagcatggagtgggagacaattcatgtggtctcttatttaattaaagttgcctcttaattactctctattgacaacttattatgatactcctacttagataagttaaatgtatcatttgattataatctaatttattttaaggaagtcttcagttctgttagttatatttaacgcttcagtggtatattacaagaatatctgtactcgagtaaatattttaaaatatcaatcacagaacattggatctttgaatgtgggcatgggaggatatagaatcgtttcgtcatgtgctagtaattgtattgttgacttgaattgaatttgtggatatatatcccgattaacaaattgaaacaaacatgtaaagcaatgtataaatggtaaaagatagaagtaagtttatcaggaaatgcaaaccatcaattcggatataggagtttaaaagtctaatcgaaagttttggagagactaaaatctattacacccaaaaaaaaattgcgttgaaccgttttttttttttttttgggtttttaaaactaatttaattttcataccacgtcataaaaattatattctcagagtataaatttgtatactatgaataaacatactgaaaatttatgaagtgggaataatagttgcaagtggggtgcgcatttggtcaacctttgtaagtaagaaaatacaaaggagagagaattgtgctatcataattttccacattctttttttcgaaaattccatataaaaaagtaagcaaaataaatacattccttgattaattctaattattagccacccacccacccacccatcaaaaattaaaaataaaaattaaaaagacaaaataaaaactctcttccccttcttaagaagaagccatcttggtttcatttcgtcccataatcttccaaacttcaccagaagaaattcttaacaaacaattttcttcataatattaattctcaagatcttaaagattatattaatacgaagagaaaattcaaatg

SEQ ID NO: 15727 - DNA, 3003 bp, Unknown; identical to SEQ ID NO: 15726
  misc_feature (1)..( 3003): 2750-1469P.txt file - cDNA_ID_1016268; gDNA_ID_1620720; Annot_ID_165776

SEQ ID NO: 15728 - DNA, 3003 bp, Unknown; identical to SEQ ID NO: 15726
  misc_feature (1)..( 3003): 2750-1469P.txt file - cDNA_ID_1016268; gDNA_ID_2926214; Annot_ID_142119

SEQ ID NO: 15729 - DNA, 3003 bp, Unknown; identical to SEQ ID NO: 15726
  misc_feature (1)..( 3003): 2750-1469P.txt file - cDNA_ID_1016268; gDNA_ID_2926214; Annot_ID_202834

SEQ ID NO: 15730 - DNA, 7 bp, Unknown
  misc_feature (1)..( 7): 2750-1469P.txt file - cDNA_ID_1016386; gDNA_ID_1421; Annot_ID_145056
tggcatg

SEQ ID NO: 15731 - DNA, 3003 bp, Unknown
  misc_feature (1)..( 3003): 2750-1469P.txt file - cDNA_ID_1016643; gDNA_ID_1620672; Annot_ID_164137
ccggagctccaaggtatcaaagaaaaggtgcatggtgtggatctcaagctcaatacccggtaccatgttattcaggttcatgggagcaaagaaatgaggcaggaagtacaaaagatggtcaatgaacttgcacgagaaaagagtgcactgggtgaaaaaccagatgagattgaacttgaatgccccatttgcttgtctgaagttgatgatggctactctcttgaaggatgttcacacctcttctgcaaagcttgtttgttggagcaatttgaggcatcgatgagaaactttgacgcattcccaatactttgttctcacatagactgtggagctccaatagtagtcgctgatatgagagccctcttatcacaagagaagctcgatgaactcatcagtgcatccttgtccgcttttgtaacatccagtgatggaaagttgaggttttgctccacacctgattgcccttccatctaccgtgtagctggacctcaagaatccggtgagccattcatctgtggagcatgtcactcagaaacatgcacaaggtgtcacctcgagtatcacccgttaatcacttgtgaaaggtacaaaaagttcaaggagaatccggacttgtcgcttaaggactgggcaaaagggaaggacgtaaaggagtgtccgatttgcaagtcgacgatagagaagactgatgggtgtaaccatctgcagtgccggtgtggaaagcacatttgttggacctgcttagacgtcttcactcaggcagaaccttgttatgcccatttaaggacaattcatggtggaatcggattagtcgagttaggtgtcccagagcaccctgttgcccagcctgttcacaggctttgaaaccggactggacccatgtatctatatcctgtaacatctggtttgcttaatgtgtacatatatgtgaacatagtgtagttcggtatagtaccttctttaaccaattgaatgaaccgatcatattctaatccggatgccaaataaactaaagattgttgtaaatgaaagacttgggacttgactcgctacatcactgattacgcgtaaatgtctacagagagtttactaagttgaaagaaaactacttcctaacatacagagacatcgccattaatggccttaacttaagagtcaaaaaaacatttgatgggcctacccttaattaaaagcccaattcgatattcgaatcgaacccaccggcctaactaaactgttcagtgtccccaaatctttttgcaacttctttcttcttcatattcttctcaccgtgaaggcgtcgtcaccgccgatgttattatctccggcgatgttttctgatcatcactgctttactcttactgcgaggttggttattttcaaatcttcttctctccgttctttctttcgaagtcagaaactttgccgccattttcagtaaaagggttgattctacattccctagaatcatctaataactagggttttcattaggttacgtattggttaaaattagttgaaatcatgtttcttatttctcttttcgaactaaatttggtaatcagatctctagagtgtatgatttgtcataacatctaatcgaaattagaatccgtatatgtttcattcagagaataaatcctgacttgttaatttgatatagaatgtcagattctgatgaagctaaaacgtcggaggaagaatctcaacttgctgagcaagaaacagagactcaagaaggtgaaatgactaaaaacttaaagaaaagagatcttgatgcagtagaagatgaagattcgaataacgaaagctccagattagagaaactagagaagaagataaaaaaagaaacagcgaggaagcttgaaactgactttgtgctaacaggggaagaggatgatgatgcattgcccttagcctgttccatttgccaaaacccattcttggatcctgttgtcaccaactgcaaccattacttctgcgacaagtgtgctctaaaggtaatcttttccttacaacaagtttcgtaatttctgaaaacacactcaaaacagattttccttgttattttttttcataatgcagcatcacactgagaacgatacttgttttgtgtgtaacgagccaactctagggcttttcgacacagccgtggagatcaaggaaagaatagaggaagaacgtgagaaagccagaggtttgttaaaaacgcaaaactctctgttttgacaccaaaaacctactcttacaaaactcgctcggtgatgtctctttgtagccatggtaaaggaagtgacagcaatgttagaaaaggcatcgacaatggcggatgacgccaagggcgtagcgcaaaaggttgtaaaaatggtggaggagattgaaacaatggtggaaaaagtggcggctatggccacaaaggcgggagaaacggcgacaatggcggcagatatggtgaaagaagctgaggagacgatggaaacagctaaagctaatatgtccaaagcctttgtggtaatgaagtcggtgaattggaacgtgtaaatcgggtcaaaacagagttttattgtgatctcatgctgacatcagctacaatctttatctaataagatagattctcacaagattcttttatctatctactttttagagaagatgagatcatacttcggagatagataggtgtcgtaaaaattgggaagcttacttggcaggagaagagagatatacacacgtgcttaaagtcaacagctaatccaaaaaggtagacgacaaaccagttaaactaagacacgtaatctatcttaaagatttgtcggttcatcgtaaatccgttggtggattaatatatgtcggtgtcttcgttgattttcttagcctaaccaaccaaacataaataaaaatcgaagctttactttgtttgcttctattatatccacttccaacaagattcctcaaaaggaaagaagagaaagaagataagagatatctggttggtcggagatg

SEQ ID NO: 15732 - DNA, 3003 bp, Unknown
  misc_feature (1)..( 3003): 2750-1469P.txt file - cDNA_ID_1016862; gDNA_ID_1620499; Annot_ID_158808
ttttattcgtactttctcttttgtatatacaaacaaaagctttaaaaaaaaaaataccaattaaaattttactacaataactttctttttgcaaaacaattcactaaatgcgcacaaaaaaaaatgtaatggtaaaatttggggatgaattgaatgaaaacttaaaaaagaggggcatttttgtgaagttccattttgttttctccccttcgttggctctggagtctggacaacaacgctaaaggagaaatctctagatcgcttgtggattcgaagaatctctcacggtcggttcttgacgacggatcaagctctattcctctagtatcatctaatccatcgagcaattctcattttgatcttccgttttcatcatcttctggaatcaattttgctcttgttaaatctgaaagttctgaggataaaatcatgaattccaacttcgggaagagatcatccggatcgaccaatagctttgatttcgatctggggcttggatcgagccaaggtagacctctgaatggtcagaagagccaaacatcttcttattcgagctcgaattcgcagccgagacctgcgtggcagcctggtaagccgtcgtggacgcatcaacctgcaccgaagcagagtacgatccgatctgagatcggaagtggaccgacttcaatggtgggtgatattcatggtaagacgtgggggtcagcttcgggatcgggttcgggtattgggattgtgaataaggatcctagtttgtttggagatttggttggttctgcgataggtcaaggtaaatctagtagaaacgtgccgttgaagaatgcaccgcctgtttcggcttcaggttcgagtaagagtccttattctatggggaatttgggtgattcgttgcctaaatctggtaattcgatgaaaactggtggtggtatgggttatagcagtaatccgagtggtttttctggtggttacacgagctccggtggttttaatgctaatcttggaggtccttcaatgaaaaatatggctgggggcaatctaaatgggtctggtcttccttcgaatagtgatccatttggttctttggttggtttcggatcaaaatcatcaggaagcaaaccaggaaaggttaacaacaatgcacagaatgatacttttgggaattttcaaggagtgtcgaaccttaacagtggcggttctacgggaacaactactcaaatcaacgactttgggggtttccaggcttcgaaatcaaacacattctcatcaggaggtagcttcaatgcttcaaacgttgattttggtgtgcaaccaagtggtccacaatcttcgagtgcaaacgatgatccattaggaatgttctctaattccaaaccctcagctgcaccacctacgccacagaccgaagattggggatttgaaagttttgacggtggggctggttccaccaccgagcttgatggtttgccaccgcctccaccgggtgtatcagctacatcagctaagaacaagggcattgataaccagagacaaggtcagtatgctgatgccataaagtggctctcttgggctgtgattcttatggatagagctggtgatgaagctggatcagccgaggttctttcaacaagggcttcgtgttacaaagaagttggagagtataagaaagctgtagccgactgcacaaaggtatgttaagaaaggcacatttttctttggatgcatcatggaccatggttcatatcattctcatctcagatccttagtttacgaagtctctagttgtattggaatcagtttaaggactcttgatgaaattgatactgataagagttttcaggtatatgaaacttgacaatatgagatttaggttcttatggaatcttaagatagattacgagttagaaatactgtgcacgtatagaaagttttagtgtcttgctttgtaggaaaatataccacaactaaacagttcttgggatcgcgtcatcgtagctagttgattggttgttatgctccatagatggtttcttgtagactcagaacaaaaccaacatcttcgaaacttgttctgattgtcagttatgcttcacagatgttttttgttcactttgaaaacgtgattgcaggtacttgatcacgacaagaagaatgtgaccattctggttcaacgagcactgttatacgagagcatggagaaatacaaactcggagctgaagacctaaggatggttctaaagattgatcccgggaatagaatcgctagaagtactgttcaccgcctaaccaaaatggctggttgatccttcatatatacggatactactcaaagaaaaaaaacaaaaaaccctcaaatatctataatccttcacattgctttgctcaataccgtttcctctctcatccatggaccatgcgtgtgtgtattttttttctgagatttattggttcgtctataatgcggcagcttcttgtagtaagtgggtcatgagtgtatttttttggatggtgcatttatatgttgttgattttcttacacactaattttttttgagtttatcatgaaatgtttgatcatcgatgtcatatgaaatgccaaagatgaccgtaaatttcgcatcgtaactcgcaaagatgaaccttactttgagacgctgcctgcgtgatggacgtgagacgcataacgcatactattaaattaccagacgctcgtggacacaacacttcaataccgaaaactaaactaatcacattgtgatacgttttgtattcagagagccaaaaaaaggcttacaattttgtcgttatgtggattagccttcaatttgttgtaaccgtcatgtatcaaggaacataaaactattagaattattattctaatataaagtaattcatttcactcacactttattaccataaaacatttattttgcgcctataaaggcatttcagctccaccgtaggaaactttctcttgaaagaaacccacagcaacaaacagagaaaatg

SEQ ID NO: 15733 - DNA, 677 bp, Unknown; identical to SEQ ID NO: 14488
  misc_feature (1)..( 677): 2750-1469P.txt file - cDNA_ID_1017007; gDNA_ID_2684122; Annot_ID_191027

SEQ ID NO: 15734 - DNA, 3000 bp, Unknown
  misc_feature (1)..( 3000): 2750-1469P.txt file - cDNA_ID_1017007; gDNA_ID_2926236; Annot_ID_203872
tcatcattctcattctcctcatgactcttctcatctccgtttccatttgcttcctcctccgctgtctcaatcgctgtagccaccgctccgttctccctctttcatcttcctcttccgtcgcaaccgtaacttccgattcccgacgattctctggacatcgagtctctcccgaaacagaacggtcctccgtgcttgattcgcttccgattttcaaattctcctccgtcactcgccgatctagctccatgaattccggagattgcgccgtttgtttgtcgaaattcgaaccggaggatcagctccgtcttcttcctctctgttgtcacgcttttcacgccgattgtatcgatatctggctagtctctaaccagacttgtcctctctgtcgctctcctctcttcgcttcagaatctgatctcatgaagtctctcgccgtcgtcggctcaaacaacggcggaggagaaaacagcttccgtctcgaaatcggatccatcagccgtcgtcgtcaaacaccgattccagaatccgttgagcagcatcgaacttactcaatcggttcgttcgattacatagtagacgacgtagattcagaaatctcagagtcaaatttcaaccgtggaaaacaggaagacgcgactacaacaactgccacagcaacggcggttacgactaatccgacgtcgtttgaagctagtttagcggcggatataggtaacgatggttctagaagctggctcaaggattacgttgacagactctcacgaggtatatcgtcgcgtgcaatgtcgtttagaagctctggtagattttttactgggagtagtcgtcggagtgaggaattgacggtgatggatttagaagcgaatcatgccggagaagagataagtgagcttttccggtggctctcaggggtgtgagtgacaggtgagttggtgacatttgttcattcacttggaaaaaaaaacagagcattacttttggtttgtacatataaacactatttgaagttctttgcttcaattaccgattttttttttctttttctgacgatataacagatgaattctctagttatatattattacttttaaatggtctattttctcttttattatgtccagtgtgattcaacattgatagcgaattttcatttggataactttcttattgaatatcaggaagaaaagaaaactattaggtttataacacacacaaaaacaaaaaaaaaccaaaccgtatttaagagaactggttttcaaagatgagaagcaaaagtttttgggccaacatagttagcccaaactaaatcgaacaaagcacataaactttttaaagaagcaacaagagaagtctgtagaagaagtgtttggtccaataacaaaacacacaaacacagcaagaacgagcgaatctcctcaacttcccaacctaataatagcttgccgtgtcgtgactcacagagtaggaagctaacgttatccaatgcttcgactttcattacagtacctaaacccttcttgtctgcaacactaatagcaactgtgaccttcgctgcaagtttgacattacccggtggttatattagttctgctccagatttaggcatggctgcctgcctgcattggtcaatgagttaaattttaaggtatttcttttgttcaacagcattgcaatgtgcagttctgaactacgtttaggactacgttttaaggaaaatgcaggggaaggattaaggactacgtttgcaacctttaaaggcgtagatgtgtaccatgtagaatattgtgcttgtgctgaactgagaagaccaaactcctgtttaagtcaatgttccagatatgatcttcactacaaatgggaacatatataacaagaaaaatattactgtatagccaacccaagaaaaaagaagctgatgagtcatttaaccttcgttttttcacttatggatttgtggaaactcttgagttgattcattgaataagccaataagttttaataggcatcttcaacggaacatagcagattctattgccacaaacagagttgtagatgtagtggtcacaatcaaaattgaggatgactgggccattagacatgattgcgttggttataaccaaaacattcgtggctcctgctttcttgttgtgatcataaccatgccgcttctctctcgaaacatcaactaggaatggtagcccctgatgccaatgtctgctgtatgaatcaagttgtcagtatctgctccataaaccggttctacttttggaagagccaacattgcctgcaacaacccacaaagtaatggaacacaatttaaaagcttgcttggagaattccagagatagtagaggcttcaaagaagacaaagcttgcttcttcttctttcatgttgttctgcactgagagttgagcgagctgtataggattacatgtccaattccaaagctggatcctttgacctcttgcaaggagaaagattatcaaaggaagagagattggaccagatggaagtaaggaagtacctttttttatggtttacacataattttaatttttaacatttgtttttaaacttttttttttttatcactattaaagtttaaaggtttttttgaagtgttaaattctaaatttttgtctaaactaattgtacacaacatccaaattgtttttatttaaaaatgttttaaaacttctattttatttttttcaacaattttgtttttttctaagtgttaaaattttaaaatattttcttcaaaaccgtattaagagaactagctttcaaagatgagaagcaaaagtattcgggccaacatagttaggcccaaactaaatcaaacaaagcacacaaggaaggaagcatcaagagaagtctgtagaagaaaggtttgtccaacaacacagcaagcacgagcgaatctcctcaacttccccaacctaatagctcgccgtgtcgtgactactcaccgagtaggaacctaaccttatccaatg

SEQ ID NO: 15735 - DNA, 3003 bp, Unknown
  misc_feature (1)..( 3003): 2750-1469P.txt file - cDNA_ID_1017117; gDNA_ID_1621109; Annot_ID_56059
atatacaaataatcacattaacactaaacaataaaattgaataaattcagtgcacctctctccggtgacatcttgaagaatactagtgtgatgggacataggcatgtagtcaacacgagcaggaagtgcacccatgtatactatatactcctacaagtatcatcatcatagttatggttagtcattagtaatataattagaaccatgatatgattataataatcaaataacgaagaaggatttgtgcaattacctgtttgtcttgatcatctttgtctgctgaagcgaaactcacaacaagcaaggcaaagatacatgagaggagacaataggagacagcaggttttgtcatttttttgattgatttggttataatcaaattttacaagattgtgagaatgaaaggattattatagggagagatactgtatgtacatagaacgtaatcaaagtcctcatcaaactcctttaagatttgtttctcaaattattcttatatattaatgacagtataatgtactttccatattaataggtttttgaatgcaccgtttaatttgctaccgtttcttgttctactaatccttgcatcatcttttatttttcttttacttgtattgtttgttcatgaatatagagaaaaatattaaatagaaagaattttctttgacttgatatttattctcttgacaaaagaaaagattgactaaccactagaagttaattttttttttattatgactagaaatgagtataatttgggcaattcagaatgatgggaagtaaggaatgtatattctgaattcggtttattaattatggcagcctaatcatgggtaagaggttcatcatttgaccttacatgaacgaacgaaatattctccacgcgaatattttttcttaaaagtacttttgcaggcgatgtatctaattaattaacctttctagagaggtaacaaaaaatgtaccaaagaaattaagaactgtatcaaatattatccttaaaatatgaccacttgtgaaaactctatgtgcatattcacatttatagatttaatttagatattgtgactaaatgtactcttaatagttagggtgaattatccaatagaaagcaaatatagtatacaaatagatgtatgcaattgtatgtatcggctcctctttcgtccacgcgattgccttcttttgtgctgtattcgtttaaaatcaatagcaacgtacaattgcgtcaagactaatcagcaagaattgcgtcaggattattcataacctaaagtaataaatgtttaaataggtcaaatatatactttttgaaaatacgttacgggagtacataacaccatatattctagcgcatgtaatttctgagtcgaaaagttggagagttgcccaagaactagaacatgacattgatgcggaggaagaacctgaagtagttgaagcttgtgagtatgcgcacgttcaaagaggagaagctatgtgccaaattgacgcttcgtggactggtattaaccagaatgttagtttggggttcatgttgactagctcaacgaccaagctgtttggtcaaagtagccagaattgttatcgcaatgccctctacgcagaactcggagctcttctttggacaatggagtgcactttacaacaaagtatccaatctatacattttgaaaccgattgcttaagcttacttaagatccttgatgaaagtaaagattggccggtggaaaagattttgctagatttaaagctagttttggtcggttttctttatctcatattccacgcactatgaatgtccgtgttgtctgcctcgcaaagagtgcaagagtacgaggtgtacttttttcccatataaaccctctcgtttcggagtagttggcccacgaaactaactttttcgaacaaatttaattatttgatgtttttgcgataaaaaaaaacaaaaaaaaaacttggtttattagagggcacaaaatcaaatttataacaaaatgaagttattacgttaggttgaaaaaaagtatgacgtttcagggattaataatttagcgttaatgacttaatggtcctcatcttcatcagattagaatgtaacattctatatgtgtcgcaccaaaagactagtctcgtcctctatagctattagcctattaccatcgcaatctccgacgtattttccactagacttgtagcatgttgccttctaaagccgccacatgatccactaccatcttcatttgcccatcggccatcgccaccagaaccaccacattgtttaattatattatatggatcagaactatattcttacaaatattatgggaagttgggaatgtagtggtcaattcatcacatcctcatttcattattttcttcttctattaaagttgttaattcgacattttcaaattgacgttgcttattatcattaccacactcacaaatacaatcattgctctttaacgcaattataaagctcaaaactacatttccaataataccccttggaacatgctcttactttttgccagcctgctaacgaatcattagttgccacatcagcacgataactgaagtctttgtctttttctcaaacgcgacgtcgtttctattccctgacacagagatacgtatagatacaccgtatattcactttattgctcctctcctctttctcacgaagaagaagacgaagcccatcaaattaaacaagaaaaattccattttcctccattgattgtgagtgagaacaaacatttaaagcttcttactcaaagtttctttctttatagatctcaaaaaattcgatatttttctcgattcatccgccattaaggtacacgaatcgtttttcgtcttctgaattacttgtgggttcgtcttaatttcgttggatctgggtttgattttggagaaaagtaataaagtttctgtcttttttttctttcgaatttgtaggttttattgcgagatcgaagagagaaggagaaaatg

SEQ ID NO: 15736 - DNA, 3003 bp, Unknown; identical to SEQ ID NO: 15735
  misc_feature (1)..( 3003): 2750-1469P.txt file - cDNA_ID_1017117; gDNA_ID_1621109; Annot_ID_171741

SEQ ID NO: 15737 - DNA, 3003 bp, Unknown
  misc_feature (1)..( 3003): 2750-1469P.txt file - cDNA_ID_1017181; gDNA_ID_1620744; Annot_ID_49676
ctcataaaaacatatgaattcactgatatgaaaagctgactcaagtatatgtgagtaggaagaaacacgtgctaaatgaggaagagcacgtgaagactaatctagatgcatttgtctataaatagtgaacgtagacgtgtaattagcttgttgttgttaagtgacatatgtgtcattaagagaatgatatattcagtgatgtgctgagtagttctcatctgtaacagaaacatagtatcattgttgagaaataaatattagactttccatttctcaacattaacaaaatggtgcggtgaactacactagagtttgcaagctgatataactcattgtactctttgcattcgattaatatacaacagaaaagttcattgactaacgatccatggtccaaaatttcaccagtcaaagagttttgggcctttaatcaaattggtgcattgacttgggcatgagaatgggtccattgacttagcacaagcagtatataataatatgcaacatatataatccagtgaataggttatgggtgggtgatcattgtgtttctctgtagtttaattaagtattaaacgtaattatttttatttatgaaatactaagtttctcctattaaaataaggttgagtatatgcccttgaatttggggagggctaatgcaaagtagatatgtgacaaagtggaaaagcaattaaaagaaaacggcatagagtgcggcctcgggtaaggctaacagctagctttctctacatatgcacgacactaagaaaaaagtaaacggcttgatgtttccatctcttatcgaacaatattgtttaaagaatacagcttgtgtattgactttcaaatcttttatatattccgtgaggatgcaaagaaaacaagccgtcgaattcatgttatctatttcttttcttgagcatatgacagattttgatttaattactttttgttgacatgtcgaaagaattgaaactacgatagattccttacatatatgaatatatccctttataaaattagttaccatatgttctctttgttacatgttgttgaatcatagcaaattacaaatggatgataaacttatggttaatgagatactatagagtaatcaaaaccgtaagataacttaactatcagtataaatgatacattgaaaaatgataactacttgattaccatgatcggatgaaaacttggttaattaataacataacttgtactaattatcacagaactaactgaatcttgggttttaggatgatatgggaggtggagggaatgaagaagatttggtgggaagctgccccattagagcaaaaaacgtgcccaccaactcaaaggcctcattagcccccaatgtgcatttttgttatctttaccagttgcgttttttcttctgttttaaaaaaaaaaatatatctcatagtttgttttaattcaaggtgcatttatttcctggctattaaatctgcaattcttgtacaatagttcttgtctttttcatgaaaataggttttgttttatttgcacaagataaaatatcttcgaagctagtaaaatagtaaaagaaggaaagagtccattaagtttataggtgcatgtgggtttcacagagagttcagaaaatacaaatagaaagctatactttttacaatggagattattcttttgtgtaacgtttttatgtaagataatgtcattttataagttactaattcactcttttttattatttttgttggtgttgtttttctacttctatagatacaaaaacataatatttgagttgttttacactgtcttgtaagttctaattgattaatgttatgaacttagtttatgcaacgttctacaaacaaagagctaattttacaccagcaaaaatccctcaagtcctacaattatatgtccatcacaaccgagttcgaacaatcatataataattatttttgttaatgaaacgaggaacgtatgatatgagaaaaggtcatttcttaatttaaataaatgaaacagtgatatatctttggacgttatctctcgacttgtaaacgagtttaattacattatgcgactcaactttgtaatcaattatttaaagttctcaatttttgtcaattccgttacgtaaattattattagattaacaatttcaataagataacttctcttgaatattttccgaatatttcgttttaattagatattacaactatggttataaaaataaaataaaataaccgtaaaagagtcgtcgaatttggaatataatttgtaatagtactgtattctcctgtcagttttagacacgtggcagttcacgtgtcatatagtcataacccgtacgtttactctttgcctctttcccttttatattcaaaactcctttttgattttgtctatcttatctcgtgaatcgttaattcgttatcaaaagagcttaaaaagctttaaaaaattaacggattagtaataattcaaccgaagagaaacccaaggcaccgaagaacacgatttcagaggtatgatccggaaaaaaaaatccaaagttttgatccttttgttttttggtgagcaaaaaaactggtcctacgctagtcaatggacattctcctaaatttttgtctctgtttttttagattgtaaattataaagtaatttctccaactttctggaaaaatccatccagcaaaagaaaagaataattggttttattgatcaaagatcttcagttttcaaaattaagcactaattatggggttttgtttattaatgtcctaaaaaagagttacacatagagagacattaatgcttgcagtttagtttaaagagttttaagaccatatctcactcaatccttatttccttacatttgtcgtcttttgatgtcatagactcagagatatttatttatcttctttctctctcatttctcattctcatatttacttttgatctcgtggtgttagaatcaaagaaaccgcttcaaggatg

SEQ ID NO: 15738 - DNA, 3003 bp, Unknown; identical to SEQ ID NO: 15737
  misc_feature (1)..( 3003): 2750-1469P.txt file - cDNA_ID_1017181; gDNA_ID_1620744; Annot_ID_166583

SEQ ID NO: 15739 - DNA, 3000 bp, Unknown
  misc_feature (1)..( 3000): 2750-1469P.txt file - cDNA_ID_1017282; gDNA_ID_1621175; Annot_ID_57313
gctatgtctgagcttcgtgctatggtccatgctctctttttagaatcatgcgctggtgtggaattagcttcacgcctactttttgttgtgttgactgtatgtgttagccatgaagcacagtctagtggtagcaagagaccgagaagtgaatatgctagtactactgaaaatattgaggcgaatcaacctgtatctaacaatcaaactgctaaccgtaaaagtaggaatgtcaagggacagggacctgtggcagcatttgattcatacgttcttgctgctgtttgtgctcttgcctgtgaggttcagctgtatcctatgatctctggtggggggaacttttccaattctgccgtggctggaactattacaaagcctgtaaagataaatgggtcatctaaagagtatggagctgggattgactcggcaattagtcatacgcgccgaattttggcaatcctagaggcactcttttcattaaaaccatcttctgtggggactccatggagttacagttctagtgagatagttgctgcggccatggttgcagctcatatttccgaactgttcagacgttcaaaggccttgacgcatgcattgtctgggttgatgagatgtaagtgggataaggaaattcataaaagagcatcatcattatataacctcatagatgttcacagcaaagttgttgcctccattgttgacaaagctgaacccttggaagcctaccttaagaatacaccggttcagaaggattctgtgacctgtttaaactggaaacaagagaacacatgtgcaagcaccacatgctttgatacagcggtgacatccgcctcaaggactgaaatgaatccaagaggaaaccataagtatgctagacattcagatgaaggctcagggagaccctcagagaagggtatcaaagatttcctcttggatgcttctgatcttgcgaatttcctcacagctgatagactcgcagggttctattgtggtacacaaaagcttttgaggtcagtgcttgcagagaaaccggagctgtctttctccgttgtttcactgttatggcacaaactgattgctgctcctgaaatccagcccaccgcagaaagcacctctgcgcaacaaggatggagacaggtaaacctcagcacttctatttcccagctcgcttacagtttccttggtagttctttactaatccaattaagtcgctcgacttcatacactgatcatattttttatatatcaggttgttgatgcgctatgcaatgtcgtatctgcaacgccagcgaaagcagcagcagcagttgtccttcaggtccaaattactctttgactttttatttcatttgtcaggaatgcaacacctgtgtaaagattaaactgcggaaaacctatggcctgtgttaatgttttataatgcttggttcactcatttgatctctcatgaatttataaaaattaagcttggaatttatatgcaacacttgttttaatatgccaaggataggaaataaggaagaaaaaatctgtgtaaaataatggcttgtttcaagctcatatgttgaaggatttactctaatgctctattgtctgaaatggtcttgtgttatttacaggctgaaagggagttgcagccttggatcgccaaagatgatgaagaaggccaaaaaatgtggaaaatcaaccaacggatagtcaaagtgttggtggaactcatgcgcaatcatgacaggcctgagtcactggtgattctcgcaagtgcatcagatcttcttctgcgggcaactgatggaatgcttgttgatggagaagcttgtacattacctcaacttgaggtactgcactgttatagattgctcttcaatgcccttcttcgggctagagtaataatcattttctgattccactgtattttaaacttttgcagctacttgaagccacggcaagagcaatacagccggtgctagcttgggggccatctggactagcagtggtcgacggtttatccaatctattgaaggtaaaagcagaatcgaacagagcctatggtttcctgcgtcgattgtagatgatcagtagtaggtccagttaccaaagtgcttaaccttgttcacatctttttgcttctatgcagtgtcgtctaccagcaacaatacggtgcctttcacacccaagtgcacacgtacgtgccttaagcacgtcagtactacgtgatatcatgaaccaaagctccatacccatcaaagtaactccaaaactgccaacaacagagaagaacggaatgaatagtccgtcctatcgattcttcaacgccgcctcaatagactggaaagccgatatccaaaactgtttaaactgggaagctcacagcttgctctccacaactatgcctactcagtttctcgacactgcggctcgggaactcggctgtactatatccttgtcccaataacgagcacccacttttgtttttggtaaattttagttctctagacaaaacatttggacgtagaccaagaagaatatatatatagtttgttgtatgtaatgttgtaatgatgagtgactgacgcaatcactcccaccggcgttggatttgctctcgctcggtgtcttatataactcaacctcttctctgtacattttaaatgacgaagtagctcaatctttttttttgtgcgtctggtgtttagtcttcagtggattctaaatcgtaatgtatagaagtgaaaaatttacaaatttacttatttccgaatactcttaaaacagcaaaaattaatattgcaaaagataatttatagtattttaatctttttcctccaaaaaaaacattaaagggtaaattagtaattaactacaggagcttcatattaggttggaaaaccctaaatatgccgcttataacagacctgagcttaagctgtggtggcgcctccagagtctggtaaaagagcttaatcctcctctcgcgatctttctcggcatccaaaaatg

SEQ ID NO: 15740 - DNA, 3003 bp, Unknown
  misc_feature (1)..( 3003): 2750-1469P.txt file - cDNA_ID_1017282; gDNA_ID_1620737; Annot_ID_49503
cttgctatgtctgagcttcgtgctatggtccatgctctctttttagaatcatgcgctggtgtggaattagcttcacgcctactttttgttgtgttgactgtatgtgttagccatgaagcacagtctagtggtagcaagagaccgagaagtgaatatgctagtactactgaaaatattgaggcgaatcaacctgtatctaacaatcaaactgctaaccgtaaaagtaggaatgtcaagggacagggacctgtggcagcatttgattcatacgttcttgctgctgtttgtgctcttgcctgtgaggttcagctgtatcctatgatctctggtggggggaacttttccaattctgccgtggctggaactattacaaagcctgtaaagataaatgggtcatctaaagagtatggagctgggattgactcggcaattagtcatacgcgccgaattttggcaatcctagaggcactcttttcattaaaaccatcttctgtggggactccatggagttacagttctagtgagatagttgctgcggccatggttgcagctcatatttccgaactgttcagacgttcaaaggccttgacgcatgcattgtctgggttgatgagatgtaagtgggataaggaaattcataaaagagcatcatcattatataacctcatagatgttcacagcaaagttgttgcctccattgttgacaaagctgaacccttggaagcctaccttaagaatacaccggttcagaaggattctgtgacctgtttaaactggaaacaagagaacacatgtgcaagcaccacatgctttgatacagcggtgacatccgcctcaaggactgaaatgaatccaagaggaaaccataagtatgctagacattcagatgaaggctcagggagaccctcagagaagggtatcaaagatttcctcttggatgcttctgatcttgcgaatttcctcacagctgatagactcgcagggttctattgtggtacacaaaagcttttgaggtcagtgcttgcagagaaaccggagctgtctttctccgttgtttcactgttatggcacaaactgattgctgctcctgaaatccagcccaccgcagaaagcacctctgcgcaacaaggatggagacaggtaaacctcagcacttctatttcccagctcgcttacagtttccttggtagttctttactaatccaattaagtcgctcgacttcatacactgatcatattttttatatatcaggttgttgatgcgctatgcaatgtcgtatctgcaacgccagcgaaagcagcagcagcagttgtccttcaggtccaaattactctttgactttttatttcatttgtcaggaatgcaacacctgtgtaaagattaaactgcggaaaacctatggcctgtgttaatgttttataatgcttggttcactcatttgatctctcatgaatttataaaaattaagcttggaatttatatgcaacacttgttttaatatgccaaggataggaaataaggaagaaaaaatctgtgtaaaataatggcttgtttcaagctcatatgttgaaggatttactctaatgctctattgtctgaaatggtcttgtgttatttacaggctgaaagggagttgcagccttggatcgccaaagatgatgaagaaggccaaaaaatgtggaaaatcaaccaacggatagtcaaagtgttggtggaactcatgcgcaatcatgacaggcctgagtcactggtgattctcgcaagtgcatcagatcttcttctgcgggcaactgatggaatgcttgttgatggagaagcttgtacattacctcaacttgaggtactgcactgttatagattgctcttcaatgcccttcttcgggctagagtaataatcattttctgattccactgtattttaaacttttgcagctacttgaagccacggcaagagcaatacagccggtgctagcttgggggccatctggactagcagtggtcgacggtttatccaatctattgaaggtaaaagcagaatcgaacagagcctatggtttcctgcgtcgattgtagatgatcagtagtaggtccagttaccaaagtgcttaaccttgttcacatctttttgcttctatgcagtgtcgtctaccagcaacaatacggtgcctttcacacccaagtgcacacgtacgtgccttaagcacgtcagtactacgtgatatcatgaaccaaagctccatacccatcaaagtaactccaaaactgccaacaacagagaagaacggaatgaatagtccgtcctatcgattcttcaacgccgcctcaatagactggaaagccgatatccaaaactgtttaaactgggaagctcacagcttgctctccacaactatgcctactcagtttctcgacactgcggctcgggaactcggctgtactatatccttgtcccaataacgagcacccacttttgtttttggtaaattttagttctctagacaaaacatttggacgtagaccaagaagaatatatatatagtttgttgtatgtaatgttgtaatgatgagtgactgacgcaatcactcccaccggcgttggatttgctctcgctcggtgtcttatataactcaacctcttctctgtacattttaaatgacgaagtagctcaatctttttttttgtgcgtctggtgtttagtcttcagtggattctaaatcgtaatgtatagaagtgaaaaatttacaaatttacttatttccgaatactcttaaaacagcaaaaattaatattgcaaaagataatttatagtattttaatctttttcctccaaaaaaaacattaaagggtaaattagtaattaactacaggagcttcatattaggttggaaaaccctaaatatgccgcttataacagacctgagcttaagctgtggtggcgcctccagagtctggtaaaagagcttaatcctcctctcgcgatctttctcggcatccaaaaatg

SEQ ID NO: 15741 - DNA, 3003 bp, Unknown
  misc_feature (1)..( 3003): 2750-1469P.txt file - cDNA_ID_1017362; gDNA_ID_1972158; Annot_ID_179505
ttgattaaaaaagtatcgtagacctcagagtttcctcttgatttcactaaacaggggaaagtaacatcgatggttgctcaagtttagctgcaataaactcaagaacttagaagaatactgtacgatcacatcactagggtcttggaaatctaaagaaggcaaaaagttgtgaagccgtgaaaggagagacttgatagagctcagaccaatctggatatttctgttcaagtgtggtctggagagcagcaaagaaggaagccaagtcaaaggggaatcggtaagcgacccaagcctggattgttctttgtatgtacactacaatcaagccattaccgcccatgatcatcggtttaatcatcattttcacggagattgctgtttggttttgatagcccagatggatgaaaaaacgcaggaactctttctcagatctagttcggttaggtaacttttctctgttttttgtttcttttcgctttcccttagcattttatttccatagaaaatgtagccttttttgcccacatagaaactaatagaatccagggcttatcgtcaatcttgtttctaaaaattcaagaaagaatttctctactatttttagaaaaagaaaactgtagtacactttttagctgtacctgtagcttaattttggaaaattacggttatgaccagaagaagatgttgaatcatataacttcgtaagtctaaaaaaagtcaagtgtaaaaaaaaagaaaagggaaccataaattcatataagataaccgtttgtaggtattaaactatgaatgatgacgcttattcaggccaggcctaaatagtgtggcttatgttttgggccattaatgggctcgaaagtagtatgaaaatataagtaaaacagtatagcccatcattctttttgtgtagccatgacctgtgactgtgataaattgtacggagaaaatgccaaaactaacaataatttcatgtctcttaaacgtctgagttaatcaaaacgagctcatagttattgttttgttttagagtaataaacttagacgtaaaagagaaataaatgcattgttttggacctaataatagttgaccaaacattatagaatataataatttgagattcatatcatgatggatcttaggctttttctttgaaatatgatgagttgttttgtcacattgcaaattacatggttcttatgttgtttgataaactcggcgagtatggtattataaaagagaaaaataatcaggggaaaaagcaagcaagtcaacattgcgcggaactatatataatcagaagatcttgtttggtgcctattattgcctaatgacacaaaactattttgtagtgttttttttttttttataaagtgtaggaagtcggaccactcgtttatgagaaatcgaatttggtatcaattaatatagagagtaatttcacaaaaaaaaaaatggtggtcctgaagcaatggttgaatattacgtagaaaatggtattcccagaaagttccatagagcgagcaggccatgcccataccctgcctgcgtcttgtctcgtaacgcaacaatcaacaacttgatgaccattacggttatatggtttaattcgatttctttctcttggttcgctttgattttggttgggccaacggttaaatttaaatccaaggttacgtaatttaccattttactgcaaatattgtcttttacatatttactacagatgggatttttatttaataaaaaagggaaatataaaatagaaaagcgttttctttttttctttctttctacagtctactctcctgtttggtctctctctctctctcttttttttttactcttatctctgtgcaagcaacttcgtctctctcgataatggcgttccgatatcttctcgctgtctccgtcttcggagtttttgtttgaattcttcaaaggacagtcggatctttgttttacactatcttcataatctttgttggatttcatcagacttgtcatttattaatccatcgcgtttctcagtgtttctagttcgccaatttcggtttttatattggctattaacaattcgtcgacataactttgtgtgttttcgagtgtgtgagatttttagggttcgttcttcaaaggcttcagggtcgcgggaaggtgagattcgattggatcttttttgttgttgtttagtttgttcctctcctcattgtatatatatatatatatatatatatatatctaaacttttctgcttttttgattttattacaatattatttttcaaagtttctgttcatgtgggttttttttgttctttgttcttcttctgtttttatttttttaagaattatattactctctcttttattcatcaatctccggcaatttccctcaatctggagttgatgaactcactcaaactctgttccacgttctttacaatcaatgatttcaaattctgaaaatcaaagcttgttttgttgtttcataaatggcaaaaagattctggaattaggtttcacacatactgcagtttgttctttatctgggatttttgtttaggttttggttttgtgtttaacttttttcttatgaaatagtttttttttaattagatagattctgtagagtgcttacttgggatctgaaaccttattaaacaatgtttgagagactcacttttcatgattttttgattaattaaactaatcactgtggaaaatgctttcactttatactactactattctcttctttttagcttcctaatatattttattgctttgattgtttgttgacttgtgctactactagtactgtagaaaaactaactatggccatcggctaactggttttcttttgttattcaggtttatgtttgcttgaaaattttgatacaaattgaccaatatgttgaactctatggactgcattgttgtttttggtgctaaagagaacacttctgattgaaggatgttttcactttacattcagcagtaatg

SEQ ID NO: 15742 - DNA, 3003 bp, Unknown
  misc_feature (1)..( 3003): 2750-1469P.txt file - cDNA_ID_1017377; gDNA_ID_2936565; Annot_ID_194609
acaagttccagacacgagcaccggacatgcatgatctatcaaatcttgaatattataatcagattcgatatagacatacattatatacacataattatagagcaagacaaactataatggtgtttgtccttgttaacttagcatgaccattttgaattcgttgtctcagattttgatgcttagaattcgtgcctcatatttgttagaagaaaaacacaacaatatcatcgacgtatcaagtatgaaaattttgatcattctttaaaaggagataatttagtaattgcacagaaattagtcaaaaggcgacgggtacgtgttttcaggttcatgcactcttaaaaaagaaagaaagaaagatatactattttatggtcgctcagactgttgtctagtgtatggatttatcaaattcgttagttaagcctgcctatactattaattaactaggtttgctagctgtgtgaatagcgataaatatgatttaaggaccacatttgttttactttacatgggttgtgttttgatattatgtagtccaatttatggatttcggattaaaaataaaatctcgttaaacaaaaaaataactaagttatcattccgtcatagttgcgcatctcactgagatactagtgtcatttcgagtgagtaatgaaccacataatctatatttggacattggagaaaataaacgatatgaagtgtgtgatttgtccaacatgacaatcaaaataaaaacataatatgatctatgtgaattaataagaaacagaaaaaggttaaaattgaaacaaaaaaatacgcaaagtgacaataaaaagaaaaggaaaaaagaatgaaagagtggtagggttggtcgggagaggctgcaaaagtcgtgagagtgagtgaaggaggcttcgagcagccgacatcgagaatctttaaaagtcgcaaaatatcagtaacaccttatcacatatacaatatacgagcatctgaatatattttctattttaatatatgaccaataattaaagtttcaatttagcttttcttcaaacaaaagggcttgaagcttcctctggatctatctagaaccattaaaaaaaaaaattaaatgttaaagaaaacaaagagatgtcggcaaagcttagtagaagcccaacaatttaaaatataatcgctacctcgctagaagcaaggctcgttagaaaatatgggtacttattgggccataactttgggccggaattcaacagaatttttaatatgtattgtgcaatcattttctagagatccgagtactttcattctttcaagttaccagcaatgtcacaaattggaggaaaaatacaaatgagtaaaaaatccaaatattgagggagatatttttgaggctgggaaaatggataacgaaggaacgtttgtgaagccatttacctatcaatttttggaccgataaggtatttgcatatcaatgggcccattattgacattgacttcttagctacaatatagtttcaacttgattatttcactttcctcgattatgacttgtattttccgcttattggccaatactcaaagaccttaatatattgctattcttttatattatcacctgatagaaaaataaatcttaaattcatattaaattaacttatgtatttaagcttataaaataaattgctcattaatacaactctttatttaagatcaactattttatttttgttaatttataaccaaaaaggtgcatctagaagctggagaaaaaatacgtaagatagaaaagagagcccatgtttctaataaattctactactaccttatccaaatccatctgtgtgatacagatgcgcaagtacacgtggcatccatctaggcgatttatttttcgtctgccgttagttgatgacgtgtctagctggtacaatttctcgttctcacgtcatccggctatattattgaaatccctttttcacccttccattgcacacattttcctctcttgtttttaagtcgtaaatttcacacaatttcctaatttcttattttaaatgaaaatgaatgaatcaagaaacgacgaaatcaaaacttttccaccaatcaattttaaaagaggcttttgaattattttgtcgaccaaaagaagaagtgaattattccatgcaattttatattaatagattttattattatctattaatattgtgttggttgatctttgctcacattacaagtaattgactgtgtcctaaaatgaaaacaaaatcatgtgttcttttagtaaattatttggaactatttatatatatatatatatatatgttgatgtctttcgttagtatatttttttcaattattttatacaaataagttgaggttagtactacaatatcatattagctttcaatattgttttttatatacaaaaaaaaacaaaattaggaagattatggtttacataaaaagttggcaaaattttattttcatgactaaaaaattaggcaaaatgaaacaaaatttggtgaaagggtaaaatcgacaattaaaacaaaaactgcgtcgataaagtaacggagattctttcactcctttgatctctcaagtgaagaatctctctctatctctatcttcttccattgatcctttcctctctctggcttgtttcagagctcttcgatcttcttcttgatcgatctacgtgccactgtttataccattcacgatctaatccggtttcaattattactcacgaaatcgtaagtgaatcaaaaactgtttacaatctttctaattattgatcatcatcatcatcaaaatatttgtgaatatctatggtataattcgatgatcattgattgttttgactttttgagaatatatatggaaactactgtttcgttgtatggatcagtgatctagaattttgccatgtttcgtttactttatgagattttggatttcgttatgtttgacactaaaatactctgtttgattgaaggaaggaagatg

SEQ ID NO: 15743 - DNA, 3003 bp, Unknown
  misc_feature (1)..( 3003): 2750-1469P.txt file - cDNA_ID_1017476; gDNA_ID_2214638; Annot_ID_136185
caagatgctggtggctgaaatcgacgaaaagcacaagggagactatgactttctatgcttgccgacagactttaaggtattatactataagagagagtgaactcatgatgcacttgtatgacctgagaacttactaacaatctagcttttttctggatacagaataaatgcaacatgggtcacgcttttatcaacatggtctctccattgcacatcgttcccttccaacaggtttctttaccttttctcttcagtattgtctttaaaacttctcttcactagtcatgaagttgactatgtattgtggatatggtaattatccgattcaatggcttgagattgttatagctaaaagatattcataatgtgtgtttctgcagactttcaatggtaaaatatgggagaaattcaacagtgggaaagttgcttcattggcatatgcagagatccaaggaaagtctgcccttgcgtcatacatgcagactccaagttctatgaaggaacaaaagcaattgtttccagaagtctcctaccatgatgatggtcaagacgccaatgatcacgtatgtttatccgatacaaaatctcatttttgtttttgtttttgatacatgatttcaaaatgcatatgcagtatcttcagatttttccaccgatttcaccttgtatctatgaatcatacaggagcaactgttttcaagcatttggaacataaccgcgcctgattcagattggtcttacacaatggatcttatcgaaaatccgagggagaacggtaactccaagaatgctgcagaagagtcctcttgaatccccactaaaactagtagttgggaactctaactcaccatcaaaggtaaactaagtgtacaggtctggcgcggttatggaagaaacagaatgtacagtattaaggcttgttttctccacggaacaaagtaaccagtttttagggattacttcactcgaagcaaccgattaaagaaacatccctattagtacattacgttgtatactttatattcggaaacttctctctatatcagtcatgtgtatataacatcctcttgcgtgtacattatcctttccatgtgaaagacatgatcagtatttagttgtacaacaggttcgttataagtttctgtctcaattagttatcattacaaaaccgttacacgtctctctctatgtagacatctatccatggtttcaatgacggatcagactcttcttcaacctttcctagccaaacccaccaccaaaggcttagcaacggaatcggattcaggtattattctgcggcttttctctatacttctcgtcggagcaatctctttgtgggcaaaccatgaggcttcaaaaggcttctccataagtatcatcaatgatgctaaagattctccttccggtaaaagattcgcccttttcttcgaatctgatgatacggcagtgcggatattgctcgatgcaagcttctttgtggagaggtttctctacgagggtgttcctcatcgtctccgtaagcctgtaaaccacgttaccgtccaattctgtggaaacagtagtgatagagtagataggttctcggtaacttcaggtgcaagtcatggagagtatgtgatcagattaagcccatctctcacggaaagaaaaaagtttagcaacgccgtggaatctgcattgcgacgttctatggttagaatatggctatggggagacgagtcaggagcttcgccggagcttgtggccggcatggtggagtatttggccgtggagagccgaaaacgacgtcactttgaaaagtttggtgggaattggaaggataaggaaaagtctgtgtatgtggttagcttgttggattactgtgaacgacgtagcgagggtttcatccgacggttgaaccatgggatgagacttaggtgggatgatcggacggtggatcttgcttcgagtggtgcgtgtggttcacgcaaggatgtgttgcgtgagcttaagatggacgacagtggattgataattgagagacgaacatgatatgttctcgtgctgccatattgtagcacacatggctccacgtcattatttcaatgtgtataattcatcttctatattcttatcgaaaaatgttttttttttttttttgtcgttcgaaaaatgatttaattttttctcagataaataaaagaaattatctgaaatttctttgttgttagtctcagaaaaagaaattattggagcccagttttggtgagtggaaacttttggttttgttatttcaaggccttgtccaacaagagtaggatcaggacctacgggcctatttatatagtatatttatttgagtgtcagtgtcacactaatcaaggtttaattttaaaattgcagtattaaatattaatgaaggtttttatgcgagctgatagcggcctcaaataaatatattctcgattggatttctttaaaaaaaaaatcactttaaagttgacaaaaaaactcagtttaaagaaaattaaggtggaattatctagttaagtgttactctttaatatttggctaattgcgttggttcatgcctgtttaagaaggaaatataaaaagttttgacttaggaaaatgaaaatgaaaatgaaaatgatgcagcttcccagcttttttacagattccagatattgatcagatttttgataccgagatttctcttctctattgatttgatagagtttgggaaggttttcaaatatcaaagaatggaaataatgacaacattaatggaaatacattcagtaaacagtacctaaagttttatttttatttgaaattaaaataaagataaacgtatcatttacagatttggggtacagaaataaagtgcaaggaatcaaaattgtcagccgaacaacaaaaaaaacaagggcttttcagaaaaataaaaaacctttaaaccctttttttgtgtatccgattccgtcgcaagtacattcggactctttcacggcgtcaatg

SEQ ID NO: 15744 - DNA, 3000 bp, Unknown; identical to SEQ ID NO: 8470
  misc_feature (1)..( 3000): 2750-1469P.txt file - cDNA_ID_1017589; gDNA_ID_1971811; Annot_ID_175731

SEQ ID NO: 15745 - DNA, 762 bp, Unknown; identical to SEQ ID NO: 139
  misc_feature (1)..( 762): 2750-1469P.txt file - cDNA_ID_1017618; gDNA_ID_3159; Annot_ID_146132

SEQ ID NO: 15746 - DNA, 3000 bp, Unknown; identical to SEQ ID NO: 641
  misc_feature (1)..( 3000): 2750-1469P.txt file - cDNA_ID_1017693; gDNA_ID_1620302; Annot_ID_152658

SEQ ID NO: 15747 - DNA, 3000 bp, Unknown; identical to SEQ ID NO: 6718
  misc_feature (1)..( 3000): 2750-1469P.txt file - cDNA_ID_1017738; gDNA_ID_1621102; Annot_ID_55900

SEQ ID NO: 15748 - DNA, 3003 bp, Unknown
  misc_feature (1)..( 3003): 2750-1469P.txt file - cDNA_ID_1017738; gDNA_ID_2926189; Annot_ID_140938
cgggctctcctttctaactgcattcctagaaaatattaccctaaaggcctttgtcttggcatcctcgtcctcttcagcaggaactcatctgtcttggaagaattattaccatgtctgcttttgtcagcaaatacgaaggtaagtacacttaatatgcactcttctcttcgtgttccagtaatcttcagttctccattttatgtgctttctgagttcagatgagctgatcaagacggccaagtacattgcaacgccgggaaggggcattttggcggcagatgagagcacagaaaccattgggaaacgattcgccggaatcaatgttgagaacactgagtccaaccgccaagcttaccgtgagctcctcttcacttcccctggcagttacccttgcctctctggtgttatactcttcgaggaaaccctctaccagaaaacctctgatggcaaacccttcgtcgatctcctcatggtccgtctcggaaaaagcaaactccagctctagtcttagtcattgggtccaagagttgcagagttgaagctcttgacatgacccaaatggaacttactgtttcagtttggatctgatttttctttggatcaggagaacggtgttatccccggaatcaaagtggacaagggtttggttgatctagcagggaccaacggcgagaccactactcaaggtctagactcgcttggtgcacggtgtcagcagtattacgaggcaggagcccggtttgctaaatggcgtgcattcttcaagattggggccaccgagccaagcgttctctccatccaagaggacgccagggtgctagcccgctatgccatcatctgccaggagaatggacttgtcccgatcgtcgagccagaggtgctgacaggtgggagccacgacatcaagaaatgtgcggcggtgactgagacggttcttgctgccgtgttcaaggccttgaactaccaccatgtcctcctcgaaggcactctgcttaaacctaacatggtcactcccggctccgacagcccaaaggtatccaaactagatgttgcaatccggttttgttttggagtcgttgttttattggtcttatattttgaaactgaaaccacaaccaaactgtatcggtgtgatgctattttatttaaatttacatgcccggtccttacgtaaccacaatcaaatgaatcacagagacatcaatacctcgaaatgcaacgttaatttgctacaaaacgctaaaatagttcttcttacaggttgcaccggaactaattgcggaatacacggtgactgctctgcgccgcacagtcccaccagctattccgggaatcgtgttcctctcaggcatacagcgcgaagagcaagcgacactaaatctaaacgcaatgaacaagcttgatgtgttgaagccatggacgctcactttctcttttggcggagccctccagcaaagtgctatcaaggcttgggccggtaagcccgagaacgtagccaaagctcaggccaagttcctgaccaggtgcaaggctaacaaggacgctaccctcgggaaatacaccggctgggcttctggtgactcggccgctttcgagaacttggttgtgataggatacaggtactaggatcctttgagaacgggcgtttgcctttgatgcggtttgagtagatatctaatgtttcgtgtgtgttttaactgtttgaatgttcaattttgcagactgctaataattgttattttccggttactgtcaaactatccatgtgaaattcacgttttgaaaagctaataataatgtttttattgtatgagaataaatttagaaaactaaaaattgttaaggacatattacaagatatctcctcttttcgctttgctctagtgcacattgttagccaattcaaacacacttgaagtgcttaatgacactgaaattgaatatgatcttgtccggaaacacagcggctgaagctatcaaccttcttataagcaatgggcgtacttgagggaaacatcatatttttaaaccttgtctcagtaagctaacacacaccccttgtgattacttatccatgtttatccacaagaatgcagttggattgagatattttcttctttgttgaaatcaggcctcaaggtgttcatgtggtctgcaaaaaaattcccaaaaataaagatagtgacatctgaaatcgataatggattagacgaagagtttcgtgttattccttggtatgggcgggtttggggacagatattttggcacagacgaggactaggccactgtggtcctgcagcattaggtgtcccttccatgtcctgcattacattttattgatggattcatcaccctatctactacaacggctacacaaactatgaagagttttgtttactaataaatgcccaagtgaggggtcgatcgaacccgggacacgtttttcagtttaccatatagaattatccttggaacccttgatactccataaaacatcaccacctctgttgtcatctcatgaatccaggttcaaacctagtctctctctccctagtgggaggtatatggccactgggccaatgatgacaaaatgcaaaaaaaataaaatacatttgggttcattatctaaaatatctcttgtgtttgtaagttttggttgcacactcgtgtggttgaagtgtgtgtgagaggtactatacaatacactctgcttttgttttgtacctatctctttctcttctccacatatccaagactttggggataaagctgagatcattggttgccatttggttgtgtagaagcaatcacccatttgctttatccgaggttgataaatttcctcgggttctccttctgacacgtatgacaaattctaatagtatattcctcgtagatattacctatatattctcaatagttgcaggtacttaaggctttgtcttggcatcctcgtcctcttcagcaaaactcgtctctcttgcactccaaaaagcaaccatg

SEQ ID NO: 15749 - DNA, 3003 bp, Unknown
  misc_feature (1)..( 3003): 2750-1469P.txt file - cDNA_ID_1017855; gDNA_ID_1620620; Annot_ID_162242
gcaattagtagaaaattttcctgcagttgatgacgttgcatttggaaaatactgaaaacgctctttggtcctgatgccttttgtttgttccatttactattttatgcagatggattcttcttgaggttcttgacaaggtctctcccagttcagtcaactggaagcatgcttccaaaccaccgattaagatgccgtttagaaaagtagagaactgcaatcaagtcataaagatcgggaaacagctaaaattctcacttgtaaatgtagctggaaatgacatagttcaagggaataagaagctcattcttggtaatcattacccgagagctcatgtttctcttagcttgatacaaaaacatgatcgccttgccttacaaactggagatttatatggttgtgtatctcaggtctcttatggcagttgatgagattccatatgctccaacttctcaagagtctcagatctcggacactaggtaaagagatgactgatgcagatatcctcagctgggccaacaggaaagtaagaacaatgggacgaaaattgcaaatcgagagtttcaaggttcctttctttacaactacttcaaacacttaccacaatagtattatataaagtatgtccacctatcaccttctagtgaatcaaattaaaattctccaggacaagagtctatcgagtgggttattcttcctcaaccttctatgggcggttgaaccaagagttgtgaactggaatcttgtcaccaagggtgaaacaggttttcactactctttttactaaggtatagttacttactccgtttacctgaatcaaagcttatttgattattatatggttattgaaacgtacagatgatgagaagaggttgaatgctacatacatagttagtgtcgcaagaaagctcggttgttcggttttcttgttacctgaagatatcgtggaggtaagaactgagagactataatgtatcatcatccgaaatagcaattgctcagatgagatgtgttttggtatgttgtgacaggtgaatcagaagatgatcctaattttaacggcaagtataatgtactggagtcttcagagacattcacgggagagttcagattcgtcgtcaactcagagcaccacaacgacgtgcaccagcacagcctcgtcccctgccccatctgtcacagaagaggaggaagtctcctcattgagcggtgaagtcacgagcttggccgttggtgatgcggtttctgaaatcaccacggtctcagaggaagcatccatcgaatagagagagcgagatcacatatatactgatatacatctcttgctatagcaaagtagctgttataatagtgacttctctgtaatcttttgtttttttgtttcatcaactaaaattaccaaaaataataacaatgttacaaacactcaatcacatcgagaaaagtaaagtaaaattgtgaaaatttgtttagtacttaaaaagttaggaggaggaaaaagtgtacatcttattttgaaaacagacactacgcaaacaaccatggatcagacgacgatgatccacaacagtcaaggcaaacaagagatagatagctcaacagacgatgaagatagagaagatggaacgagacatgcagacaaaagaggacttgaaaaccgtggcgttgggcacctctaagatcaactacatggatcctaggatcacggtcgcatggtgcaaacgtcatgaagcacccattgaaaaggtagttaattatatacaaaacttgaatattgatctaccatgaaacaaagagagtcctctaataaagttttttttttgtaatggctggttcgttaatgtagatattcaacaagtcacttctggagaaatttgcgtgggcaatggacgtagaacctcacttcacattctaatatgcattgcactgcagcagctgatgagagtttctctataaaacagagcaaagcaggctacattttttttcttccaagtagataaattctttttgtttgtatctttatttgagatcatgtcttctttttttttcgtatatacaattgttcattgtttgcttgaattcaaatttagtctgttttataaaaaatgaaaccataatctttactattttaaaccataaaaaaaaagtcaattgtaaatacaaaacaccaaaggccaattaagatttattccaactggaaggatagagcaaaaaaaaaagaataatctggcgcaaaaatgacttacacaaatcaataagttttccaaattttgtttctttagcagaaaatcaaaaatgttattttggtcacaaatgtaaaaattggtataaacaaggttttaacaaaaaaagaaaaatatatatatacaaaggcaaaattacccctgagaaaatctggggccttgacacgacgatcctccatcatcctcttcctcgaggaacttcaattccaatctgtgagatctctgcacaacatcttgtctattttcaatcgaaacctctgtgagatcgcttttgatttttgtaattctcgtcgcaggatatctctctcattgggatcagacatggcttttgttgtaacatccctgatattcgctgtcgtaggcatcattgcttcgatatgcactagaatctgcttcaacaaaggcccctccaccaatctgtatgtcaattttcattcctttttgcttcttctccctttgatttagtcatctttttgctgtctttgatccattgcttcgtcaaagttaataaagtgttcttcggtatcaattgagatcattatttatctctctgagcttagaaactattattggttgatgactttatatttgctcattgacttttgctaatttgtttttgaatttgttccttcctgtgatgggtttttttcaatgtaagcaactagtaccgtcacagttctaactcttgtgctggaaaaagtgttgatctttttccctttttttatcattgacttcttatgtacttgtttgtcttgtttctatg

SEQ ID NO: 15750 - DNA, 3003 bp, Unknown; identical to SEQ ID NO: 15749
  misc_feature (1)..( 3003): 2750-1469P.txt file - cDNA_ID_1017855; gDNA_ID_2926189; Annot_ID_200904

SEQ ID NO: 15751 - DNA, 3 bp, Unknown
  misc_feature (1)..( 3): 2750-1469P.txt file - cDNA_ID_1017964; gDNA_ID_1563633; Annot_ID_148028
  misc_feature (1)..(1): n is a, c, g, or t
nct

SEQ ID NO: 15752 - DNA, 3000 bp, Unknown; identical to SEQ ID NO: 12495
  misc_feature (1)..( 3000): 2750-1469P.txt file - cDNA_ID_1018052; gDNA_ID_2214555; Annot_ID_134772

SEQ ID NO: 15753 - DNA, 3000 bp, Unknown; identical to SEQ ID NO: 12495
  misc_feature (1)..( 3000): 2750-1469P.txt file - cDNA_ID_1018052; gDNA_ID_2214555; Annot_ID_185703

SEQ ID NO: 15754 - DNA, 3003 bp, Unknown
  misc_feature (1)..( 3003): 2750-1469P.txt file - cDNA_ID_1018190; gDNA_ID_2936582; Annot_ID_194945
caaccacatggaaagattgcagccatggtggtttggtggaactacattatcaattgagtaattataagcgtgtgattgagaaattgttgtcttgcgcggttaggccggagcatagtccacagaattgaattgcttgggccttaactggatattaaagagtgtaataaacaatttctactatttctatttgcccaaaacaaaactgtctcggtccataataaagcccgaatttactctaaagcccacgagcccacgcatcccctagggtttctgtgtcttcaaatgtgacctatcctcttctgctacactacccaatttattctcggccggaaagtctcttcttgattatcgtccagggattgcaacagagagaaagtaacgatgccggcgaaacagaggacagctaaggtcaacaggaatcctgatctgatcaggggagttggtaaatactcaaggtctcagatgtaccataagagaggtttgtgggcaatcaaggccaaaaatggaggcgttttcccccgccacgacgctaaatctaaggttgatgctccggtggagaagccaccgaagttctatccagctgaagacgtgaagaaacctctccccaacaggcgcacggcaaaaccagccaagctcaggtacttagctgatacactgtctcattgtcttggagtctgaaatctagctcaatgcaatagttgttttctttggttcttaaggagtgctttgtatgcatttaaatctttgaatctcccgaaattttttgactagcttagtgttttgaaatcgttaattagtcattgtggtctgttctatttggtttgtgaatttatcttgatttctgtggaaagtttgcctcttttgcttgtattttgtgttacattgttcggaatttgttatgttgtaatccgatattcatatttctctattgcagagctagcatcactccagggacagtgcttatcatccttgctggtagatttaagggcaagagagttgtcttccttaagcagcttgcctccggtttgcttcttgtgactggtgagttttatgctaatctactttctttatttgccacattctttattcgaaatgcagaacgcccattcactaaacttgctttctgtattctgtataaagttgacattcctgttttgttattgaccttaggaccattcaagatcaatggtgttcctctgagacgtgttaaccaggcctatgtcattggtacttccacaaaggttgacatttctggagttaccctcgacaaattcgatgataagtacttcggcaaggttgctgagaagaaaaagaagaagactgaaggagagttcttcgaggctgagaaagaggtatcccaaacattcttcttgtctttctctaagagtcatttggttctcattttgtaatagacgattaaagttctctcctttatacactacccaaattaaaagctatgcgtgacctccatatactttttttccttccgcaggagaagaaagagattccacagggaaagaaagatgaccagaaagccgtggacgcagctttgatcaaagctattgaagcagttccagagttgaagacttacctcggagcaaggttttcattgaaacaaggaatgaagccccatgagcttgttttctagatttcattactttttttctgaggtttctagtgtatctgtctcctgaagttttacactccaactggttggttctgttctcgtccactgaccagagacataaaatcttggctgctgctatctggatttctgtcttatatggataatttatcaatcctgtttttgaaggagaacttttcacaagattctagtaatgcttaagtcatgacgaagtgatgaaattgagaattgaaaataacattgcaataatgatatagtttagcttacaatctacttcgaatattgaaactcttattactagtctctgtcacatgcaccgagatcaagctggaggtgcttctagacgaatttgatcattatctttaggtgtttctttgctagcacaatcagcaactttagctccggcctcaacatctccggccaaacaccgtctccattttcgtctcagccaacctaaaagcccaccactctttatcatctccaacggattgacttcagccactagaccagttctctggcggctccgtgcgcagaatcgacccaagaagcaggagagaacagcaagaatgatgagaacagatatgacagcgaagaagggtccaatggagctggaagagtaatggtttggagcgtttggtgctgcgattagattggcattggtagccataggtgtgatctcattgcctcctaattgttgttgaggttgttgttggataggaaacaatgacgagctgctactactactagccatagccattgaatctaatgaaattttggttttcggtgatcaagattcaatatttgttgattgagtaacggggtcattagtatatatatacataggcatgtgcacattgatcttttgaagagcttttaagccgaccaatgtttgttgaagaaggacatgtaaaggtgaataaagcggagaaatcctcatcagcttcatcaaaagcgtctcaaactaattataaatgatatatgtgatccattgcactcttacaggtgaaggaatcgtcttgctctgattttggcgttggtcaaattgtgtggggattattagcctgagtttttagataaactactctctaactctgatttttttatcatcctgtcaaaatagttttaggtgaaaagatttaatactacaaagttgtaagaaaaaacaaatcctattatgcatgttacggtccacattaaaaggccgatataattgtaaagcccatgagcccaagaaagccctaaaatttaattagggtttcagtgtcttcaaattcacctatcctcagcctcaactctctcctctatccactctcagccggaaaatttttccttgattcattacgacagagagaaccatg

SEQ ID NO: 15755 - DNA, 3003 bp, Unknown; identical to SEQ ID NO: 15754
  misc_feature (1)..( 3003): 2750-1469P.txt file - cDNA_ID_1018190; gDNA_ID_2936582; Annot_ID_143771

SEQ ID NO: 15756 - DNA, 3003 bp, Unknown
  misc_feature (1)..( 3003): 2750-1469P.txt file - cDNA_ID_1018268; gDNA_ID_2214675; Annot_ID_136636
tcaaacttttggtttcattcttcgctgctcacgttctttctccatttgatgttttatgtattaggagctactatagatgttcaagccctggatgccccgtcaagaaacacgtagagaggtcatctcatgacacaaagttgcttataacaacttacgagggaaaacacgaccacgatatgcctccaggaagagttgttactcataataacatgctggactcggaagttgatgataaagaaggagatgccaacaagactccacagagctcaactcttcaatccattacaaaagaccagcatgtcgaagatcacttaagaaagaaaacgaagactaatggctttgagaaaagtcttgatcaaggtccagttttggatgagaagctgaaggaggaaataaaagagagatcagatgcaaacaaagatcacgcagccaatcacgccaagccggaagcaaagtcagatgataaaaccactgtttgtcaagagaaggcagtaggaaccctggagagcgaggaacaaaaacccaagacagagcctgcccaaagctaagcattcagtgttgtaccgagtggtaatttatatggctgttttaacatagattagtacaggcgatatggttatagactgtacagttgttgttcaggcgggaccagatttagattagtgtttaatggaatagtatgctttaatacctttatgtaaccacttccatttggttcaaataagagttacaggaagagaaggtaacacaacaagagcccttctttgttgatggagcctgtgtaatagttgtagcatggggatgtatatgatttgattcaaccttattaatggttatgagacaaaactatctattacttccagttctgtcttttgcattacattcttggagacgtttattctttcacttccatgcacaagatgagaccaagattcggtccatccaaccaaggtacagagcaccatctctttcttcaatcgcatacccgttgctgtaatctctcaagagggctctaatggtggctgaaatgattgagctcaaggggtatggctcaaaacccgccatggaaaaccttgacttccatttcccgagaagctcgtgtctttcgatcctctcggctccttcacaagctatgatgttgacgacatcccttgccatgcagtgctgctcgatattgatcctttccttgtgatttctcggaagcataacatcgatagattcgaacattgccgtgtaataacttaatgtctcaaggaacctaggaaggaaaggggaagtgttcgtgttgcattcttgttccacaagagtgactactttaggtgatagactcttcaccatcctcagcaaccggtccctgtggttttccatgcttacactctcatctggcaaatgatgcagcatgtaagcaaagttcactccaagggcttcgccatctcggacatcaagattttccacttcaacttcacaacttggccttgaaaccgcattgaacctgaatggaacatcaaacttctttgcaagtttctctagtctcttcttgactgtaaccaagacagatccatcaccaactccggtaattcgaatatttggagccccaccaggcctagctgcaaaagcctggataagtgctatccactggctcccttgtccaatttggaagtcaataatgtgaatcctctcttcatccttcattgcttctgcaatcgcaccattcgctgacatgtatccaaacttgaaatatggacaaacctcatgcagaacatacacataagataaaaattcataactctctggttctctggactggagagacttatatatcgaactaccagaagcagcaagcctagcaacaagcccttctaacatataagctcccaatctctggattggctcaccagaaatcgaaaccataccgcgcaactcacccatacaccatcgtgccattagaagattattctcagaaacagcttttgcacaagcaacaagtaccaacttcaagtctccccttgatattgcctccactatcaataacaaatctttagcatcatcaggccacatggagagttcatggcagatagcatcatcgatactctcagctatctctggcagtggctgcaacattattgaacctcttacattgtccatcacaaataagcaagtaagaatctttgaacatcaaccattatcctcaaatgaccttttatttatctgatcttcataacaaacacctgtagaattcatagacaaagtcattaatcagagactgaattagatatcaatattgaacaataatatccatggagatcaaaactctaacaagaactctagtatcattgaaatcaactcatgactctatgaatctacgtcagccatgaactacttcatcaataaacaaggcatacaagagttccaatcctaaacaaactaatttgacaatttctcttcacactttagagtaaagcttgctagaaagagcaatcatttacaacaaaccaacatcaaacttatcaaagaagaaatgttttcatgttttgtggataagaagaagcagagcatcaaaatcatcaagaaaagagaataaaggtttgatttttatgagaaaaacaaaccttgtgtaggttaagaagtgatctttcggtggaagtcgataagggatttggttttgcaagtgagagatccaaccaaagctcgcagctgaagcaaaaggaagaatctttttagttgctgtagtgaagaaaataacacatcacatacgacgtcgttttaggcttaaaccgaataagacccgatcaccgacttgacacatctcgcttaaagtctctggtcaaatgggaaatagtgtaagaagcaatctaagagacatcagaggacgacgatcgatggatcctcggatgtggcacaaagtcgccgctatttccggtgagatttaagataaagtaatgatcttttgattttgatcttgtgaggaaaggtactgattcggatagaattggtttaggtatg

SEQ ID NO: 15757 - DNA, 3003 bp, Unknown
  misc_feature (1)..( 3003): 2750-1469P.txt file - cDNA_ID_1018268; gDNA_ID_2214675; Annot_ID_189169
attgagctgagtccagtggagaggtcaaccaatgattcacgcattgtggttcacactcagactctgtttgatattgtgaatgatgggtaccgatggcgtaaatatggtcagaaatcagtaaaaggcagcccatatccaaggtagtgactgcttacatgtttgaaatataatgtcaaacttttggtttcattcttcgctgctcacgttctttctccatttgatgttttatgtattaggagctactatagatgttcaagccctggatgccccgtcaagaaacacgtagagaggtcatctcatgacacaaagttgcttataacaacttacgagggaaaacacgaccacgatatgcctccaggaagagttgttactcataataacatgctggactcggaagttgatgataaagaaggagatgccaacaagactccacagagctcaactcttcaatccattacaaaagaccagcatgtcgaagatcacttaagaaagaaaacgaagactaatggctttgagaaaagtcttgatcaaggtccagttttggatgagaagctgaaggaggaaataaaagagagatcagatgcaaacaaagatcacgcagccaatcacgccaagccggaagcaaagtcagatgataaaaccactgtttgtcaagagaaggcagtaggaaccctggagagcgaggaacaaaaacccaagacagagcctgcccaaagctaagcattcagtgttgtaccgagtggtaatttatatggctgttttaacatagattagtacaggcgatatggttatagactgtacagttgttgttcaggcgggaccagatttagattagtgtttaatggaatagtatgctttaatacctttatgtaaccacttccatttggttcaaataagagttacaggaagagaaggtaacacaacaagagcccttctttgttgatggagcctgtgtaatagttgtagcatggggatgtatatgatttgattcaaccttattaatggttatgagacaaaactatctattacttccagttctgtcttttgcattacattcttggagacgtttattctttcacttccatgcacaagatgagaccaagattcggtccatccaaccaaggtacagagcaccatctctttcttcaatcgcatacccgttgctgtaatctctcaagagggctctaatggtggctgaaatgattgagctcaaggggtatggctcaaaacccgccatggaaaaccttgacttccatttcccgagaagctcgtgtctttcgatcctctcggctccttcacaagctatgatgttgacgacatcccttgccatgcagtgctgctcgatattgatcctttccttgtgatttctcggaagcataacatcgatagattcgaacattgccgtgtaataacttaatgtctcaaggaacctaggaaggaaaggggaagtgttcgtgttgcattcttgttccacaagagtgactactttaggtgatagactcttcaccatcctcagcaaccggtccctgtggttttccatgcttacactctcatctggcaaatgatgcagcatgtaagcaaagttcactccaagggcttcgccatctcggacatcaagattttccacttcaacttcacaacttggccttgaaaccgcattgaacctgaatggaacatcaaacttctttgcaagtttctctagtctcttcttgactgtaaccaagacagatccatcaccaactccggtaattcgaatatttggagccccaccaggcctagctgcaaaagcctggataagtgctatccactggctcccttgtccaatttggaagtcaataatgtgaatcctctcttcatccttcattgcttctgcaatcgcaccattcgctgacatgtatccaaacttgaaatatggacaaacctcatgcagaacatacacataagataaaaattcataactctctggttctctggactggagagacttatatatcgaactaccagaagcagcaagcctagcaacaagcccttctaacatataagctcccaatctctggattggctcaccagaaatcgaaaccataccgcgcaactcacccatacaccatcgtgccattagaagattattctcagaaacagcttttgcacaagcaacaagtaccaacttcaagtctccccttgatattgcctccactatcaataacaaatctttagcatcatcaggccacatggagagttcatggcagatagcatcatcgatactctcagctatctctggcagtggctgcaacattattgaacctcttacattgtccatcacaaataagcaagtaagaatctttgaacatcaaccattatcctcaaatgaccttttatttatctgatcttcataacaaacacctgtagaattcatagacaaagtcattaatcagagactgaattagatatcaatattgaacaataatatccatggagatcaaaactctaacaagaactctagtatcattgaaatcaactcatgactctatgaatctacgtcagccatgaactacttcatcaataaacaaggcatacaagagttccaatcctaaacaaactaatttgacaatttctcttcacactttagagtaaagcttgctagaaagagcaatcatttacaacaaaccaacatcaaacttatcaaagaagaaatgttttcatgttttgtggataagaagaagcagagcatcaaaatcatcaagaaaagagaataaaggtttgatttttatgagaaaaacaaaccttgtgtaggttaagaagtgatctttcggtggaagtcgataagggatttggttttgcaagtgagagatccaaccaaagctcgcagctgaagcaaaaggaagaatctttttagttgctgtagtgaagaaaataacacatcacatacgacgtcgttttaggcttaaaccgaataagacccgatcaccgacttgacacatctcgcttaaagtctctggtcaaatg

SEQ ID NO: 15758 - DNA, 502 bp, Unknown; identical to SEQ ID NO: 243
  misc_feature (1)..( 502): 2750-1469P.txt file - cDNA_ID_1018625; gDNA_ID_76770; Annot_ID_147085

SEQ ID NO: 15759 - DNA, 3003 bp, Unknown
  misc_feature (1)..( 3003): 2750-1469P.txt file - cDNA_ID_1018649; gDNA_ID_1620762; Annot_ID_167209
ataaacaaaccaccgcactaactcgtcgacgacgcgttctcaaatctgacgatacgaactcgcccgaagactcaaacgtgactatattttaccttaatgcgctcgttttttctcagcgatccgaccgacacaattttttgggcaacgcgctttcgactagccggaaaaccaaatcgtcctagtcccccagtgtgatctagttacgccaccacaggcctgatagtattaaaacaaaagggcgaaataaaacgacgacgtttacgaggagcgactcctcgggatccggtagccaatagtaaactcagatcacatagatcttcccgagccctagcgatttcgatttctaaagcagattctaaagacaaaaatcaggaaactcgaggaagaggaacctagtttcgaaacaaaaacaaaaaccagagaagaagatgatcaacgagaatgatgaaatcggaaggaaaccttaccgtctctccgacgaagaactaacggaacggagcttgagattgagcgacgaagaagcagcgatcgagagaaagagagaagtgcaaaaactaatcttagtgaaggccaagtatggaaatgtattaatgtgttcaaacacattaaaattgaatttttttttaagaaaaagtatggtactgagattcagagatggtgaatatctgttgtacctaacagcaatttagtaaactataatttctgacgactatttttcgatacttttgtaacaattatcgtaaaaaacaaaaaattaagtgagattacattcgacgttagatgccagaaataatatatatatgtgattgtgaatatgtacctttttttcttttttcaatgagtgtaatatgaatgctttgagaggattacacgcgtgattctgattcggatcaccaacttcttttgcttcccttttaatttctttcctatcttttgcttttcccattcatctctctcgctttccacaaaggcgagatttgaatacgtaatcctaattatactctcatagagatttggtaatttggcccaaaatatctttctactttgtaatatgtcgatgcatagaaaacataatcttattctaacattcacaaatctcctatatttccatattgaatctctcagtctggatcggtttgtaatctctgtccagctacctcttacgtttcaggtgtttctatgatttatccattggcttcattggctgcctataacttatatatcatgttgcaatctttgtgtgtgttgtgttggggagagcttatagccggccgctcctccattagcttccaaatggttgaatcagtctgtatcagatttaaactcagtgatagcacccacgttatgcatgatttttaagatttgataagcagactgtttttaacttcaattcaagagcatcatccactttcggcttaatatcctatattaatttctttaacaagctaaaatgaacataatgaaaataactacactcactgattggcaattactaatatctcaaaacattaagaagtattttttttttttttgggtgaaaagtcactgtctttttcttaaagccaaaatttatacggaacgacaaaacaaaaaatatgactaaaaacttcttaagcgcaatcactgaccatgcagcctattttagtttttaagtcttttatatacattggctgttatagtcgtaaaacaatcaggtatttgttatggagataacaatttgggaacgcataaatagtgcctctgatggttggaagtggaacaaaatcacaatatttttttctagtgtataaacaacatacaaatatcatgtcacctgcaaagagaataatatgccaaaattttgatataatacgcataacagagtttatatatcaacgttctagacttataggtgatcatccattatctttaacctcttgtagctagctaggttaattaggagatgcatgcatctagataggcatatatagtctaacattacaaatccatcaaaggttcccttcttcttctccaaagaaattagctacatacaaatttgacagactctcataaatatatatatatatgtttatagattatattattaaaaatacaaatgatattttctgtattttgttaaaattagttcttaagattttatgaaatttataattgagccaacgtcttagaaataattatacgacatacgtaatttaaattcaatgacgatgacttaaacttaatgttttacagtatttatccaatcaaattttaccacatcagcagagaagagtcaaacttaggaaaagtctatcttggattatcctgacgtggcttttttcaagtaagaaataaattaatgctaatcacgtacgtacctacccagcttttggacctcgtgggctatatagaaaacaagtaaccaaagagagacgaagcaaaaacattcagagagaaaattcagcatttttgatagctcaagcacttgattctttccaaaggggtttcctgaggtatgtttgctttcctttttggttttaatttgtttcaaatcttagatcgattcttcactttggattcttaaatcgattcttgtcctcgtctgtgctgatttcgaacttttccgattccaactccgccgaatctacgtatagatctttgaggaaatgtttttttcgatttatgatcggcggatctaccgattcctttgcttgttttctttggatgtatcacactcttctgaagatgccttgacctttttatgtgaactagtaagagttattatggcttagatcgttgaatatctggtatatgtgttcttataatgggattaggatctatgttttggtgcgtattaaagcttagttgagattgatgtttttgggttttcaaattctgtttcttgtctgttgagctaatttaatgttgtgtagaaccatttgtttttttctggatctttacttatttgtatatgtattggtttatgtttatgtttttacagatcacaaaggccaagtaacaatg

SEQ ID NO: 15760 - DNA, 3000 bp, Unknown; identical to SEQ ID NO: 753
  misc_feature (1)..( 3000): 2750-1469P.txt file - cDNA_ID_1018890; gDNA_ID_1620316; Annot_ID_153179

SEQ ID NO: 15761 - DNA, 3000 bp, Unknown; identical to SEQ ID NO: 8708
  misc_feature (1)..( 3000): 2750-1469P.txt file - cDNA_ID_1018916; gDNA_ID_1971867; Annot_ID_58439

SEQ ID NO: 15762 - DNA, 3000 bp, Unknown; identical to SEQ ID NO: 8708
  misc_feature (1)..( 3000): 2750-1469P.txt file - cDNA_ID_1018916; gDNA_ID_1971867; Annot_ID_176505

SEQ ID NO: 15763 - DNA, 3000 bp, Unknown; identical to SEQ ID NO: 8708
  misc_feature (1)..( 3000): 2750-1469P.txt file - cDNA_ID_1018916; gDNA_ID_2926155; Annot_ID_139486

SEQ ID NO: 15764 - DNA, 3000 bp, Unknown; identical to SEQ ID NO: 8708
  misc_feature (1)..( 3000): 2750-1469P.txt file - cDNA_ID_1018916; gDNA_ID_2926155; Annot_ID_198353

SEQ ID NO: 15765 - DNA, 3000 bp, Unknown; identical to SEQ ID NO: 6947
  misc_feature (1)..( 3000): 2750-1469P.txt file - cDNA_ID_1019105; gDNA_ID_1621117; Annot_ID_171912

SEQ ID NO: 15766 - DNA, 412 bp, Unknown; identical to SEQ ID NO: 185
  misc_feature (1)..( 412): 2750-1469P.txt file - cDNA_ID_1019158; gDNA_ID_25709; Annot_ID_146520

SEQ ID NO: 15767 - DNA, 3003 bp, Unknown
  misc_feature (1)..( 3003): 2750-1469P.txt file - cDNA_ID_1019230; gDNA_ID_2684240; Annot_ID_192552
ccgtccacatttggaatgagaactgcagcaatatttttttcctcatgatgagatattgagatgtgtcaaaagagatatgtttctcaaaaatataatgtacctcatttgtgaccaccacatcatcctctccatacccgagtttctcgagtagttcgtgcataccacttagatccactctccagcatgcttctccgaaaggggtcaagggcaatggctcctttgttgcaggttcagtgtatgatggagtctgtcattattaagtcccatgtacacataagaaagcctgcagaacccgaaaccttggaagatttaatgtagtaatgacttacagggatgttttcttctttgacgttgggccataactcagctcttttctcaagtcttgaaagagctgacataagaaactttatgcttggcctctcgtctggttcagggcgcaaacagcgggaagctagatggataagttctgttctatcctcatcagagaattgaccatccagagctgaatccattagcaccaaatagtttttaccacggaacagatcaagtgcctgaaatgacagataagctaaaaatcaatgaaactgctaaagatacattatgtatatacacattttgctttgtgagaagaaagttacatggtttggtggaatatgtctgccgctcataagatccagtaacaaggttccgaagctaaatgtgacactctccggtatcacagtacctaacaataaaagtaaaagaaaaacatctttgagatttcagctgatgaagttttctctcaagaaaattaaacataaaacacatacctagacgtaaatattcaggaggagcaaatgccaagttggtactatagctctttccctctcggctacacttcatgagaccaaaacaagacagcctaggattcccaacctgttccatcacttttataaataacttatgataacatcaaaccgcgtatgaagtttcttaccttgtcaaacaatattctgtaggtgttaagatcgtgatacaaatctattccccaatcattacagtactccaaggctgttgcagtatgtaacgcaactctcaacctcatttcccacttcattggtcttttctcccctgaaaaaccattttagagtaaaaacaacttagacacaataatgaaactctaaagtaaagtttaaggccaaaagagatcaagaacttgaaatgtttgagtctcacagtgaaagagatgcttagcaagtgtttcattaggcatgtactcagcaacaagcaacctctcgtgaccttctgagcaacaaccgatcaaattggccatatgctcactcctacatctccctacagcttgtgcttcctcctgaataacaaatatgccatattcaagaaattttcctctgcaacagatcaagcatagaaccgaattgaatctttactaagtcaaacagacttgaaatttgcctcctctgcaacaaatcagaatccagaacattgcaacattcaagagaagtatcacggagttagtaaccaataaagtcaaatcagatgaataagcgatcactagtcaaatcttatacaaaaccaaacagagaagaatcaataagtattgatgggtaaaggacacgaacgatgaattctaaagaatcaggccatgaaagccgttgaaaccgcttgacggcgatctttcttccgtcgttgagctggcctttgtagacgatgttaggaaccctctcgttgtgctccgacacgatgttgtcggcggagaatccgtcagttgcgactctcaactgttccaagctgaactccaggaaattaggacaagtacttccttcatcttcttctttattatctgcagccaaaactattaggttagttctctcgatcatcgtcttcttcagaatctaattaacgcataggaggagtggctggcgaattcgttggattttacctagatcgtcgatgacggtgatggtggatgttatcgacggagaagacgatcgacgccaacgtttgaaacaaatgcagcccatcgccggcgacagtagtttctccggtggagaaaaacttttcaagtgcttggttaaaaactcccgcctgcagggagaaaataaattattatttttttcttttttgcctagcgaatattgttggaaagttttacggagaaagtggtaaaatagacccaaaaatatcatttatttatatatcacataattaaatagttgatgaccaatatatactttttttttttttgaaaagatcaacctttatactattataaggataaaatgtcgacatgatctatgtattaatttaaagaaaatattgtttgcttgttccatttaaattactcggtattagattaattttgagcataaacattacaggtttttattttggtaaataatcattagactgttgagtttggtctttactttagcctcaattttaaagtctatattcaatggattttgcttacatacatttcattcacgtttaaaccgaaattaaaatatctcatttaagttgtaaccaaaaaaaaaaaaaacagaaaaattctcattaaaattaatttttgctagttaccgcagcttttcgagactgggtgtgtaatatccatcacactaacctttttttttttaatccatccatacgtttaactacatttaagcaaatatcgctatcaaatcgttttggtatatttcgctcattactggcaaaattcactctacaaaaaaagtctagtttgtaatgggacgctcgtttttaggtgacttatataaaaataaataaatagattaaaaaacaaataaaatcagtataggcctaaataaaagttagcttacggaccatttatgatgaaacttgggccctaatgcaaagcccattaattttatctttggagtctgaagtctctcctctctgtgctttcacataatcacattgcatgattgatcaaatactcgattttccgtgaaatctctttgaatatttcgattccttgttaccatg

SEQ ID NO: 15768 - DNA, 3003 bp, Unknown; identical to SEQ ID NO: 15767
  misc_feature (1)..( 3003): 2750-1469P.txt file - cDNA_ID_1019230; gDNA_ID_2684240; Annot_ID_137752

SEQ ID NO: 15769 - DNA, 3003 bp, Unknown
  misc_feature (1)..( 3003): 2750-1469P.txt file - cDNA_ID_1019253; gDNA_ID_1621109; Annot_ID_56060
atgatggctgggaacaaatccgatctgaaccacttgagatccgttgctgaggaagatggtcaaagtttggctgagaaggaaggtctctctttcctggagacatctgctcttgaagcaacaaacgtcgagaaagcgtttcagaccatcttaggtgagatctaccatatcataagcaaaaaggcactggctgcacaagaagcagcagcagctaattctgcaatccctgggcaaggaactacgattaacgtcgatgacacatctggaggcgcgaaacgagcatgttgctcttcttaaactaaaggtaaactgtttatttcggttgctccttgttcagagattcaaacttttgttttcactggcttctcttcttttcaagttttggctgatgaaacgtaactatgcaagactatgtagaatactctgtttttattctcttcggtttggggtttgtgttcagtttaaagcttgttagtagtatacttagaatcttctggtgcttgcttgctttcccttcttcttcccttggtgtgtttctattgatttctggtttataaagtattttttctatctccggtttagtccggttcgtcttggctttgtttaatcaaatcattgattcctctcttatcaatgtattgtatccggttccaaaatcctctcttcatgttacacactgacaagcttctaccaaagaaaataaattttagtattacgaaagaaaaaattgttgacaaactaattttgctccatctattatcacaaataaaaatgcaattgaactgcagttactatcaaataatggctatggttttttattttgttttgaaccgaccaaattaaaagatgttttgaattaatggtattattttcaagtaaaatagaggaaagtgacgacgatacatggagacagaaaaggagtgattgagaaaccgataacaaaaacgtcattgtagcccaacttgcaaaaactaaccaattgcatgcatgaaagagtttataataaatcatggaattttacattgtcaacgtgtgaggtttttctttttggacacaacccaaaaggccttttagttctaaattgtttcatattagaaaattctaagttcggaaatgctatacatgaaaattcttggtgatttctaatgagcaaaataacatgaaaattcttggtgatccattatatatatttatgcgccgagaaaccattcagagaaacaataaggaagatagtaaaacctcatctttctaatcgataacttccatatccttcgattaaaagcttttgatcaatgcatagtccaaactttatactcacatatactcacatacccataatttagaatttagatctcatttaaattgataagctatttttgtagttataaaatacataaacccatccaaaatattatcattaagacaaaatattagaataggtatattaaaatagaataatgagagataacatttttaagaaataaacaataaagaatcaatgcatagtaaaaatgaatttgttatcttgtaaatacaatataattttatcgcctgttttgagccttcttgcttctatattattccaccctgagcacataaaatatttatcatggtctatttttattgttacccagtaactcttgttattctctaaaacttccacttgaagaccacttggaggcattacaaaattttctatagtgcgtagtatcttctctatctgcaattttggttaatataacctacccatgtgggaaagatcggtgtttgtaagaactttctctaacattttattttgatccatatcaagccaaatcactattttactaaactcttaacaaatttagaaattttaaaaaatgtttgtagaaaataaaatgtttgaagactggagctctacacatatgtttatatatagttctcggccaaaccaatgtgctttgtcttcaaaccctttaacaaaaaaaaaattgtgctttgtcttcaacttttaaaaaaaaaatgaaaaaattaatttgtccaaaaaaaaactctaaatgtagtcaattatatggatatatattctaatttttgtaatattaaatgaaaatattttctaatatgttatgtttctaaatttttacacttgttaccaacttgaagattaaactaattatagtttttttctaacatcaaattaattattaagcaaaaaatttcttataacaatcttacttttttagtcatttttattttaaatttcttccaaaatttaataaaaatcgattacattctttagaaaaataaattcagttaatactatcaaattgtattatttcaaaaacacttaaaaattgcacacttggcagcttatagttttcgattgatgtactttttacaataactcttttttaaaaaaagtttataacatcaacaagaaatttagtaattaatgtttaatgagattttcttttatagatttttttcattaaactttacaagtcgaccatggcattgtccctatgggatccactaatattataaagaaaatctatacaaattaaccatgaattctatataaacctttttttgtgaatatatttatgaagtttgtgaatatttaatatttttttgtttgacctaataataacagcagaaatcgacgtcgatacgaaaatatatatatatatatatatatatatatatatatatatatatgaaaaaaatgaaaatgtgtcatttatctaaaacgaaaaaaaagaaaagaagagaagcttttttagttctctctgcccaatggagaaaagaagaaccagagattgccaaatcatcttctgcaaaagcacccatcaaagaaattacttgtaaatagaaaacaaatcatcaaatctggaagacaaatcattaaaaaaggcgacaactttttttggttcagattttgaaaatttgattttttatttttcttatcttggcgatcgaatcctatccgaaagattgaaacttgggaggtgggtaagtgagtgaatg

SEQ ID NO: 15770 - DNA, 3003 bp, Unknown; identical to SEQ ID NO: 15769
  misc_feature (1)..( 3003): 2750-1469P.txt file - cDNA_ID_1019253; gDNA_ID_1621109; Annot_ID_171743

SEQ ID NO: 15771 - DNA, 152 bp, Unknown; identical to SEQ ID NO: 258
  misc_feature (1)..( 152): 2750-1469P.txt file - cDNA_ID_1019253; gDNA_ID_78089; Annot_ID_147245

SEQ ID NO: 15772 - DNA, 3000 bp, Unknown; identical to SEQ ID NO: 12547
  misc_feature (1)..( 3000): 2750-1469P.txt file - cDNA_ID_1019319; gDNA_ID_2214558; Annot_ID_134845

SEQ ID NO: 15773 - DNA, 3000 bp, Unknown; identical to SEQ ID NO: 12547
  misc_feature (1)..( 3000): 2750-1469P.txt file - cDNA_ID_1019319; gDNA_ID_2214558; Annot_ID_185817

SEQ ID NO: 15774 - DNA, 3003 bp, Unknown
  misc_feature (1)..( 3003): 2750-1469P.txt file - cDNA_ID_1019406; gDNA_ID_2936582; Annot_ID_194958
ttacttaagttgcagttagtttctacctgtgagttatcagtcatatacaaatgataaaccattctctgttttctaataacacgactttgaactctgattctcaagtcatgaattgagacaagttctccttttggtcaatttctgtaactttagcttacacaaagtcaggcttaaaaatcatttctgatctttgttagtgggtgggaagctacttcaaataaaatttacagatgtttttttctttctgcagcatttctgggttgcgatctccatggtgttctttctcgctgctacagtctttaccctccttaagctgtctggtaataatttgccgctgtaatagttaattttaagtatgggcgttatacttcctggaattcacaatcatgtttatagctagatattttctgtctagtgaccattaaaactagacagtttctccagaaaggaaaaacttgaaatcctgcagaatgagtcatgccttaatatgctaaatgtcctttgcatgaaattccctttcgtgtgcacagtgactgacatattcatataatcatagttaacttcagtcgtctcactaaatatatgtatattgtcatatctcttcacatatctaaatcatatcttatataagcaaatgtccattaattccttcttattttatttcaaatcaggcgatgtagctgctcttggctggtgggatttattcattaatttcgggtatgcattgtctttgccgtttctgttacatatgtgaatgtcttaatgctattcgtggaattgagcatgattgtaatcattgtgtacgtttcgcttgcagaatcgcagagtgctttgcgtttcttgtttgtacaaaatggtctaatccagtgattcatagaagctcacgtgatagagaaactgggtcatcttctaccaatattagatatcttgactggaacagtggccttggggttttttcagaagacgataggaaccaagatacatgtggcctgcaagacattggtggtcatataatgaaaatccccctcattgtatttcaagtggtactttgcatgcatctagaggtacacaacatttctatctatcatacatttcttgtgtatctagaggtcatttaccaaaatcgtgtggtttgaactttcaggggactcctgaagctgctaagtctatatctgtccctgtcctgttttctccacttttccttttgcaaggcgttggtgttctatttgctgcttctaaactaatagagaaggttgttctactgctgcgtggcgaagatgatacaggattatattttagatttctatccagagcacatgattgcttgggtttcttgcaccatggatccaggtgataattatgtttagttacttcctgatctgtttttaatgcgtatggaggctaaccataaaatatattttggtagctgcaaccgagttactaacaaacatcaagttgatgcctgacatttgatcctatacgtgctcgcttaggctactaggttggtggtcaattgatgaaggaagccgggaggaggaagctcgactatactttgatcaagaatctgggttagtacaactaaaccttctaaattttccaacgaaaatggttataactacctgctgaagacttccatgaatatatgtggtgcaggtacaataccttctgtggtcatccgcctgaaatagtcaagaaaatgccgaagaaagagcttgcggaggaggtattttgccttttttctcttacatgcaaatatgtcgtcgtttttttgtttgttaagtcttagatctctggtatcattattactcagtgctgttcatgtctttttgtatttgatctataatttggtgtcaggtgtggagacttcaagcagcacttggtgaacaaacagaaatcacgaaattcagtcagcaggaatatgagagactgcaaaatgtaatgctctcacctcttcttcttataaattacacttctcagggtttagctttcacaccgtttctcttttggtgttgcttttcctttggactgaatttcatatctcgatgttctctctgttccaggagaaagtgctgtgtagggtatgttttgaaagagaaatcagtgttgtactgcttccatgtagacaccgtgttctctgcaggtatcataaactattcaatgtttatgcattttcacaggaagaaactgaatttaaagcactaaattagttcggtgattaatccaagtgcaattgcagcctctgatgaaattattgagagctctctgatcatacctgcctgatgtttctgctaacgtgtttggtgccatgtttgttgcagaaactgttcagacaagtgtaaaaaatgccccttctgccgtataactatcgaagagcggctccccgtatatgatgtttaacatctaactagaccgtcttcgtctcttcgacatcaaatatttaagtgtatatatgtgtgtgtatagatgatatgattattcactcctttaagaaactctacattgctgagtcgttttatttgtgtgaatcagcattgagcataggtcgagcagaagtctattgttggataagatcttatgtcttatgtttaggctttttgtagatattatttacctctgacatagttacttcagcgagatattgtttgtataatatttgttttcttatatccttatgtatttctatttctggatctaattttgtggacatcgtctctgtattgaaatcttccaagacgaagaaaacgaaggatcgaatctaccaggaacattgaacaagcagttgtgggtaaatgtactaatttcggccttttcagatatttttggcgggtaattaacagataattctgtacacttttcttgggccgaataatagcccaatgggctaaacggcttattttgaaaatacccaaggcgacgcgagaaacctaacttactccggccgaacgaaatcgaagaagagagagagaaagagagtgagagtgacggcgaggaagaagagaaatg

SEQ ID NO: 15775 - DNA, 3003 bp, Unknown; identical to SEQ ID NO: 15774
  misc_feature (1)..( 3003): 2750-1469P.txt file - cDNA_ID_1019406; gDNA_ID_2936582; Annot_ID_143782

SEQ ID NO: 15776 - DNA, 689 bp, Unknown; identical to SEQ ID NO: 356
  misc_feature (1)..( 689): 2750-1469P.txt file - cDNA_ID_1019508; gDNA_ID_1564308; Annot_ID_149219

SEQ ID NO: 15777 - DNA, 3000 bp, Unknown; identical to SEQ ID NO: 14378
  misc_feature (1)..( 3000): 2750-1469P.txt file - cDNA_ID_1019620; gDNA_ID_2684113; Annot_ID_190695

SEQ ID NO: 15778 - DNA, 502 bp, Unknown; identical to SEQ ID NO: 448
  misc_feature (1)..( 502): 2750-1469P.txt file - cDNA_ID_1019620; gDNA_ID_1591055; Annot_ID_150456

SEQ ID NO: 15779 - DNA, 3003 bp, Unknown
  misc_feature (1)..( 3003): 2750-1469P.txt file - cDNA_ID_1019757; gDNA_ID_1620617; Annot_ID_162080
ttcttttcgccgacattcttgttttattctttctctccagggttatcgcatggtagtagaagcttggagcatcggtgaggaaaagagaaagagagagagaaggcagttttgttttccaaatgtcagcaattcttgcagctgccattggtggtgctgtaggagctcttgcattgattgctttgtttgtttttctcctttggttttgtgtctttcgtcgtaagaatctgtctagaacttctgagactggctcttctgatccatctactcaaggtaaatcacaaatcccatcaattctattcctctctctctctctctattgactttcttggatgatatcaaaatgatttagacttttttttcttttgttatatgtttgtgtgagttcagaaggaagaaatgttgcaattgagttgtcaatgagagaagctagaagatttgaaatggaggaacttgctcaagccaccaagagttttaccaataaaagtcttattggtattggcaaattcggcgaggtttacaaaggtttgcttcaagatggtgttcttgtagctatcaagaaaagacctggtttgcctactcaagaatttgttaacgaggtttctataattaatcttgttcaagtgtttgcttttagtcttcttagaccaagtgtattgattgagaggatatggtttatttcttcaggttcgttatctatcgtctatccatcaccgtaatctcgtcactcttttggggttttgccaagaaagcaacacacagtttcttgtctacgagtatgttcctaatggaagtgtttccagtcacctgtacggtaactctctgtccttaatgttattttcatttggtatttaatcagtttgagaaatgagtttggacgatgtaagcatcgtttaggtcttttcctctgttaggtgctggtggtaaagtacctggtaatagactagagttcagacataggcttgcaatatctataggagcagctaaaggtaaatcctctacaaaatcctcattgaagccagctctagcttgtgtcctgatcttgcatatacccttttgttatctctaggcttggcacatcttcactcgttgagtcctcggttgatacacaaggacttcaaaaccgctaatgttcttgtggatgaaaatttcattgctaaggttgcggatgcaggagtccgtaacttcttaggaagagaggatgttggtacatcgtctcacattgttgcagaccagattttcctctccccagagtaaattaaaaagatttcaccttctaagctctcatatgcttctttttagtatcaaagtttctcagattgtcccctttttttttcagggttcaagagttcaaaagattttcagagaaaagtgatgtctatgcttttggtgtattcctcttggaattagtaagtggaagagaagcatcagaaccatccccttcaagctcaacgcaaactctagtcgattgggtatgtaatcacactcaaaaccgtgccaatgtaatctattttgattctcattttgtatgcattgggagttgcagatgcaaaacttaacggattacgcagatataccaatgatgattgatgagagactaggaggtacatacacagcagaaggagttgaggaacttattacattgacactaagatgtgttgatgtatcaagtgagaagagaccaacaatgagttttgttgtgacagagcttgaaagaatattggataaagaagtgagcttaacaacagtaatgggtgaaggtactccaactgttactcttggaagtcagctttttaaagcaaccaagtgattattataaaggaaccatctttttacatatatatacatatatatatatatattatataagttctctgagacaagaaccaatcagagaacttaaggaggaagaagaagaagactgatcagctgttttgtgttaagtgtataaagaacagctgaagcttattgtttgtttgttttttccctcctttttcacttcctttggaggttattattttcagcaattatttttttgacaatgagtgcagaaaagtataactttgtaaaaacattatttattgatataaaggaagcaaagagtggaatgttgtgtgattctttgttacattttactctctacaaaagctttgaacttagcttgaaagactttattgccaagttggttggttgaataagttttgatgaaaagattccaattggctaactgttgaactaacagaaggtgataactccctgtctgaagaactctaattattatgtttgtacagaaaaactcagagctactttttcctataaagtagccaattttgggaaagattttgacctttagcttcaacctacctatgctttgatagcctttattgccaaaggggagatatagtaaccaagttggtctctaaagtcttgatcaaagattccaattggataacaacactcttggtcttggactagtatagttcctacatactccatttgctactagtgaaaataaactcaatgctctgatttattactctgtccctagttttgctaaaaaacctttgtgggcacacagaactataaacaaacagtctttggaacagattgcaaaatcaaaatcatgtttggtctgattttatgtcgggagagattgaagatctaatgataaagactcttcttctgtagatagttaactcgttaaattggtgggtctcacatttattattaccttccagattttgacctcacagaagcaaaaacacagtagtgattgaaaagcttagaaaagaaattacaaaaccagagattgttgattcttagttcatacatagaagaaagaaacagagctaatgttttgtcataaatactaaaaaccgttaaaagtatatttttaaaatgagaaaaaatgtgagccattcgatttttggatagacccatcatgtaaaggtttaagctttttttttgttagccaaagagaaagcctttttagttctattgacaatg

SEQ ID NO: 15780 - DNA, 3003 bp, Unknown; identical to SEQ ID NO: 15779
  misc_feature (1)..( 3003): 2750-1469P.txt file - cDNA_ID_1019757; gDNA_ID_1620576; Annot_ID_160994

SEQ ID NO: 15781 - DNA, 1291 bp, Unknown; identical to SEQ ID NO: 6238
  misc_feature (1)..( 1291): 2750-1469P.txt file - cDNA_ID_1019898; gDNA_ID_1621084; Annot_ID_55352

SEQ ID NO: 15782 - DNA, 1291 bp, Unknown; identical to SEQ ID NO: 6238
  misc_feature (1)..( 1291): 2750-1469P.txt file - cDNA_ID_1019898; gDNA_ID_1621084; Annot_ID_170471

SEQ ID NO: 15783 - DNA, 3000 bp, Unknown
  misc_feature (1)..( 3000): 2750-1469P.txt file - cDNA_ID_1019907; gDNA_ID_1620314; Annot_ID_153100
ttaattcgtagtcaaatatttgggttatgcaaagttaaatatgaaagactaatagtggtatgggtttatgcaatgttaatgagcagatacaagatatatatagaagggtctgcatggtccgttagcgagaagtacattttggcgtgtgactctgtgactctgctagtgaaacctcattactatgatttctttactagaggtttgcttccagctcaccattattggcccgttagagagcacgataagtgccgctccatcaaattcgccgttgattggggtaactctcacattcaaaaggtacattgttattctatcttgagattcacagcattagagctttggttgagatggtcttggtcttcaataggtacattgttaatctatgatgaaacataactttttttgacgcaggcacaggatattggaaaggcggccagcgattttatccaacaagacctcaagatggactatgtgtatgactacatgtaccatcttttaaccgaatactcgaaactcctccagtttaaacccgagattccgcggaatgccgtggagatttgctcggaaacaatggcatgtctgaggagtgggaatgagcggaagttcatgacagaatcactcgtgaagcaacctgcggattctggtccgtgtgccatgcctcctccttatgatccggctacgtattacgaggttgtgaagaggaaacagagtactaatatgagaatcctacagtgggaaatgaagtactggagtaagcagaatcaaaccggctcttgaatttttcatcttcatttcggttttggtttgtgtagagaaaaaagaaaatatatatacgtataaccaatgttgtagattactagatttatgtttcaagtttaggttatttcacacgaaactcaaaatgaccaaatttcatgtaatagctttagaaagatgaaatattatttacgagctgatgtcgtttcttaggtttccatgccatattctaagtatctaaacaccagcctaaaaagagagtttaaatttggtaaacgataacgatcaccttaagaaaatattaagctcaagaagagtagtagttagtataagattaagttggttatgaaactgatggtgtaacttgatggccactactactcactgacaccacaagttgctctaactttgagactgatatgtttcttttagattgatacattgcttctgatataggccataatcatttaaaagctgtttttgctgtctttctctctaattttcacgtcacgtagggtcaaatttcacctgttttatactatttctagttgatcattgagtgatttgcacgttactgttcagattagacccacccatcgcactacaatagtattggatgatttataaacttatatataaagcgtaagctatcaaacacatccacacaaaactagactgccgtaaaaaaaaaaactaaattatgtttttttttagttcaagctctcgaatacatccacacgaaactagattgccgtcaaaacaaacaagtaaattaagataaatcttaaagtcgaatgcacactgaacaactaaactatgtatatacgaaaatctacttgcacatgtgcatcttttgttattacttatttgctttttactatttcatattaatgattgcttcgacatattggaatctaatctcaaatcaccaagaagtagtggaacaaatcaatctttgtaatttgtcttaattttacgatatgaagaagtacaattcaaatctaaattctttaatcctgaattcttctgtttgatatcgtccctaattccctaataaatctaaaactttataaatcaaatcgtatgacgtattacaattttaccgtatataaatatagtgtattattcttggtggttttaccgtatataaaatacatcacagtaatccagtcacgtgcttttccgttggtatcaatcacgtgtctgtcaaggttcgcttcatgtgcaagaataagaaaaaagcgggagaacaaataaaagaagaaggaatttgttcagatctcgcagcctttttatcttcaaggtttcagtattcacatgcatcacgtgagaatgaatacctgatccacactctggatctatctgtacaacaccctcactgtttttttccttattatttcagatcagataatgcagatgtttatactttatagcagttaatgcagcctaccaaaaaaaacatttattgtttatggatcaaattgtgcaatatctatatttataagtgaaaacatttttccttcatgaaattataattatgggatttaataaagttcaagaaatacactgttttgttctattttcccagtgggtctttttgcagtagaattaaactttttctccacatactgacaaaaaatatacagaatgtcttgctttgaaaaaaaaaaaaatcataatcatttgcaaagtggaaaaaattattaatttttatttcaaatgttttattaatagtaaatttcaggatattaatttatgtcgtgggccaacggacctaacagccgttacttacctccgtcatttgtggcggcaataaagaagaataccaacgttaccggtttgagtttatcggtttggttcaattggttataacaaaaattaatttatattcctaaaaacagagaaacactcataaaagtagtattttcactaaaatacaaccaattaaatcataagaaataaaatgcattcgaatttaacaataaaaaaatgtattgtgaataactgaaaattcaatagttgatttttctggttaagtatggtacggttcacgtaaaccagtacagttagaaccggcaaaacaacccaaatgaaaaatcccgtctccgttatctatttagtataaaaccaaccacttcgtcttcttcatttcttcacaagtcataaccgtttcaaattctctctctctttctctttctttctcaatttttgtagtttcatactctagcttactaatcaaagatg

SEQ ID NO: 15784 - DNA, 3003 bp, Unknown
  misc_feature (1)..( 3003): 2750-1469P.txt file - cDNA_ID_1019997; gDNA_ID_2214478; Annot_ID_133175
ctttgtccttcatttttgatcagttcttactgtgattttcggctgagtagttgtaggaaagtctatgaaaaatgactgattatcaaggctgtggactttgtccttctatttggccttgtacatcagtaccatgcattttactatgatttctgagctatgttatggttaccatccatgaagcaggttttcagacggttgctattttcatgcagaacggtgaattggagaaaaaagagccagccgcaaatgcagtaagtgacaacgtggaggactcatcaaacaaggtacaaataattgccctaaatttgcttcttacgacagtgggtaaaactttttatatcgaaaatgagtgtagagtgtcttttaaatatctcttaacgtattcccttttgaaagtactgtaattgtatatgtcagtgacccttggtttatagttcagatcaaatttttagtttgtgccatagtttcgataccactgtaatttgtaatctcttgctctagagacaaaacatcggtatttctaaatttgacttggtcctttccattcatggttcatgatgtggggcatatcttggaattttgttgcatgtttttcatgctgacagcttttatatccttttccgtttaattgtctgtcagtagaatatcaattttgttagagttaacaacaaaggaataaaacatgtggctggatcaacttttttgtaagtttggctggtagtaggtgttatgatcaaaagcttgttcatagtggttcaacctggaaagccaaatgtcagaccaccttattataatcttaaagtgaaaaacacgcagagaatagaagtgcagttctctccgcagctacggcatctttgtggttgataatgttgaaagcttcactgtatttgcttgctatactaatttctttttctgtcaagcttgatattgagcctagtgtacttgttgcagatcttcattggcggattttcaaaagctatttcatctgaaatggtatgctgaactgtaattctttgaaaacatttgacacgttcaatcttctattgtccccatttctatcgtttcaacttctaggattgtctgattcctctttaacgtttttccagcttatggagattgtcagcgtctttggacctttgaaagcataccggttcgtgagcaacaatgatctcaatcagcgatgcgctttcctagaggttagaatgtacttttatttgtggccaagatacccccatcttagtctgccatctcgatgtagttcttgtgattgtttcatatctttaatttttcattttccgggtagcatgggaaggtgttattaccttgtaacttttacagagtaaccatgaatgtgactgtagttccaagtatattcatattaaccagccctaactctttttaaatctctatatttcagtacactgatggatctgttaccctcaaagcttgtgctggtctaaatggtatgaggttaggtggcagtgtaataacagccgtttgtgcatttcctgatgcatcatccgtagcggtaattcagtgacccaactttgctttcgttagttcatgttgtgtttgtatgggtgacattgaacagaaattcctttagttacttgtgagagtggtgtgtgtacgtaatatgtgttgcaggtgaatgagaatccaccattctatgggatacctagccatgcaaaaccacttcttggcaagcctaagaatattctaaagctaaaaaatgtggtaagcataattggtgtatcctttttcttgtgaatctttcccaaataaactatgtgaggctatattaacattccattctttcttgtttgacaggttgacccagaagatctcacgtcgttttccgagcaagaagtgaaagaaattttggaggatgtacggttagaatgtgccaggttaagctctgagatcatcttcccatgagtccattgagcttttaaaagctagtaaattaagaaaataggcctctgggtcttgtcatgatgcaggtttggggttattaagtcgataaacatcttggaacacaagagcaaagatatcactgtttctgaaacaaatccattgttgaacttagaatcaactgattctaaagaaatgaatgtgtcagtgatcgaggagaaagatgaaggatccgagaaagcggaagatattgcagacaatgtagatcttgcagaggttgtcatgccagacagtttgacaggtgaagacaagttatgtgaaccgtgctcggatactgctgctgaaacaagcactcaagaaaatgaagatctacactccactgaacaagagcattgtgaaaagattgttgaagaaagtgcgcaggccgaggcagagaatccacaagaagtagcatcagtgcgtaccgtgaagacaagatgggatgctggcgacaagatagaagaagaacaagaagaagaccccgaggatgtatttgagacgggttgtatcttcattgagtacagaagaccagaagcgacatgtgatgcagcccattctttacacggaaggctatatgataaccggattgtgaaagcagaatatgtttctaaagagctttaccaaatccggttcccaagtgggtaaataatcccacaacaagtgagactctgtgattcttctcatctttaccacataaccggttcaaaccgagttcagagatacatagcatctacaatcaaaaacccttcaaaaatctctttgtaatcgttgggattgatcaggttggattattcatcaccacctgtgtctcgttacttttatgtattagagaatccaagaagggaaagatgaaaccatactattgtgttggtggctatatggaccggtttgcttactgaaaaattgttgtgttaaaagagaacgtaaccttctgaatgagaaagcgtctttcattttctacaaaataataaataaaatgaacccaatctccttctttatccaaatcctccttcgaagcagaagtaacagcaaccaaaaatgacgacaatg

SEQ ID NO: 15785 - DNA, 3003 bp, Unknown
  misc_feature (1)..( 3003): 2750-1469P.txt file - cDNA_ID_1019997; gDNA_ID_2214478; Annot_ID_183209
attttttgcctttgtccttcatttttgatcagttcttactgtgattttcggctgagtagttgtaggaaagtctatgaaaaatgactgattatcaaggctgtggactttgtccttctatttggccttgtacatcagtaccatgcattttactatgatttctgagctatgttatggttaccatccatgaagcaggttttcagacggttgctattttcatgcagaacggtgaattggagaaaaaagagccagccgcaaatgcagtaagtgacaacgtggaggactcatcaaacaaggtacaaataattgccctaaatttgcttcttacgacagtgggtaaaactttttatatcgaaaatgagtgtagagtgtcttttaaatatctcttaacgtattcccttttgaaagtactgtaattgtatatgtcagtgacccttggtttatagttcagatcaaatttttagtttgtgccatagtttcgataccactgtaatttgtaatctcttgctctagagacaaaacatcggtatttctaaatttgacttggtcctttccattcatggttcatgatgtggggcatatcttggaattttgttgcatgtttttcatgctgacagcttttatatccttttccgtttaattgtctgtcagtagaatatcaattttgttagagttaacaacaaaggaataaaacatgtggctggatcaacttttttgtaagtttggctggtagtaggtgttatgatcaaaagcttgttcatagtggttcaacctggaaagccaaatgtcagaccaccttattataatcttaaagtgaaaaacacgcagagaatagaagtgcagttctctccgcagctacggcatctttgtggttgataatgttgaaagcttcactgtatttgcttgctatactaatttctttttctgtcaagcttgatattgagcctagtgtacttgttgcagatcttcattggcggattttcaaaagctatttcatctgaaatggtatgctgaactgtaattctttgaaaacatttgacacgttcaatcttctattgtccccatttctatcgtttcaacttctaggattgtctgattcctctttaacgtttttccagcttatggagattgtcagcgtctttggacctttgaaagcataccggttcgtgagcaacaatgatctcaatcagcgatgcgctttcctagaggttagaatgtacttttatttgtggccaagatacccccatcttagtctgccatctcgatgtagttcttgtgattgtttcatatctttaatttttcattttccgggtagcatgggaaggtgttattaccttgtaacttttacagagtaaccatgaatgtgactgtagttccaagtatattcatattaaccagccctaactctttttaaatctctatatttcagtacactgatggatctgttaccctcaaagcttgtgctggtctaaatggtatgaggttaggtggcagtgtaataacagccgtttgtgcatttcctgatgcatcatccgtagcggtaattcagtgacccaactttgctttcgttagttcatgttgtgtttgtatgggtgacattgaacagaaattcctttagttacttgtgagagtggtgtgtgtacgtaatatgtgttgcaggtgaatgagaatccaccattctatgggatacctagccatgcaaaaccacttcttggcaagcctaagaatattctaaagctaaaaaatgtggtaagcataattggtgtatcctttttcttgtgaatctttcccaaataaactatgtgaggctatattaacattccattctttcttgtttgacaggttgacccagaagatctcacgtcgttttccgagcaagaagtgaaagaaattttggaggatgtacggttagaatgtgccaggttaagctctgagatcatcttcccatgagtccattgagcttttaaaagctagtaaattaagaaaataggcctctgggtcttgtcatgatgcaggtttggggttattaagtcgataaacatcttggaacacaagagcaaagatatcactgtttctgaaacaaatccattgttgaacttagaatcaactgattctaaagaaatgaatgtgtcagtgatcgaggagaaagatgaaggatccgagaaagcggaagatattgcagacaatgtagatcttgcagaggttgtcatgccagacagtttgacaggtgaagacaagttatgtgaaccgtgctcggatactgctgctgaaacaagcactcaagaaaatgaagatctacactccactgaacaagagcattgtgaaaagattgttgaagaaagtgcgcaggccgaggcagagaatccacaagaagtagcatcagtgcgtaccgtgaagacaagatgggatgctggcgacaagatagaagaagaacaagaagaagaccccgaggatgtatttgagacgggttgtatcttcattgagtacagaagaccagaagcgacatgtgatgcagcccattctttacacggaaggctatatgataaccggattgtgaaagcagaatatgtttctaaagagctttaccaaatccggttcccaagtgggtaaataatcccacaacaagtgagactctgtgattcttctcatctttaccacataaccggttcaaaccgagttcagagatacatagcatctacaatcaaaaacccttcaaaaatctctttgtaatcgttgggattgatcaggttggattattcatcaccacctgtgtctcgttacttttatgtattagagaatccaagaagggaaagatgaaaccatactattgtgttggtggctatatggaccggtttgcttactgaaaaattgttgtgttaaaagagaacgtaaccttctgaatgagaaagcgtctttcattttctacaaaataataaataaaatgaacccaatctccttctttatccaaatcctccttcgaagcagaagtaacagcaaccaaaaatg

SEQ ID NO: 15786 - DNA, 3003 bp, Unknown
  misc_feature (1)..( 3003): 2750-1469P.txt file - cDNA_ID_1020005; gDNA_ID_2214500; Annot_ID_133641
ttttatgctgaatgtagatagctagaaacctaattgtttaaagatggagaaaaaaaaactatagtgtcctccataaaaaacaggtcatctccgaagagttattttcaaaatcgacattaatgatcagttacatattttttaatcattatttgaaacaattattttataattttagctaagtatgtgattaaaacaaatgaaaaaaaaaaactctaaaatggagggatgaacatatttggggaagtgatagacaatgatatttcatatttaaccattcgttattgaatttaggagttgataattgaatgcctatgaaaaatatgttcctattgttagaggtgggttggagtcttgaagacagaagacgctctaatatacaactgaagtttgagttgcttgtaaattcaagttttgtataatttattttcattaactgcaaactaaaatttatataatattgcgtgaaacagaagcaaaagcaagcaactcgttgggtaaaatctgcagtttctgcaccaaattaaagaagacctgcaacattgccgcctttacataaatacacacactagatacataggctctatgtatcttatagtatacgatatttgtttagaatattctgcaagttgattaaatttcatggatcagtagacttgtttatattctaaagtttcaagaaatagtcaatttgtctacgtataattaaaccgtttcttagctggaagtttacgataacgtatccaacatttaagtattgtcgagccatataattagagaaaatgactagtgagaacactgagaggtttagcagctgagcaagcaagttacttacaaaacttggaaacaaaggttgtcacactaatattcacactacgtgagaattcgtacagtgcacatcaatataatatttttaaaacagcaaagtgaaaaatgaacatgatactatatatatccaatttattaacaaaattttataacttatagtatcaaaaatagtaagactcatattagaccaatatatattaatgcctacctacctttgaccttaggagaaagtatgaataattaacatgtatccaggaatggcattgtagaaaatactattttacattactatttcatctaaggattgagatttcatatgaattcaatgatttatatttactgccaatatttttttatcttactaatttaaacgaaagagatattttaacttgaaataattagaaaataggttatagatcattcaaacataaaattattaaactgttcaactatttctaaatgatttatgttagccgtcagataattaacatggaaaattctagtttcatcatgataatactccaactatatgtgttaatatgcgtataagagagagtatggcgtagtatccaatcatttcttagtatcatgtagtatttggtatatgccgtatagtagtacccaattatttctttgatgggcaaatgctaatgactaatgagtattttgcaaactcatgatcactgaaaacatgagccttcggtcgacgatcaggtgtcttaaatttgtctgctctttaatttttgtaggataaaaaattgaaaaatttgaactttagaccatagaatagattattccagctagtaatctagaataagaatgatgtgaaaaacttgtatttagtggttgatcatataaccaaaccaaaggatgattacgttttccttaaactctaaaaacatgcagattattgatctgtccatcctagttttaggtacggtattaaatttagatagctgttgaaaaaaaacaaaagtgaagatatctaaatctagatatgttggagcaaatccagtagtggattctaagcaaagtttctaacctataataataataataaaataataaataatattatttaattaagatagtttataaggaaatgtgagagagtttctaattcaagagattttgaagactcttctaactatttttagaaacttttcaaattaaataatattatttcttattttattattattttagtagattagaaactatggttagaaaccaccattgagtatgctcttaatttatatcctataacaagtcaataaatcgtcaaacattaatacgttgcattatttgtttgtcatcatatcttaaatatttcgaattaaatgatacgttttcgtcacacaactaatgctttttagtagatgaaatatagtaaaatacgattttatgtattttgaacccatgtggcgttatgttttaatttattattggatagtagaagaagccggaaattctggatgtcaaatagtcacattaatattcaatgcgaaaacgtaaaaaaaagtaagatgctaccgttacctaaacaaaagttaatggtgtgattttacagcacctgtttaatatttttaaaattacataaaaaaaccaaagagaagtaagaaaaaatgaaaaagagagattggtatataaaaaggaggagtagggggtgaagcccgaagcatcttatagtatttttagcttcattccttcttttgctctgatcaaagtcttctccttcccttctctctctctttcctcctctgcacatttctgggttcttctcttcttatgctctgtttcttttaagacacagaagaaacagtacagagttgagattttcttaaacaaaagtgaaaagagaagaaacaagtgacagctcaaacggacaaaaaccactcttgggtctttcttgcttctgattctttctcttctctaatagaagaaaacgtaagtcactctctctactctcttttttcacactgaagaagagaaaaaacgtgaacaaagaactgtcaattctctttccctctctgttttatcttcttgaattctccaagattgagatctctctcagtctcttatgtgctctgttttctcctctctgttttcacttagttactaaacacaatcgattctttcgctctgttttatttctcagatctagaagctaaaaaaatg

SEQ ID NO: 15787 - DNA, 3003 bp, Unknown; identical to SEQ ID NO: 15786
  misc_feature (1)..( 3003): 2750-1469P.txt file - cDNA_ID_1020005; gDNA_ID_2214500; Annot_ID_183949

SEQ ID NO: 15788 - DNA, 3000 bp, Unknown; identical to SEQ ID NO: 1046
  misc_feature (1)..( 3000): 2750-1469P.txt file - cDNA_ID_1020019; gDNA_ID_1620351; Annot_ID_154316

SEQ ID NO: 15789 - DNA, 3003 bp, Unknown
  misc_feature (1)..( 3003): 2750-1469P.txt file - cDNA_ID_1020019; gDNA_ID_2570; Annot_ID_145792
  misc_feature (749)..(749): n is a, c, g, or t
  misc_feature (979)..(979): n is a, c, g, or t
gagtatagttctctgaacttccgtgatgagaataactctttctttttgagacttgtctattgcattttttcaataactctaccccttctgagttatatctcggagattattgaattcctgactttttcctaacgttagagtactctacattctatcgataggaggattttgtaaccgagaagaaggaagagttgtcaaaggaagagttggggcgtcttgttgcctctcgttggacaggagagaaatctgataagccaactgaggcagacgatatccccaaagctgatgatcaggaaaaccatgagcacacgcccatcactgcacatgaagcagatgaagatgatggatttgtttcagatggtgatgaggataccagcgatgatgggaaatacagcgaccatgaacctgaagatgattcctatgaagaggagtatcgccatgattctagttcttcatacaaatctgatgcagatgatgatgtcgatttttcaggtctgcactatttccacagatgtttatattcttgaacgatgttaatcatctatcatatttagttgacttgattgaatttcattactgatagagacaacctcaaatcctacttggttggagaagatacaaaagactgtcaagaacattttgctggctgtgaatttattccaaaccaccccagtggacaaatcaggtaaaaaaatagtttagcattttcatagtgatactcgtattctttagtgattcatctatattgntgtggaatgtgcagaggctgatcgggtacgcaaagaatacgacgagtcaagctccaaactgaataaaatacagtcaaggatatcgagcttagaaaagaagctaaaacaagactttggtctgtatgataagacatcctaagccttcacttacgtttacctttctttgagttagtccttatatattgtttataacaggaccagagaaagagttctattcattccatggtcgntgttttgagagcaaacagggcaagtaagaataatcttagcaatttaatgtcacatccattctttattaacattactatcagctattagaattatatatctgatgcatttactgttattacctaaataatgctgtaggtatacttacaaagtctgcgcatataaagaagcaacacaagaggagggctattcgaaaactcggttagggtaagtgtcatgccactttatcttttctgtgcatgctgatctctttcatgatacagataactaataacaaggaattggttcgcagatgataattaaatatgagtgattattttatctgtgcttattttgtcgcttccttattttgtttaatggaatttgctaaaatagggagtgggacaaatttgagaactcttaccaattcatgtcatataccaacggagaaaaatgctggaatggtcccgatagaagcctgaaggtagtgtctgattacattaaatccaaactaattgttcaattaatattttctccaattatatttatataaaaaaaattatctgagaagatttttgcgcttgcaaagatcacagagatatacaaagcttgactgtctcactaaatgcaggtgaaactaagatgtgggttgaaaaatgaacttatggatgtcgatgaaccaagccgttgcgagtaagttcttatcgtaacctacatctcacgggtcatcatctccttttatctccagtttttctttttatatccttaaatttttactctcttgttgcagatatgcggccatcttatctactccagctcggtgtttggaagacaaacttaaagtaagtttttgtgtcatctcaaatctcaaaacagacctacactagttaacacttccttaacctggtgtttgtctttgtataggaactacaacagaagctcgagaagttgatgaaccaagacaaacctcagaatcacgacgaactctgatcattttcacctgaaataattcttaccatatgcgcactgcgcttagatttatgtcagtttagactagtaatcttgctcagtcgcaaacgtcaagagaggacttaaaaaaagaacagagaagttttgggccggaagagaatgaatgatagagtcaagtttacctcatttgggttcaatggagattttctatatcaaaagtatttagacaatgttcaaactttggttaagcacaaagaacaattcttctatataaaaacatgaagaagagctaaaaccttttaacttttttggagtcttaaaaatttattcgagattgttggagctcgtcaatattaaggtacatatgtcagttatcaaacatctccaagttcacttttaggtcagaaaatggttttaatgtctaaacaagtggtaggtttggtttggttcagttttaatgctttcttttacagattccattaccaatagagacaaactagaacacaatatttccggaaataaattactgcagttcaacacttaacaccatgaaagaagacaaagaacaaagatcaacttcagaaattagtttaaacactattgccaaaatggcaaaatacaattaataccattttttaatcaacataaacacttaaaatatcattataagatattttatatttggaaaaaaacgtggcccgacaatagatcgagaagacataaaaaggtaaacgaaaacgaatattaataaacaatgtgcgtcactccttaattattgaaagaaaattaaaccggtgtgaaccaatcagtaaacatatggtcttttgttgaccaaatctaaaccaataaccttcaatttcatttctcattttttacctcaaaagtcaaaaaaaactctagaagaagactcttaactcataaatctctcattctttctcagattctctctctctgttttccttgttctccaagccagatctctctccataaatctctcttcatctctctctttccaccaaaacatccgcgatcctcgattctcaattccgtgtctgttttttttcttcacttagcgatg

SEQ ID NO: 15790 - DNA, 3003 bp, Unknown
  misc_feature (1)..( 3003): 2750-1469P.txt file - cDNA_ID_1020161; gDNA_ID_1620414; Annot_ID_156368
tccggaaggcacgaaagagcctggaatcggttggatgaccgctttcttgttctttacttgctttgttggtcttttagcattggttcctctaagaaaggtagagattatttaagattctgtctcattgaatttgtagttagagatgttgcggtaggccaaagtttgcgggtcagtccggcccatataagtgtgatatgggcctggccaaacccgctatagccaacataggacggagattaatattggccaagtttggactattaatcccctgttggctggtttgggtctacattgctaagtgttcattatgcttctttttttggttaaccagatcatgatcatagactacaagctgacatatccaagtggaacagctaccgcggttttgatcaacggtttccacactcctaaaggcaataaaatggccaagtattaactcgattttttggcagtctcttagctctctttcaccactaattctagagtttttgatttaaataaaatctgtttatatgcaggaaacaagtgtttgggtttgtgaagtacttctcatttagcttcatttgggctttcttccaatggttcttctctggtggtacagagtgcggtttcattcagtttccaactttcgggttagaagctttgaagaacacgtgagtattattcttagttctattgactgtttatatatcaacagatagaaacagaatcttgatgatcttgaaaaaacttgacagattctacttcgactttagcatgacatacgttggagcaggaatgatctgtccccatattgtcaatatatctttgctttttggcgcggttctgtcttggggaatcatgtggccactcattaaaggtcttaaaggagattggttcccatcaactcttcctgaaaacagcatgaagagtctcaatggttacaaggttccatacaaaaaacactagtactctacaataaactccgccctttctttcgcgtactttcgttcttaatttgttcataactctttaggtgtttatatcaatctcattgatcctcggagacgggctttaccaattcatcaagatactttttaagacaggaataaacatgtacgtcaagttaaacaatcgcaactctgggaaatctagtaagtatacaccaaaaaaactatagaaaaatcgtcatttcaataatgtattatctgatgttcaaacgtaaatcgcagattcggagaaagataagcaatctattgcagatcttaaaagagatgagatctttgtaagagacagcattccattatgggttgcagcagtaggatacgcagcgttctctgttgtctcgatcatcgcgatccctataatgttccccgagctgaaatggtacttcatagtcgtagcttacatgttagctccatcgttaggtttcagtaacgcttatggagcagggctaacagatatgaacatggcttataactatggtaaagtcgctctgtttatcttagccgctatggcagggaaacaaaatggtgtagtcgcgggacttgtcggatgcgggttgataaaatcgattgtatcgatttcttctgacctaatgcacgatttcaagacaggacatttgactctgacttcacctaggtcgatgcttgtgagtcaagcgatcggtacagcgatcggatgcgttgtggcgcctctaactttcttcttgttttataaagctttcgatgtcgggaaccaggagggagagtacaaagctccttacgctttggtatacagaaacatggcaattcttggagttgaaggtttctctgctttgcctcaacattgtttacagctttgttacgggtttttcgcattcgcggtggcggcaaatctcgttagggataggttaccggataagatagggaattgggttccattaccgatggcaatggcggttccgtttcttgttggagggtactttgctattgatatgtgtgtgggaagtttgattgtgtttgcttggaatatgagagatcgagttaaagccggtttaatggtaccggcggttgcttccggtttgatatgtggagatggtctatggattttgccgtcgtcggttcttgctttggccggcgttagacctcctatatgtatgggcttcatgccgagtaaatattcgagttaaagatagctttttacgagtttttacttttttgtgtagcgacaaaaaaattagctaaagaattgtggaaacaaaaaaaacagtttatataggaattgtactttgtaagtttgtatacacaataaagtaataaactagtctctcaattctatttaaaaatccatgtcccaagtaacttctccccaaaaagaaactcaatattttagaataaggtcaaatggaattaaattccagaagatatttgccaaaatagtgataaaaatacggttaaattggtatatgtttttactgacaaaaggcaagattcttctattttaagatttatttctttctttgaaatctgctaaacgttgttagatcacactttatgtgtctgtttttttttttgtcaattcagcacacgtcatatttgtatttttcaaagtaccaaacgtggaccaaaataaaatctcgtcaaaaatggaaaccaaattttaatttgatttgcacaaagcccaatttgatttgtttaaagtcaaagcccaacttgaccaaaactacccctgctcatccaaaccctaagcaaaatatcgagggtagtttcgtattttgtttatattgaacacaattaagtaggtgaggaacctctatttcttccgtcttctgctgatttctgagcttcggagctatcgaaaattctgaatctgaaagggtaaagatcccatctttttccaaaaatcgataagggaattagtatattcgttcattcatcatcgttctgatgatttcgatttgaatctgtatctagtactctgtattatcagaaattttgattagtagctttgatgtgttcttgttttgcagtttgagtgaagatg

SEQ ID NO: 15791 - DNA, 3003 bp, Unknown
  misc_feature (1)..( 3003): 2750-1469P.txt file - cDNA_ID_1020236; gDNA_ID_1620344; Annot_ID_154110
cacagagtagttcgacagatctttctcgatttgtggattctctaactcaacctaatcttatgctagtacgatcgataatcgagcaacgtgttaattaaaaaatgtagaacggacaactatatacaaaaccacaaggagagatctaagaaattcaaactccagaaacaccacgcaatgattctacgaacatgtttaggatgagaatcctaaaagagaagaagaagcggctgaagcacgacgatattaacagagcgacggaacaatggaacgaacctgtagacggaagcggcggatgctcagaagaagctaggcgaaatcgagtttgccaaagaaaaaccctagaatcggaaaactgagcgatggatttattggtgtttatatactctaaatgggccacacttaagaagctaacgtcaatttttaagcccatatttatattttatacttttgagagttagtatgaaatacaaatatgggcttttgagtatggtccttttaagagaaaaagcccatactttagataacatatgggctttttaagtccattgaaattcacattagcttctacctttttgtcggctagcttctacctatttcacaggtataaagactggttcgaaaggcgcgtctagccctcttgatgaatgaaagaaagggtttctgagccctagccctgtaagcccacacctgtgtagagtagatcgttcaacacctgcggcacaaaccaatttttgacacatcacaactcacaagtccttcattacccgttcttaatcaaaatctctaatgtatcgtttcaaaatgtgtattttctttcacaattgactagtttctaactaactacttccaaattcttccatgacgattccgttatcataaggtcatgattttgagaataataacttcacaaaaggcatacagtatttagttcaattagaagttagaacacatatagttcaattaaattattagtactgcaagtatagggagcaaggaaaggaacaaaaaaaagaaaaagtattgggaagtacactacagcgagttgtgtaaaaaagctcagagacgaaagccagtcacgaaccgattgattccagcaaaatcagaaactatcttcaaatcagagaaacagtctttgagatcactggtcatcatgtaatctacgatcatcttgctttgcttctctccattagtctgcatcatcataaacaaataggattaatctttcatggttgatgtgattattagtatatacgcaaacatcttccaaccaaataaacatataatgaaaattgaccaatcaagactttgatctttgagtggcaatcataatcttcttagaacgccaaattcttactgataaagtgaaagcaacaataagcaacaattgtttcttcggactcatacacaagaacgattatcttaaatctcttttcaatactaacatttccggttttagtatcagagacaaagagaaaaacatagtaaacccaaacgattgtatctttctactaaatattttggagaaacagagtgaaaataaggtaggtacctcgaaaacgaaaaagccaccaggttgaagcatccgagaagccccatgacagagatgaaaaagactatcagttccatcaataccaccatccaatgcaagtttcggttcgtgtctaccaacttcagcttgtaggcctggaatgtcatcacttggtatgtatggtggattactcacaagccccacaagttttccttcaagatctttcaaaggctcaaaccaagatccttctctcacttcaatcatcccctggataagtccaatttcatcacaatggcaagaagtaaccaaagctgaagaatctcatacatatatcaaaattcacaaccaccatgagaagaaatcaaactgaaaattcttcaatccacaatatactgcttttatctaccaaatcctctaatccattacaactttgatgttgaaaattcccaattccatgaatacaattggtataatttgtcatgattagctttagcaaaaaaatcaactaacctcaaggctgtatctctgcacattgtggccggcgacggcgatcgccaccggactgagatctgtagctataactctcccacggcttcccaagactttagcaatgccgatcgcaatagcaccacttcctgtcccaagatcagcccaaatatctttcttaaaccattcatctctcgttacaagctcctccaccatatcgacgatcagttccgtctccggtctcggaattagaaccccttcctcaacgcacaacactagatctctccaatgctcgcatccgacgacgtactgaaacggccgacgcttctcgatcctctgcctccataaatcgtaaagctcctccaacgacgctctcaatttcacattcttctcgccgttgtccgcgatttcgcttctatgaagaatcactaaaggatcgtctacgattgagtcttcgatcagccattttagctcacggtggagaatgacagagtcaagagtatcttcggaattcttcgaagattcctctacggaggacgccagatctttcgcccagtcgtgccatttccaaacctccgatagagaagttgcgtgcgacggcgtcctaaggtatagcggtgtcttgggagttatgctgagagacttagtcggccgagaggattttgactctgtaagcgacgtgtattgcggtggttttttcgccggagaagatgagcaaagaggtttagcggcagagagcaaagaggttaaccgtagacttgggaagattcttatcatttcaaggtttttgccgcacaaacagaccaaatcggtttataaatatattaccaactaaaccggataatccggttctgtttttagccgggttttgaaccgaggattgaaataagattaacaaggaatataaggggctaaagcataaataaagaaaagttcttcttatttttgtttgcggctccgatagatctttggagcaacgaacaaacatg

SEQ ID NO: 15792 - DNA, 3000 bp, Unknown; identical to SEQ ID NO: 4551
  misc_feature (1)..( 3000): 2750-1469P.txt file - cDNA_ID_1020484; gDNA_ID_1620714; Annot_ID_49067

SEQ ID NO: 15793 - DNA, 3000 bp, Unknown; identical to SEQ ID NO: 4551
  misc_feature (1)..( 3000): 2750-1469P.txt file - cDNA_ID_1020484; gDNA_ID_1620714; Annot_ID_165555

SEQ ID NO: 15794 - DNA, 3000 bp, Unknown; identical to SEQ ID NO: 4551
  misc_feature (1)..( 3000): 2750-1469P.txt file - cDNA_ID_1020484; gDNA_ID_2926217; Annot_ID_142283

SEQ ID NO: 15795 - DNA, 3000 bp, Unknown; identical to SEQ ID NO: 4551
  misc_feature (1)..( 3000): 2750-1469P.txt file - cDNA_ID_1020484; gDNA_ID_2926217; Annot_ID_203066

SEQ ID NO: 15796 - DNA, 924 bp, Unknown; identical to SEQ ID NO: 15121
  misc_feature (1)..( 924): 2750-1469P.txt file - cDNA_ID_1020522; gDNA_ID_2926042; Annot_ID_196088

SEQ ID NO: 15797 - DNA, 257 bp, Unknown; identical to SEQ ID NO: 111
  misc_feature (1)..( 257): 2750-1469P.txt file - cDNA_ID_1020543; gDNA_ID_2745; Annot_ID_145914

SEQ ID NO: 15798 - DNA, 3000 bp, Unknown; identical to SEQ ID NO: 2798
  misc_feature (1)..( 3000): 2750-1469P.txt file - cDNA_ID_1020575; gDNA_ID_1620598; Annot_ID_161586

SEQ ID NO: 15799 - DNA, 3000 bp, Unknown; identical to SEQ ID NO: 2043
  misc_feature (1)..( 3000): 2750-1469P.txt file - cDNA_ID_1020642; gDNA_ID_1620481; Annot_ID_158329

SEQ ID NO: 15800 - DNA, 3000 bp, Unknown; identical to SEQ ID NO: 10064
  misc_feature (1)..( 3000): 2750-1469P.txt file - cDNA_ID_1020851; gDNA_ID_2213622; Annot_ID_195756

SEQ ID NO: 15801 - DNA, 3000 bp, Unknown; identical to SEQ ID NO: 10064
  misc_feature (1)..( 3000): 2750-1469P.txt file - cDNA_ID_1020851; gDNA_ID_2213622; Annot_ID_131997

SEQ ID NO: 15802 - DNA, 3003 bp, Unknown
  misc_feature (1)..( 3003): 2750-1469P.txt file - cDNA_ID_1020907; gDNA_ID_1620756; Annot_ID_166977
tcgactgggctatgtttgtccggaaaagtggcgagagcttgtaagatactggatgagttagcaccaatgggtgtgattcttgatgcagcttgtgaagatatgataaatacattgtgtaaagctggtcggataaaagaagcttgtaaattagctgatgggataacagagagaggaagagaagtgccagggaggatcagaacagtgatgatcaatgcgttgaggaaagtgggaaaagcagatttagcaatgaagctaatgcatagcaaaattgggattggttatgaaagaatgggtagtgttaaaaggcgtgtcaagtttacgactttacttgaaacttgttttgactcttgagttttaagaattgtttgcgtttatatcttcataaaaccccatcaccggagagaacaaggctcaatcttcgtgataatttgaaggatgaagaagattcagaacaacaaaacgttgtcggcgtttgattccagtcatcgccggagagaacaagactctccatttgttacttccatggcttagtatatgggtaggtcttggtgtaagcttgtattttgtattctcgatttgtacgattttattattaaataagaaaatagacagttcaacaacaacgtattttattttcatgaaagaatcagtctccactaaccgcctcaaaaactgtcgaagcccattgggcacttgcaaagcccaactgtttataaatagaaatccagagtcagagatccattcgatagcactttcctctctttctctcatcgtaaaaccgttctttgttttctctatttctctcgtctctttcttctacccagatcactgattgattagtcgtgaattttactctactctttcatcaattttactgtgtttaattcataaaacaaaacaaacgatcgatttttgtttttttttggggatgaagatcagaagcaaaagcaaaggctatcgtcaagagatcaaatcaacttgcaccgactccaacactctgttctcaaaaggtacttttcgtcttgttggaatttttggccaaataacgtcttttttttatatggtatctaattactgtattctggttgatcgcaaaacaaagaattctcatgtttaaagtgggtttcgtctaatccaatttgaattttaggtcttatattatttccctagctctaaccctaatcatatatttctcaaagtttttgatttttattcaagattccttctaatcaattatttcttctttgtatgtagatgtggttgcaacttcggagcttttttcatctgtgatatcgtagcgtgtgaaagacggataattctacagagacaatgcatcatcccattcggctaggtcaattttcatctctatcttgtttataatctataatcttatagatagtttaattacaaaaaaggtttttatactatttttgatttttcaaaacaaaatatatttctcaaaaaaattatttttaatggttttcaactctctctttttttttcttctataatactaaattaatatgacgttgtgaaatctaaccggattttggatcccgccagttaaccgtggtcattagcgattccacaaatccaacatgtttttcacatcttcatatatatttagcatttatttttcttaaaaagttttcaattctttttttttttgttttaaaattttataaatactaaattaatatgacgttgtgaaatctaaccggattttggatcccgccatttaaccttggtcattagcgattccacaaatccaacatgtttttcacatcttcatatatatttagcatttatttattttttaaaaaattcaactctttttttaaaaggttatataaatattaaattaatatgatgttgtgaaatctaaccggattttggatcccgccattgaaccgtggttattagcgattccacaaatccaacatgttttcacattttcatgtatatttagcattttttttttttttttcttaaaagattttcaactcttttttttctataaatattaattaatatgacgttgttaaatctaaccggatttaaaaaaatatccaaaatccttaagagatgtgttatgttcaatatagtttacacataatttaaacttttaacatttatttttattttattaaatcgctttggttatgtttaaaaacggttagtttttaacgtatttaatacgacacatatataaatacgtcaaaaattaaccggacttaacatcccatcttttataattaacactcggctaagttttaaagtttctcacgaataatgttttatgtaatttgtatatacatgatattttgtggttggaccggtttttaaaatcaagatctgaaaactttatataatttccctttcttgtgcttcgttcggtgtgttctttgcatgtaacatgttagcacgataagctgaaacattatagtattgatcttttaatatagttaaatcttcattatataattgagttataactttgataaactaacaatagaatgaatgatctgttacaaacgaagttgtgacatgtcactttcgagccactaaccgcaaagttcggattcaaacttttgaagtgcgttaaagtgttcgtaaccaatatttaaaaccggattcaaattgaatcaaaccgttgaaaaactcaacatgaaaagcaaaaccggaattctattactagtgaactaaatccaattgaccgaataaaatccagtaaaccgatccataaaccaaaattggaagaaaacaatgcctgtttaataggtgttgaaactttgctgaaaaaaaacgaagcgagcaccctctaaaatgccttcgatttctctggcgccattgatttagttttctctctctgactacaaagtatccattcgttcaaaccagtttcttcccattttcgatttctgtcaaaattcaccaaccaactccaaaaactctgttattgaataagtttcttgatcttaaaacaaacgatctcaaagaatg

SEQ ID NO: 15803 - DNA, 3000 bp, Unknown; identical to SEQ ID NO: 5881
  misc_feature (1)..( 3000): 2750-1469P.txt file - cDNA_ID_1020930; gDNA_ID_1620823; Annot_ID_57841

SEQ ID NO: 15804 - DNA, 3000 bp, Unknown; identical to SEQ ID NO: 5881
  misc_feature (1)..( 3000): 2750-1469P.txt file - cDNA_ID_1020930; gDNA_ID_1620823; Annot_ID_169598

SEQ ID NO: 15805 - DNA, 60 bp, Unknown; identical to SEQ ID NO: 318
  misc_feature (1)..( 60): 2750-1469P.txt file - cDNA_ID_1020930; gDNA_ID_1563741; Annot_ID_148218

SEQ ID NO: 15806 - DNA, 2623 bp, Unknown; identical to SEQ ID NO: 618
  misc_feature (1)..( 2623): 2750-1469P.txt file - cDNA_ID_1020940; gDNA_ID_1592381; Annot_ID_152376

SEQ ID NO: 15807 - DNA, 3000 bp, Unknown; identical to SEQ ID NO: 5774
  misc_feature (1)..( 3000): 2750-1469P.txt file - cDNA_ID_1020960; gDNA_ID_1620816; Annot_ID_169251

SEQ ID NO: 15808 - DNA, 3 bp, Unknown
  misc_feature (1)..( 3): 2750-1469P.txt file - cDNA_ID_1021202; gDNA_ID_1621085; Annot_ID_170485
aag

SEQ ID NO: 15809 - DNA, 245 bp, Unknown; identical to SEQ ID NO: 589
  misc_feature (1)..( 245): 2750-1469P.txt file - cDNA_ID_1021259; gDNA_ID_1592151; Annot_ID_152035

SEQ ID NO: 15810 - DNA, 3003 bp, Unknown
  misc_feature (1)..( 3003): 2750-1469P.txt file - cDNA_ID_1021304; gDNA_ID_1620441; Annot_ID_157173
taaccgaaatggatgttcctaaatcataccttgaaacccttccaaaggtctacatctttaactcaaaacatccctataaaaaccattgtaaggttttttttttgttctgacattaaacttttggtacagaacggtaggtcctgccttggggatgttatctacaggtatgtaacatctgacaaattttctgcggagtctcttctcgattgccttgatctgtcctctgagcatattgctcttgatatcgcaaaccgtgtggaagcttcgatatatgtttggaggagaagagttcaaacaaaacttggagtcaacaataatacttcaagcactactccaaagttaacatgggaaatggtcaaagaactaatggctgctggtgacaaaaggggattgcttgtggagagatcggaaactctcttacgttgcttgaagcagcggtttccttctctaacgcagacttctctagacataagcaagattcaatggaacaaggtccagacacacaaatcctctaaatacattacagtacaaaatggctttgcttgttcttatatattcagtcctttgaaaatttcaggatattgggaaatcaatcctcgaaagctactcaagggctttggagagcttagcatcaaacatcatagcacgaatcgatgatttactctacgtggacgacttaacaaagcaatcagatgataacaatcttttgtcaagtccagcggtcagcagcattatagctcacaagaaagtagtaccactcccttatctaatatctgcatcaggaactccatatagaacaagcttctcaacaacaccaggcttctctccttcaatgattagccccaagaaaggagagaggagaacaccttactccagcaaggacactaacaaaatcattgagaaaggtcttccttctcgaggatatggagtgagaagagtcttgaacaattatcttggcatggaatcaaaactgaaaatatgcgttaatccgtcagataatgcagatacagcagtgattaaccaaatcagcaaagacgtggaagaagagaagaaaagaaactcaacatcagtccatcaaaagggtcctccaaagtacactgtctcttaaaagctaatagaagaaactcaatagagtgtataattaatgcagacatggattgatttgtttgatatttacttgtagtttctgtcttatttggaatggtaaagtgtctatctttgcaaaccaaatcagatcacaaaatagacaaaaatgagagtggttgtaacaaatattctcatcaaatttgttctggtttggtttactagctttatttatttggtaaacaatcaccaataacgtgtataatttaaagttatgattataatgtttctttttgtaacccactacaaaatgtcgttgtagtatagtggtaagtattcccgcctgtcacgcgggtgacccgggttcgatccccggcaacggcgattttttttttttttaaatctcttcctccttttttatttcctttctgaacgaagctctctctctgattggccggatctgccggagagaaaaatgacgacgagtattcacatcacagctctcgacggaatcgtcaacgtgaactcactcttcacactcgccgtattcatcggattagcttggaaccctaccgatccagacaacagcctcgtaaccgaccctaattgcgtccccacagctcgtatggctgagaatctcgtcgccttccatgtgtactctttcgcatcattcctattctcaagtctcatcgctctaggtctcaaacaagcaatgaggctcaacatagcttcttcgtttcacatctctactcgaatcgatcctgtggtttactatgtgaacaagacggctcttagatttgggatggttacatccggtttgggatcggtttgtggatgtgggtttctcatgttggctttgattaatgttgttcagatcaagcttgggactttgggctgtggtgctagtggtcatacttatgcagctgttgtgccgcttgtgattctggttccttctgcacttttcatctatgtttctcttatgttatatgcttttactcgttagagacatggtttttgattccatggttgatgcaattagggttatgtttgtatgatgatgatatgatggaaatgagaatgattctatgtttgatatggttctttgtaaatctcttggtttggcttctgatttaagtttagtgtctgagtttttggatagatgatattctagatttgattggagttaggcacttatgtgtgttttatcaggaatattaactggtggattcattcaaactgatttgatcccaggaaatgggtatgagattatgctggattctgatgcctgtttggtttgatctcttggattattgataaagcagagtctacttggaatcattcatcaaaaagagacaacttttctctgttcctcatttggatagagttttttcacttgtttatagttttgtgtcttctgactaagctgaatgattgatttcctctgtatactatcccattcccacatatctcgggaactgctttgtatgcataattgtatgaaaaaatagctttgaggactggagaaaaggaacctgatatatctagatctcatgaggtgatcagtgaattttcagcttaaaacttgaaggctcataaaaccatacttttggaagctttttctttggtttatgctattacatttgtcatgtaaaaatacctctttgctttcttcaaaggttcaaatgattagcttagagactaaagggcagcatgatcttactttagattaaaatagctatgcacttagaggctcttaatgcgactgattaggtgaagtaattactatgttcctttagtgcttcttccactacttctgtgtggaatttctctgatccttccaaatcctcctgcaatttcagttgctataaaacttaggttccataactagtagtatatgcatcaactcatcactcaagaatg

SEQ ID NO: 15811 - DNA, 3003 bp, Unknown
  misc_feature (1)..( 3003): 2750-1469P.txt file - cDNA_ID_1021348; gDNA_ID_1972172; Annot_ID_179856
cttccattatagagatctctatttttttctctatatatagaaacaaaaatatggatctctatttttttcccctatttttctttctaacaaatagagatttctatttttgaagaattattggagtaaaaatagaaatctctattttctcttctatatttacaaaaaaaaaatagagacaaccattgcagatggtcttattaacgtatcacattgggatcatgatggatttaaaaggatagatatgggcgagaccacaaagatttttcggatgtatacgtgaagcatgaaaaaaaaaaatgtgcgatgaataaagaaatatgtttagaaaatattatagataattcgtttatatatgagtgggtctggatccgcgtgttaatcacgtgacactggcccaagaagcctctcttcgtagtggagtggtgtgggaattcccttcttcccatattaaaatgtttcgatgaataaatgaatagctctctctaaccttcttctttttgtgttttaatgaaaatgttttatttttctatgtagcttgcattattcgacagctgttacaaacctgacatgcatgggatccacacaacaacacacatatctctttatatgagttattcccatttcccaaattgctgagcaaacgacatccgtaagcagagttaagactattgaaaagtgcataacaattatggttgtcaaaacgttgtttgtaagttggtttagctaataatcattataaaggtagattgtcaatggaaatatagttgtaaaagcatttaatatcaaacccccaaaaggaagaagcaatgtatcacaaacgattcaatatcttaggtgaattttgctaacttcgactaattttatgtagagtacgaatgtccacaagcaattgtctatgtaatgcaattgttccacgttatatgaagcattgctcgtttctatcgtcaactataacatttttattttcatcaaaagattgtttggattatttagtcgtataatattttgaaacatatcaaacatcatgaatgcacttcacctcccaaaataagaagtctaagtccagtgctaaatttggttagcgtcgtaatgattataaatcgtcaataacattgaactgtccaagtgtatatatatatatatacttaaatgattacgaaggagacgtctctaaattttctacgttatacgtttacacgtatagaattcgtcgtacatttaaatacacgtacatgtatatacatatttggcacaatgatcgatactgatacagtgttgtgtaatagtaaatagtaaatacgttataggtaatgagtgatgcaagtcgaaacacttctatcgatcattgttcacatgttagtttcgttggattcaaccgattttcttataattcattatatatacattcaacttaaagaatgaaattctactttcaaatgcattaattgtaagatagcattaatttgctcatttgcaaagatactttgttatatgtgtctgattaaaaaaaaaacgaattgatgtcagaaatgagtgccacaaaatctgaacacaaagaaatacaacaaatcgtcattgtttgtaccttaatggtttgtttaagatccattgtaaaacaatacctcatcgtaacaatgtgatcatataacattataagttgatgcgtagacatggattagaaataagagtctcgcatacacacacaatgaaagaaaaattaaaattgataaggtagaagaaaatatagtgatgatgataaagaccggaacatacgaagggcccaggagacaaggacgaaacaaagtgggcccataaaagaagtacccaaaaaaaaggacttgtgataaagttgggcccatcgtcgatgatcccctgtgaatacccgaaggccaaaaatgatgggggggacccactgaccaagttgcacggcgagtgatgtgttctgtttgggtctaaatgggccgcgaaaacgatgggcccaacttattcattgctttgccagagtcctttgtgttgtttgtagattgtagtactaacggcaagctgttcgagactattgccagtttccggaaaagttttctgacacagactaactttttgttgggtttcccattccaagtatcaagatattattagtttaatctggacgaacgtataaataattcatttcgaaaattatcgtatgtagtaaccaaccagttcagtattcttaagtgaaaaaagtacaaaatttcaatacgatcaaatatgtactagtttaaaaaaaaaaaacatttctcatgcaaaataactggcaaacataaaaacgggttgggtaacctgaaacaaaactccagcccaaaatgatgcccgcttatacggcccaataaagctaaagtttgctgcgaacttaaaacggcagcgtttgctaattagattgagtaaagcgatttcacggtgcaacagtcgaagcttctcgacttgttattgtttcgtagcttcgtcggtccaacaagaccttgcgctagaagaacagtttcggctttgttttgttcaattctcacctcaccccggacagagtccaaaacaacggtttatttcttgcgtttgtcgggaaatcagagttgagtataataaacacccttcacgacattctttgcttgtccaccttggtaatcctccattcactctcttcacgtgtttctctcttgataattctctgatacccgtacgcaattttatctttccttcttcgtttcttcgatttcaatacgtttggattgtgtgttggtttcatttttctgatattagaaatttagttgaaacattacctgcaaatttgcagttcttaactagatagcttgctcttttagcgatccttaaggtatattttgttatctagttatgattttgtttactataccattgcctcattggatctatcaatgtaaaagacttggaaattgcgttgttgttctttgtgtaggtatctgaaattgggggactcttattataaaagatatg

SEQ ID NO: 15812 - DNA, 3000 bp, Unknown; identical to SEQ ID NO: 14545
  misc_feature (1)..( 3000): 2750-1469P.txt file - cDNA_ID_1021383; gDNA_ID_2684130; Annot_ID_191210

SEQ ID NO: 15813 - DNA, 3003 bp, Unknown
  misc_feature (1)..( 3003): 2750-1469P.txt file - cDNA_ID_1021582; gDNA_ID_2926288; Annot_ID_143661
aagagtcctcttggtgcgaagatcctttatagaaaagccaaatgggtcaaattctattgagcatttgttatccttagtaaatcgacgaaccgaaacaagatttttgattatgtcaggtgtgacaagaacattatgaagagttaagggacgaggtttattagcaataaataaggatccagtggcagtaacaggaatgcaaccaccattcccaaaaatgacagattttccgatgctaggataaagagaaagttggagattattacctgcaccagaagtcaagtaggctgttgcaccagagtccatgtaccactgagaatcagggggatcttgaagagaaaaggtgttgaatgcttctgcaagatcagccgtgctctcaggtttaggagtcctgaagtgagcgtttgactgctgagaatggtaaggaggtaaaagaccaaaaaagccttgtccattggcattcagctgcggtgggtatccccactgatgattccacatctgatacgggtttggatagaatggtggcctgttccaggagttgaagccttgacgattgtaaccatatgaggatcgtcctccgccccgaaacctgttgttgcctccgccacgtcctctgtaagtcatctgagtaggacctgagcgttggtagttcacatgaggcgcctctgagacaacaagcacagtagaggaggatgagtggtccacatgtgttgggttcggtcttcatgatgagccgttcaggtgatcctcttcatcttgtaacatggttgtggcgtcgtcgaagcgtggaagtggctggcgatgtttgataacattgatgatgttgtcaaacttagcattcagaccattcaacacgtacatcatgagtgtccgatcttgaactggagcatcaacatttgagagagagtcaggaagctttttcatctcacgacagtaatcggcgatcttcatgtcaccaatctctttcgtacggagctcattgtccaaacgaagagcacgagcatccttgttgttgcggaattgattttcaattctcagccagatctcccttgaggttgaaccaaagacgaacgaaccttggaactgctttggtgtgagagttccgtagagccagagcttcacaattccatcacgtttctgccagttaacatcagcggcgttggcaggttgaagggttccatcgatgtgaccaagaacatcaaaggagaggcagtgggtgagaaagagttctctccacgcatcgtagttactttcttcaatgtcaagaatcacaggaatgtgagatttgatgttagagacaccatagatcttttctgggttcatgatagcggccatttttgagtaaggaaaagagaatagagaagagatataagagagaagaagcaatcaaagagagatgtgctctgataccatgtaagattgtgtaagtctccttgaggagatagctttgcattagagtgaatatatacatgattcagttacaagagttcagatctttcctagattctgggtacatgaggatattaacaaagtcgtaattaaacttataacaaacatattgagaagaatattgagaagaatatcctatctcccaataccctcccgtagtcttagcatcggtctcctaattctttacgcaattaaacatctttaaagaggcttttctaactatgaaatggcccgcactatcacccggacattgttctatgaccatcgttttaagaacataacaaccagataaaagcaagaggacaaatttatccctaaggtacttcaatgatagaagagccaaattttttagagatgtgtattagaatgtctcatatcggctgggactaagatctttgaacaatatataaaggatgtggcaatccttagctctaaagttacattttgggataaattaagccacattcccaatatggtatcagagctcatggttggctcaacaaacaaaatttccaaaaaatggtttcccacctatgtggcccatacaagtggcatgtcttgttgtatttccgagatgttaggcttaaactgatttctgttggatcgtttcacacccacatctcgaggaggcttattagaatatccatattggttgaaatcaacatctttggacaatatataaagaaggtgacaatccttaactctagaactaggttttgagatcagttaatgtgggacattctaataacagaaaagaaaccaatgaaaacagatccataagaaccacattgtacagcatcaaagtcacaagcactgaagtctgaagaacgtgtacacaagctacttggaagtaccactagagcagacccaatagaacaagtatcactctcgaaacatagctcacgcacacatcgttcaatagcggttccaacacatacttcaatatctctataagcatcactcttttgactaattagttttatactcaaactttctagaaccggagcctgtgtaatggcaatgatgtgtgaataaacagctttgattttttttttttttaattttttttttttcatcaaacagctttgattcaacatctaaataatgcagcaaaagaaccttgccggtgattagcagaataattgggccaaggcccattagcagagcaaaatcaactagacgaaatgcataccaatctggccgacgtcgaataaaaaaacgtttaacgatccaacggttatgaacaaacagaaaggaaggtgtacgataaaactccgtaagaccaaccgtagaagattcgtccccaattgtcagtcggtgaaattaaagaggcatcttaaccaaagaagtctctcttacgagttttctcttcggctttccactttttcctctgttcgtgtcattcttctcgtagatctcgagagagagccttaaggtaaagagaaacttaaaaaaaatcgatcctttaagttaaagtttgtatctttcgattgttttgttccgacccttgtaaaatttgttctcaggaaattaaaaaaggttggattttgatcgatg

SEQ ID NO: 15814 - DNA, 3003 bp, Unknown; identical to SEQ ID NO: 15813
  misc_feature (1)..( 3003): 2750-1469P.txt file - cDNA_ID_1021582; gDNA_ID_2926288; Annot_ID_205510

SEQ ID NO: 15815 - DNA, 3000 bp, Unknown; identical to SEQ ID NO: 5614
  misc_feature (1)..( 3000): 2750-1469P.txt file - cDNA_ID_1021679; gDNA_ID_1620806; Annot_ID_168852

SEQ ID NO: 15816 - DNA, 3000 bp, Unknown; identical to SEQ ID NO: 5614
  misc_feature (1)..( 3000): 2750-1469P.txt file - cDNA_ID_1021679; gDNA_ID_2926172; Annot_ID_199569

SEQ ID NO: 15817 - DNA, 3000 bp, Unknown; identical to SEQ ID NO: 3954
  misc_feature (1)..( 3000): 2750-1469P.txt file - cDNA_ID_1021721; gDNA_ID_1620675; Annot_ID_164250

SEQ ID NO: 15818 - DNA, 3000 bp, Unknown; identical to SEQ ID NO: 11092
  misc_feature (1)..( 3000): 2750-1469P.txt file - cDNA_ID_1021787; gDNA_ID_2214478; Annot_ID_133167

SEQ ID NO: 15819 - DNA, 3000 bp, Unknown; identical to SEQ ID NO: 11092
  misc_feature (1)..( 3000): 2750-1469P.txt file - cDNA_ID_1021787; gDNA_ID_2214478; Annot_ID_183200

SEQ ID NO: 15820 - DNA, 3003 bp, Unknown
  misc_feature (1)..( 3003): 2750-1469P.txt file - cDNA_ID_1021897; gDNA_ID_1620649; Annot_ID_47682
gttggcccggtatgatcaaagtacttgcatggaatttgtgaagaatgggactttcaatgcggtcacatggcatttgtttcagttcacctcatctcttgactcatgggtgaagctagggaagcagaactgcaagctttcatctaccttgatggttgaacagctccggttttggaaggtctgtatccatagtggctgttgcgtatctcgcttcccagagctattcccagctctgtgtctgtggttgagttgtccatcattcgaaaagctcagggagaaaaatctcatcagcgagtttacttctgtgtcaaacgaggcctacctggtccttgaggcttttgccgagacacttcctaatatgtactcacaaaacattccacggaatgaatctgggacatgggactggagctatgttagccctatgattgattcagcactgagttggataacattggccccgcaattactcaagtgggagaaaggaatcgaaagtgtctctgtatcaactactactctgttgtggttgtattcaggtgtcatgcgtacaatttccaaagtccttgagaaaatctctgcggagggagaggaagaacctctaccatggctaccggagtttgttccaaagattggccttgccattatcaagcacaagcttcttagtttttctgttgcagacgtaagtaggtttggaaaagactcttccaggtgttcctcttttatggagtatttgtgttttctaagagaacgatctcaagatgacgaactagcattagcttctgtgaattgtcttcatgggttaacacggactatcgtgtccatccaaaatctgatagaatctgctagatccaagatgaaagctccgcatcaggtaagtatttccactggagatgaatctgtgcttgcaaatgggatactggcagagtctctggctgagctaacatctgtgtcgtgctcttttagagattctgtttcatcagaatggcccatcgtgcaatcaattgagctacataaacgaggcggattggcccccggcgttggacttggttggggagctagcggtggtgggttttggtcaaccagagttctgttggcacaggctggtgccggtcttctgagtctctttcttaacatctctctgagcgactcgcagaatgatcagggatctgttggctttatggataaagtaaactccgctttagctatgtgtttgattgcaggtccaagggattatttactcgtggaaagagcctttgaatatgtccttagaccgcatgctttagaacacctggcctgctgtatcaagtcaaacaaaaaaaacatatcgtttgaatgggaatgcagcgaaggggactatcatcgtatgagcagtatgcttgcttctcacttcagacatagatggttacagcaaaagggaagatcgatagccgaggaaggggtcagtggggtaaggaagggcacagttggtctggagactattcatgaggacggtgaaatgtcaaatagttcaactcaggataaaaaatcagactcctcgaccatagagtgggctcaccagagaatgcccctacctccacactggtttctcagcgccatctcagcagtccacagtggtaaaacctcaacagggccaccagaatccacagagttgcttgaagttgcaaaagctggagttttctttcttgcaggacttgagtcatcgtctggttttggatcgcttccctctcctgttgtgagtgtaccgttggtttggaagtttcacgctttgtctaccgtattgcttgttggaatggacatcatcgaagacaagaacactaggaacttgtacaattatctgcaggagctttatgggcagtttcttgatgaagcgagactaaatcaccgtgacactgagcttctgaggttcaagtcagacattcatgagaactactctacttttctggagatggtggtggagcagtatgctgcggtgtcatatggtgatgtagtgtatggccggcaggtctcggtttacctgcatcaatgcgtggaacactctgttcggctttcggcatggacagtgctctccaatgcccgtgttctcgagcttctgccgagtctagacaagtgcttgggagaagcggatggttacctcgaacctgttgaggtaatttacaaaaataataaaatgttgatagtggtgaataatggcatcttgagcatccaactaagataaaatggtgaattgatattgcaggaaaatgaggccgtccttgaggcctacctgaagtcatggacttgtggggcattggacagagctgcgacgcgtggatcagtagcctatacgctggttgtgcatcacttttcatctttagtcttttgcaaccaagccaaggataaagtatccctgcggaataagattgtcaagactcttgtcagggatttatcaagaaagcggcatcgtgaggtaacttgaaatccctcatctcttgttcaatgtcattctggggactgaggatgataatgaaacgtggaaataatgtttcaggggatgatgttagatctcctgcggtataagaaagggtctgcgaacgccatggaagaagaagtgatagcagcggagacagagaaaagaatggaggtgttgaaagagggttgcgaagggaactccaccctcctcttggaactggagaagctgaaatcagccgctctctgtggaagaaggtgaacgagagaatgagaggaaagaaagtctgtgtgtttctttctctgttttgaggttctcttacagatgaaaagctgtgtaattaaaaatcgatgttcttcttctgttcttgtaagattttggatttttccaatttctgacaaagttcaattaaaaaacttgactgacattttgaaagcgacgtgtctgtcttagaaatcaatcatatattggcacttcctatcaagagagtttggctgaacccaattttactaaattatcattatctcaaacacaacaaggatagatcatcctcataggcgatg

SEQ ID NO: 15821 - DNA, 3003 bp, Unknown; identical to SEQ ID NO: 15820
  misc_feature (1)..( 3003): 2750-1469P.txt file - cDNA_ID_1021897; gDNA_ID_1620649; Annot_ID_163386

SEQ ID NO: 15822 - DNA, 3003 bp, Unknown; identical to SEQ ID NO: 15820
  misc_feature (1)..( 3003): 2750-1469P.txt file - cDNA_ID_1021897; gDNA_ID_1620652; Annot_ID_163504

SEQ ID NO: 15823 - DNA, 3003 bp, Unknown
  misc_feature (1)..( 3003): 2750-1469P.txt file - cDNA_ID_1021897; gDNA_ID_2926215; Annot_ID_142185
ttggcccggtatgatcaaagtacttgcatggaatttgtgaagaatgggactttcaatgcggtcacatggcatttgtttcagttcacctcatctcttgactcatgggtgaagctagggaagcagaactgcaagctttcatctaccttgatggttgaacagctccggttttggaaggtctgtatccatagtggctgttgcgtatctcgcttcccagagctattcccagctctgtgtctgtggttgagttgtccatcattcgaaaagctcagggagaaaaatctcatcagcgagtttacttctgtgtcaaacgaggcctacctggtccttgaggcttttgccgagacacttcctaatatgtactcacaaaacattccacggaatgaatctgggacatgggactggagctatgttagccctatgattgattcagcactgagttggataacattggccccgcaattactcaagtgggagaaaggaatcgaaagtgtctctgtatcaactactactctgttgtggttgtattcaggtgtcatgcgtacaatttccaaagtccttgagaaaatctctgcggagggagaggaagaacctctaccatggctaccggagtttgttccaaagattggccttgccattatcaagcacaagcttcttagtttttctgttgcagacgtaagtaggtttggaaaagactcttccaggtgttcctcttttatggagtatttgtgttttctaagagaacgatctcaagatgacgaactagcattagcttctgtgaattgtcttcatgggttaacacggactatcgtgtccatccaaaatctgatagaatctgctagatccaagatgaaagctccgcatcaggtaagtatttccactggagatgaatctgtgcttgcaaatgggatactggcagagtctctggctgagctaacatctgtgtcgtgctcttttagagattctgtttcatcagaatggcccatcgtgcaatcaattgagctacataaacgaggcggattggcccccggcgttggacttggttggggagctagcggtggtgggttttggtcaaccagagttctgttggcacaggctggtgccggtcttctgagtctctttcttaacatctctctgagcgactcgcagaatgatcagggatctgttggctttatggataaagtaaactccgctttagctatgtgtttgattgcaggtccaagggattatttactcgtggaaagagcctttgaatatgtccttagaccgcatgctttagaacacctggcctgctgtatcaagtcaaacaaaaaaaacatatcgtttgaatgggaatgcagcgaaggggactatcatcgtatgagcagtatgcttgcttctcacttcagacatagatggttacagcaaaagggaagatcgatagccgaggaaggggtcagtggggtaaggaagggcacagttggtctggagactattcatgaggacggtgaaatgtcaaatagttcaactcaggataaaaaatcagactcctcgaccatagagtgggctcaccagagaatgcccctacctccacactggtttctcagcgccatctcagcagtccacagtggtaaaacctcaacagggccaccagaatccacagagttgcttgaagttgcaaaagctggagttttctttcttgcaggacttgagtcatcgtctggttttggatcgcttccctctcctgttgtgagtgtaccgttggtttggaagtttcacgctttgtctaccgtattgcttgttggaatggacatcatcgaagacaagaacactaggaacttgtacaattatctgcaggagctttatgggcagtttcttgatgaagcgagactaaatcaccgtgacactgagcttctgaggttcaagtcagacattcatgagaactactctacttttctggagatggtggtggagcagtatgctgcggtgtcatatggtgatgtagtgtatggccggcaggtctcggtttacctgcatcaatgcgtggaacactctgttcggctttcggcatggacagtgctctccaatgcccgtgttctcgagcttctgccgagtctagacaagtgcttgggagaagcggatggttacctcgaacctgttgaggtaatttacaaaaataataaaatgttgatagtggtgaataatggcatcttgagcatccaactaagataaaatggtgaattgatattgcaggaaaatgaggccgtccttgaggcctacctgaagtcatggacttgtggggcattggacagagctgcgacgcgtggatcagtagcctatacgctggttgtgcatcacttttcatctttagtcttttgcaaccaagccaaggataaagtatccctgcggaataagattgtcaagactcttgtcagggatttatcaagaaagcggcatcgtgaggtaacttgaaatccctcatctcttgttcaatgtcattctggggactgaggatgataatgaaacgtggaaataatgtttcaggggatgatgttagatctcctgcggtataagaaagggtctgcgaacgccatggaagaagaagtgatagcagcggagacagagaaaagaatggaggtgttgaaagagggttgcgaagggaactccaccctcctcttggaactggagaagctgaaatcagccgctctctgtggaagaaggtgaaacgagagaatgagaggaaagaaagtctgtgtgtttctttctctgttttgaggttctcttacagatgaaaagctgtgtaattaaaaatcgatgttcttcttctgttcttgtaagattttggatttttccaatttctgacaaagttcaattaaaaaacttgactgacattttgaaagcgacgtgtctgtcttagaaatcaatcatatattggcacttcctatcaagagagtttggctgaacccaattttactaaattatcattatctcaaacacaacaaggatagatcatcctcataggcgatg

SEQ ID NO: 15824 - DNA, 3003 bp, Unknown; identical to SEQ ID NO: 15823
  misc_feature (1)..( 3003): 2750-1469P.txt file - cDNA_ID_1021897; gDNA_ID_2926215; Annot_ID_202924

SEQ ID NO: 15825 - DNA, 3003 bp, Unknown
  misc_feature (1)..( 3003): 2750-1469P.txt file - cDNA_ID_1021972; gDNA_ID_1620723; Annot_ID_165861
tctaggttcgtagattctctttcttcttcttcttcgtttggatctgcttagtgaagaagataatcttctgaaaaattgtttgttttttttctgaaaatctgaatacgtaatgatttgagctgaatctgagttagattcacatttatattctggatttgtgctatttgatgatttattagatcgatcatcttgttttcttctttcgcctttaagtatgtttgctcatagtgttgctcttccagattccagatcctgaagaaggtgaaatcttatctgtgatccagtggaagattgaatcaagtaacagattcacttagttcacttgcgtattgcatgcccctgaagataacattttgaataatgttgatattgaattatcacctataagctctggttcttgttgcttgtattggttctgggtatctactagtgaagaaaccatggcttttggttctcctaggaataattctatattagctgcggctggatttcctcggaaagtgtctacagttgcaattgctattggtggtttggcatcattctttgttttcggattgttgcttcgtctttcgtatccgaatagttcttcagttggtggcatattttatgggatagggaatcctgaacaagttcatgtccctttatctttgagcaaccatactgtcaatatccttcagaagagtagtgacatcaatgcgtttgataaaaatctgacttctgattctagctctggcttacctgttgttgttagcaaaagtataccacctccagatttcagtagtgataggaagttggagacacctttgacacaagaaaaagaggatttggtttcttcggatataactgaaaagactgatgttcaatcaggtgaacgtgaaaccaatgtttccaaggctgaagacactccaagtgcatcatctcctccagatgatgtctctgaaactgcttcagcagaaccaggtactgttgttatcttttaaacgcttatttccgtagcttttgtcgtatttggaacattttgagttatggtagcttaaatttcaataaacaaagactaagctagtgtgggaatgttatagaacatttagttttgcatttctatggaaaggcgtaagtttctgagaagttttaaagaaattcagcggctaaactcttagctatagacctactgtaattattctagccgaggactgaatatagcagattagagtaaaaacttggttagggagcagatagtgagtgctgggcttgtaaggtggtctcagcattttgttttaggggttagagtttctaggctttgtgggcatttggttgagagttctacctgttttggtgaattggaataagaagagcagtttcatagatctgttcttgtcagtttcccttgcttctcatgattctagctgttcgatgttttatatttctgttatgagtttgtcgcttactcaaatctttgattgcttgtagagtgtgatttgtatcaaggtagttggttttatgatcctgggggacctctctacacgaacaactcttgccctgtcctgacgcagatgcagaattgccagggaaatggaagacctgacaagggatatgagaactggagatggaaaccgtctcagtgtgagcttcctcggtttgatgccagaaaatttcttgaacttatgaaaggcaagacactggcctttataggagattcagtagctcgtaatcagatggagtccatgttgtgccttctttggcaggcaagtaattcaatttaatggtgaaaaccggtataagggatctattgtgttgctttattcagcttcaggagatcgtatgtattatattaaagtaggtttctgttttcaggttgaaacaccagtcaatcgtgggagccgaaagatgcagagatggtattttaagcaatcatcagtaatgattgcccgtatttggtcatcttggcttgttcatcagttcaacgaaaaattcgattatgctcctgaaggtgtcacaaaactaaagctggatcttcctgatgagcgcataatggaagctatcccgaaattcgacgtggttgtcctctcatcagggcactggtttgcaaagcagtctgtctacatattgaaagaagagatcgtgggaggccaattatggtggccagacaaatcaaaacccatgaaagtcaataacgtggatgcatttggaatatcagttgaaacaatccttaagtccatggctacacacccgaactacagcggtttgaccattgtgagaacattctcacctgatcattacgaaggtggtgcttggaacacaggtggatcatgcacggggaaagaagaacccatccttccagggaagctagtgaaaaacggattcacagagataatgcatgagaagcaagcgacaggatataaccaagccgtcgataaagtcgcggagaatttgaagctaaaactaaagctgatggatatcacagaggcatttggatatcgccatgatggtcatcctggtccattcagaagtcctgaccctaacaagatcactaaacggggaccagacggacggcctccacctcaggactgcttgcactggtgcatgccaggaccagtcgatacatggaacgaaatggtcttggagctcataaggagagacaggaaaagctcatcaacttgacttggtttgaaactcaaaggatgagagagcatattacacgacttatactattaatctgattcttggttactgataaactcaaagataaactcacttgtagatttgtgctaggcacggtgagttaggattagaatttgttccactatacttgttggttcgtttgtcctgagattgaaatttaagatttgggagttatgagttcaagtttattcatactagtcgaaatttcataaattatataaactggggggggcgcatttgcaaaatagctgagtaataatcgcctatctcactgactcacccaaagcccgaccaaaagcttttgattcctcaagagtgaaaatg

SEQ ID NO: 15826 - DNA, 3003 bp, Unknown; identical to SEQ ID NO: 15825
  misc_feature (1)..( 3003): 2750-1469P.txt file - cDNA_ID_1021972; gDNA_ID_2926187; Annot_ID_200711

SEQ ID NO: 15827 - DNA, 3000 bp, Unknown; identical to SEQ ID NO: 14365
  misc_feature (1)..( 3000): 2750-1469P.txt file - cDNA_ID_1021998; gDNA_ID_2684112; Annot_ID_190672

SEQ ID NO: 15828 - DNA, 3000 bp, Unknown; identical to SEQ ID NO: 10245
  misc_feature (1)..( 3000): 2750-1469P.txt file - cDNA_ID_1022005; gDNA_ID_2213639; Annot_ID_181151

SEQ ID NO: 15829 - DNA, 3000 bp, Unknown; identical to SEQ ID NO: 6889
  misc_feature (1)..( 3000): 2750-1469P.txt file - cDNA_ID_1022008; gDNA_ID_1621111; Annot_ID_171811

SEQ ID NO: 15830 - DNA, 3003 bp, Unknown
  misc_feature (1)..( 3003): 2750-1469P.txt file - cDNA_ID_1022127; gDNA_ID_1620444; Annot_ID_157251
ggataaaaatatccgacctgccggaatcgaaccagcgacctaaagattttctgttgcaaacaactacagtcttccgctctaccaactgagctaaggtcggatttacaatctaatcaactttttaacattataaacctttcttagtattttgcaagaattctttaatcagctcatcaacctcttcttaagaaaaaattctactattaattttttttttttttgtaattctataaaattcagcttcataataatatgcaaaagctgatattttattcacaagccatatgaagaaaacacattgatgaaagtctcaattttattcttgattttaacaacatcacaggttgtacccatccccttctctgttttcaagctatgatttataatattttggctctcttattatatcattgacaaattaatttgttctagcatacttcattaccctcccggctccaagctaggtgacttgatcatgtagcgttggtgctccacacgagcttgatatcttctctcttacttctcggttttggcctttggaggagaagcacaaaaccttctctaccatttgtctttctcttctaaattggttccactataaaacccattctttataatttatttcttttgttgattaactaatgtaacattttttttaaaaaaggaccatgaccatcaagatggatgtataattctcaagatcacaaatacaaagcttatgttgaagaaccacgaaaacctagaaagttcatagatccatatatatatatattaaagtttcatttcccatcagcaaaaccctgattgaccagtcttgttcaaaaagacatgagaaaacttgagagaagaacaaaaaaaaaacataaatgaatgaaaaggtattatcgtaaactatgtaataatagaccaaaaatctcctcattttctttcgcatcttgcaagtactggaaccttactggatttgcaccaaacttggaacataagaacacataagtagacacaacctttggattttctaagatccacttctctgtagtatccattctctccgagaatgtaagttttgtagttcttacacgtttctatgtctaattcactaaccattgctactttcttcttctcgtcgacgaggaagaaactcaaatcttcaaaccaatagctgttaggcaatgtcatatcaacttttaagaacttgctccacaacactatattgagctcaatcttagttgtaatccatattcccatctcatacgcatcagacttctgaaataacactgcaagctgctcttctctaacagtagatagaagtacagtatcctcatgacaacagtgaaatggaagaggaagactcggtccaaatctttcacatgtaaaatcaaaagaaagtaaaaatgcttcctctttcaatatgtcatgagcaataaagtaaacattacccttcaaggacacacgctgattatctattatatggtcttggtcggtattgacatcaataaccgtccacgcatcagacttaaaatcgtagatttcatactcacggtacatagacgaaaaccataagattttgtggttgttgttgctgtcgtatcccatataaaatctgccagctggtctatgattaaacctgccagctggtctatgcttatgcgagttgtttctaggttggatccacctggtttgacccaagtaagggttccaaaccatgagcttcgagttatccttagggttgcataacaacaataataataagccatcacaatgaaacacactatctatttcgacttgattaagtttacctatttgctttatagatggatctgccaagtctttgtgattatggagattgacgctcattaaacaagcctttaaatcacatatcatgatcacctgaatctccttggcttctttaccataatggttttttgtaaagctcgaatctttggataaatcattccattgtttacaagttaatttcactgctttcaaagatgttattggaaccctagagagtatctcttctaccaaatccgggaaaagatcagacatcgtcgacattttttcaaatagagattagggttttctactttcacgcttgcccacactacttttttttttgtttatatatacagtaaaaaaaaattgtgaagaaaaataaatacttacgtataggtgtatagccttttaaccaaaataaaaggacgtgatttacattttttttttttttgaaatatttcagtaaaattgttgctactaaattagtttttctgtaagacatttcaagtaggtaaagtagggcgcttaggctggctgaaaacagataaaggattgcgttagcctaacttggtctgttcatcgcgacgaggaagagcagcggcaaaattttctagaattgattcagcttgcttccaattccgtatctactagattctttcaacattgagtttctttcattaggtcagctcaaagcataaaggtgttcttcatataaaagacattaaaccagatagtaaaccataaacttaggtaacattaaatcagaatataagacttctaatactcgtatttcccattctatcatgtgcttgtgacctctataacattctcaatgagagaagcatccatgtgaacttgagaagcatgaaactgaaatcacaatgaacttctggtggtcatggtaatatgacccataacgttcattaccacttaagcaaacgatcttaaaaaatctctaaattcgtttgattatataataagactaattaatcttgtttgatatgatcataaagcgtcttaacatcatcgcatcaatgtttgtttgtctatgatttttcagacaatttagaaaataataaaaaaaaaataaaaatggaaatctgacgtggcgagtgagagggcttgtgaggagcacactcttccacatctttttcccactcttccttcttatcactttcctcttctctcttctcctctgatcccaccacacttttgaactttcactcaatg

SEQ ID NO: 15831 - DNA, 3000 bp, Unknown; identical to SEQ ID NO: 3524
  misc_feature (1)..( 3000): 2750-1469P.txt file - cDNA_ID_1022149; gDNA_ID_1620649; Annot_ID_47693

SEQ ID NO: 15832 - DNA, 3000 bp, Unknown; identical to SEQ ID NO: 3524
  misc_feature (1)..( 3000): 2750-1469P.txt file - cDNA_ID_1022149; gDNA_ID_2926215; Annot_ID_142196

SEQ ID NO: 15833 - DNA, 3003 bp, Unknown
  misc_feature (1)..( 3003): 2750-1469P.txt file - cDNA_ID_1022182; gDNA_ID_2214451; Annot_ID_182563
tccgtctttctgcagcggctgctctcttttccctctgtgctgccattgctctcctcacttcctcctattacaacaagatttacaccaaagacaaagcaaatgttgacatggcttctccttaaatatcagactgagatcagattatacaaattggggtttgtgaagctaaccactttagaaattggcttctccttctccgcctgcgcagcttcggcctgcaaacacagggagggttagataacaagtctctactaatccgagttttgtttgaaaaatagaccctgattcaaaacgttacctgagccttcttttctcgggctttgcgtagtttcttcaactcctttgttcttgctttctgcttggcgtctttttctgcctgaacaacaatcaccgtcacgaatcaagttagtctgatgatggattcagactcccatatgcaaccacatgtctccgaaaatcatataccaaatcatgccagaacaaatatatacgacaccaattaatatagtatttggcagtcatcggattctaacacatgaccacacatacatcattaactccgggatagagctcaacctaaaatcccaatgcgcaatgaaaggactaactgcactagtcctattttgcctcatgcggaatccttaaccaaacttctaaattcaacaaataacaaaccaatgcaagtacctgcttggcagcttgagattcctccatctcttttgtgagcgggctgggtactttagcatcatgccaattccatttttcaaggtttaacgccataaaccgtctgaaagtgtttctcacttccttctcatttgcaagcatgtatggcgttctgcctctttcatccttagcacaaggatccataccctcctccaagaactccataactctttcacaatcacccgatttggcagcttcatgtaaggcagttgacgtaccagtaactccatcctcgatatcctcttctatacgatttggttcctctaagattatgttgctagaagaagtttcatcgggctcttcctttcttgaggttttgccagaatcctcattgtgggtctgcaccactgtattagctttggtgacttctggtcgattaacaaaaatctcctcagttacatgtgcaatctgagtcaactgattatatatacgctgtgattccttgaaggttggccgacggatcgtaaatggaacgtttcgtacagcgcagttttggctgctaaagtacggtttgcctccattgaaaagtaattgcctactgcttgagggagcatggacaaaaacacaagcagcaccatcaaaataaggtttccagctagcaagtagctcttgaatatcctaacaatagagagaaaaatgacaaaaattacacttcaaggctatgaattatctttcctagaggtaaaaaaatatataaacattttttctttatgttttccttcctatgatcctgatcccggttgataatcatcgaggaggcggccaatgtttccacccgtttaagagacctaaatcatgtttacaaaactatacaccacacttccgagttcagaattgcctttacaaatggacagagccgcatatattattataaaaaatcaacgaccttttgtaatctcagctgaaaagagaaggaaacagtagcaaaacatgtccagagacaaaccttttttaaagcaagttcattgtaacgacgaagtgaggctccggcagagtgtatacttctcccgcttgcatcttttgtggactgctttttaccagccttggctcttacaacatatctacacatagggaaagggaattagaggacaaaaagaggcaaaggactgtgaataaagttttatgaactgagaggaaatgagaagagaagtacctgtggaatgtcttatgagccacaaccgactttccattaaagacagtaccggcaaagtggccaccacttgcaagcaacacgacacgcatttgcctatcatccttattctctcgaatcaaatttctcaacctctcagtaacttcattctcgaccaagctaccacaacagtcaacagaaactcctctgtcattctcgaacgaaacactttcagcgtcgtccatgattaagcatttccagatagaaactttgtcaccactttgaagacggaaaaatagtttctttttatcaatacccttttgagcatcaaagtggaaagagggtggtctagtctcagcttcgtcctctgaacctgatatgctagacacgtcatagtcttggaccgactcagatgtcaactcatcaacatcttcctcttttaatatagccttgccagcaacactcagcttgatctacaaatcacagcaaccacattaaggcattggaaaacgaaattgtgacactttttttttccatataattgctcgaataatttagtcggaagagagaaatttgtacgttaaggcgatgaatatcggacttgaagtggtagcgttgatcttgaagagacaggaactcaattttacaagtattacaggtccatctgtccaaaatcacgccgtccttggaactcttatcctcctccgcctcctctggatcgaaagttttgggtggtccgaatgccgattgagtctccgaaggattcgacaaccgacacgagtcaaagaaatccgccgtcaagtcaaatatcgatcgaggctgtttatattctggattaccaatctcggtggtggccgccgcgccggtggtcgccattaattatgaattggacggattgattttcctaacaccggtaccgataccgataagtgtggatttgaaagctttgtgagataaacgattccgttttgttattttcttaaatggatccataatgtcattaaagtggcccatataaggcccaataatacaaggcggcgatgcagaaagatctcgaacgaacaaaagcgccaaaagcatcctagacgcgactgagaaaataaatatagaagaaagcctctctgctcgttttgcgtttccgagcaacaatg

SEQ ID NO: 15834 - DNA, 3000 bp, Unknown; identical to SEQ ID NO: 7248
  misc_feature (1)..( 3000): 2750-1469P.txt file - cDNA_ID_1022211; gDNA_ID_1621134; Annot_ID_172605

SEQ ID NO: 15835 - DNA, 3003 bp, Unknown
  misc_feature (1)..( 3003): 2750-1469P.txt file - cDNA_ID_1022245; gDNA_ID_1620413; Annot_ID_156331
aattcgaatattttgattttgactttaaaataaaaatattacaatcctgatctggaaactctgtatcatatttgttggaagttggatgggatcaaaatttctctaacctccacgttcagcttccatttctcctaaagaaaaagagaaaagaaagaatctcattcacatacatcatacatggatacaggagcagtaaagctacccattcacgagcaccctatatttccttcggctcggatcgtttttagtacatgtaaaggctgcggtgtagaagatttcgtctacggcgggtacgtctgcaatgattctgactgtaaagctcggtttcataaggagtgcgctgaggccccatctgagatcagccactctttccaccaacaacatcctctctttctcaccaatggcctgggagatcttccatgtgatttgtgtggacaaaagcgattggaagccgctggttatagttgtcccacatgtgagttcaagctggatttgacttgtgggataaacccatcaccgcctgctattgaacatcctatctgtcatgaccatccacttgtctttttgaagaaacgagaggagaaggccccttgtgaagtttgcaaggattctattggtggaccttcctattcttgtcttggatgcgatctgtacttccacgtggattgcgtccatctctcaaaagaggtaaatcatccttgccaccctagtcatcctctcaagctcatcgcatctgaatcacttacggataatgctgagaagatttgtcttttatgtgaacaacaaccagaaaatatgctttattattgttctgtttgcaacttcacatcatgccttggttgtactaaacgcccaccacctctttttatcgagcataccaagacccacaagcatcaacttactctctttctaaacggaatttcatatcaaggttccgcgctgacatataacagcagagcttatatgtgccttccttgtggtttcgttgtcaatgggaatggtatcaacctacctcaagtcataaacatcaaccgtcacgaccatcgtatctcttacactcatcagcttggccctggatatttgaactgcggagtttgccgcgaaattgttgacagggattgtggggcatatgcttgtgtcgtttgcagtaactatgcagttcactgggaatgcgcagtacatgataatgtatgggatggtgtggaattagaagggacatctgagatcacagaagatattgcaccattcaaggtaatgggtgataacttgataagtcattttagtcatgaacaacatactctaaggctgcacaaagaaggcatcattcatgacgcgtacgcactatgtgaagcatgtacatatccgatcggatttgatccgatctacagttgtgaggaatgtcatttcattctccatgaaaagtgtgctaatcttcctatgaagaagagactcgtgtttgcaaccacaccattcaaattagtgggagcaagtagtcgtgttcgtgatgtgatagactgtgggtactgtggtgaatgttctactggttttaagtacgcatctcaaagagggtgggagatagatgtacattgtggttctctttctgagccgttcgttcataatggccatttgcatccactatattttgattctaaggaaaatcactcttgcaatgcatgccataaggtaacggttcatatgctttgttgcaatgcttgtgactttgatttgtgtttaagttgcgctagtttgccattaaagataaggcatagaaacgatgagcaccctctcactctatcttgtggtgaaacggcgaatggaaagtattggtgcgatatatgcgagacagagttagatccaagtaaatggttctatacaagctttgattgtggagtcacattgcatgtggaatgcgtactaggagatttctcacgtctcatgccaggacgcatggttgatactgttgggggaaagaaattttatgtggttcttaacaatcacaacactcgaccattatgcagcatgtgtcgctctcgatgcaaggtctccgtcatcttaaaagcttgtgatgaagacaatgtatacatatgttctcgttcatgtttttctgatatggtttcagctagatcatgttgattgagtgtttaatttgtttaattttgtgtggaaaggatgaaacttcgataccctttatattttacaagatgagtgaattattcatggttgcattcgctagctgccctacaagtccaaattcaatatctgattttaatttgaacttctttactttgctcgtcttgcaacataactgagttgtgatttaaattctaatagatactgttaagggtttccatgtctctatattttatctatataaagatatgcctaagagtttataattccatcactcataagattaatgcaagaaaatatcttagagactacaaggttcaaagatatttgtttattcttagttatgttttctaagatttctctaaattttgcccgaattcacaacacagctttaattatcattatactcttccagttttatctgtaagaaactagaatgcaatcagactcattgttatgcgatagcatgatcacttatagttatgaaaatcattgttatacggtaacatattgaaaatattgaattgctatacaccgaatggccaagtatatataaccaaggtaaaaatatgtcaaaataatggcttcgcccgggttcgaaccggagaccttcagtgtgttagactgacgtgataaccaactacaccacgaaacctacatgcttctttctaacctcaacaatatatatatacatatagataactgtttaatattgtaacttgtaaccagtgtcggctaatttcgacttttgtagatctttttctgctctttctctctctctctctctctctctctctctctctctctctcttgtattatttctatctcccccgccgtcgaaagagaaacgtcgatcggagaacctttgaaatg

SEQ ID NO: 15836 - DNA, 3003 bp, Unknown
  misc_feature (1)..( 3003): 2750-1469P.txt file - cDNA_ID_1022296; gDNA_ID_2214625; Annot_ID_135948
atctcaaccatataatcagtctatgtcggtttgaatcatatcattcatctatcttcttcaatcaattcatcagtaatgtagttcggacaagatctaaaatcatcgatacctatgtcttctaacataaatgtgttacttaaaggaatgcagaacaacgacatgccacacaatcttcaaaaatcagtgtgagtaagtaagagtgatgctgacctgtggcaaccaatcggttcgagtagttcttcttttgctgccttaagctcatagccattctatgaatcaatccaaacttgaggtgactgaaactgaaaggggatccaatcatgagacttaaaacgattactcgttgtaggacttgacgcttccaacaaatttgaattgctgatgctggaaaatggaaaggatactatgtcacatccagggactttaaaaggacaatgatccactagagagtttgaaagattacgataatatgtgtaatctctggttaaacaatctgagctgtttgtgtgatgaaatgtctggagctcttggtttgcagcaaccacgtcttcgtcatcaataatatacctctcgagttcatcatgctcaaaatggctggcttggttcgttgttggtaagaggaaactgcctgaaatggaatgagagagcagaggtaaagggtacagctcccttgtaaccaaatcatgggatgaagaatagtcagagcaccatggattgtctgtcaaagatgaggatgatgcatttggatacgtgatgagtcttgtgtgataactaagtggaaaatcatctgtctttctggtgcttgcggtttcagtattccactcgagaagtaatgcagatgaaggctctctatgttcgtgtgataagtcctctgtgctgtatccaatttctcctctgtgataatccattgaaaaaggcttgtagtttctgaaatggaggctagatatgggagaacactccaaattttcttcaacaggaaacgacaggaactccttctgtttcaacagtggaggtcgataaactgattccttaggatataagatgggaaagctaatctcttcggaatctcttgggatgaaactgctctgaacgtgaggatactgcagcctcggggtaatgttattttccagccatccctgccaagatatcaatctctccctttccatatgcagactgtggtcaacttctgcatagctttcatgggacctcttaagaaactttgagccaggagattcaacaaacgttcttcttttgactctggccgtcgtctccttggaaaacctagaaggctgagaaggaaaaaaaagtgctgaggattgatcaagataagcaattgacaaatactcagggattctatcaagcttacctgtgtctcctccgtaccaggggacagccgagttaggagaacagaaactaaatcatgcctgaaaaatgattattttctgagtgcattatagaaacaagtattaagattaggataaattaacaactattgtgtacccgtttgaggtaagctcagggatttcagtaagccatgtatctttgacccactgatgcagtttctttctcttcacagagaatatatctcctttctcttcactgattcctgataattcaaactacaaaatcatatctcttaattgttaactagtatcttttgcttctttgatatgtaagaagtagaatatccaacatctacctccactttcagatctcagattgtcaccacttggaactgtgtacctatctctactgaatgatgaagaagatctcccattacattttcctataaacaacagaaatcagaagaatgtttatggatcactacttccaaaataccagtaagagattctacagaagtatccggataagagacacgagatcttatcatgtggcacaaacatgcaccaagaaatcgaagtagcaacctctatccctttgagtcaagttggcatgtaacatagacgacccacgtctggcactatgaatgggtgtggagaagctatagctcttggatctaccattatcgtcgcagtccgttcctgcacatcctggtttatgaaacagtatagatgaaaatccaggggaaagccaagcaaacactatcatcatcatcatcacaaagaaaagctcaaaaacctttgtctggtttggctctggattcgaaggttttaggaatttgttgaactttatttgatggtttagaatcagaagattcagagcagtgaccaaaattagactttaacttcttaaagaatgcaaactcagaggtcttggcatcaatcgctgcaaataaccaataccaggcgattttcaatcaaattcaacattctaagaaactctacgcttattcacgtgaagtagacgcgaacacttacatcctccggcctgagattcgttcaagggactccgatgatcagcatcgtcgaaactcacccttctcctgcgtttcaaatctaaaccaccagaaggaaacaaaattaaaacacacacacaaactcacggaaatcgaaatatatgttgtaagatacctgaatttgctcgagcgctcgaaggatcagtaaacttgaatccgatttgtggatcggtcttatttagggtttcgccagctttcgttcgctgattccttcttctcatcaccgagtatctgaattcgttctacagaatcgtggatcaaacgctgttataatcacgaaggcgatgaagaatgagagatttcacatcacgcgtccatggcgattcataagaatttgaaatcggagaagatgagaaatgaattttggcggcaaaatcaatcaacccttattacagattctttgctctaattatatatttcattttctaaggttgccacgtcatcacattatccagacgatactgatatgtgatcacacgtgtcatatcacaagtggtttaaaacgattccttttaaccccaaacaatctaaagctttgtccaccttttcggatcactcacacaacttccaacgatcacacacaaatg

SEQ ID NO: 15837 - DNA, 3003 bp, Unknown; identical to SEQ ID NO: 15836
  misc_feature (1)..( 3003): 2750-1469P.txt file - cDNA_ID_1022296; gDNA_ID_2214625; Annot_ID_187775

SEQ ID NO: 15838 - DNA, 3003 bp, Unknown
  misc_feature (1)..( 3003): 2750-1469P.txt file - cDNA_ID_1022370; gDNA_ID_2926269; Annot_ID_143386
caagccttatccatgagaatctccggaaactttgctgctttctacaactgcaaattctacggtttccaagatacaatctgtgatgataccggaaaccatttcttcaaggattgttacgtcgaaggaacattcgatttcatcttcggaagtggaacctctatgtacttggtacgtaacatctcatacatattttctttatacataaagtgtgaaatctctaacgcatgcttgaattcaaaagggaacacaattgcacgtggttggagacggtattagagtgatcgcagcgcatgcaggaaagagcgcagaagaaaagagtggatactctttcgtgcactgcaaggtgactggaactggaggaggaatctatttgggaagagcatggatgagccaccctaaggttgtctatgcctacaccgagatgaccagcgttgtcaaccccaccggatggcaagaaaacaagactcccgcacatgacaagtaagtacacttttcacactacatagaaaatgttgtgaatatcacacaatcggtccatctcccttatgatctttctatcaaaaatgacaggaccgtgttctacggagagtacaagtgttcaggaccagggtcacacaaagccaagagagtgccattcacacaagacatcgacgacaaagaagctaactgtttcctatccctcggctacatccaaggatccaagtggcttctcccaccacccgctttgtaaattctttaatatcaacctattaaaattaaaattaaaacgtaaaactaaaattaaaacttctacttacatccttttttcaccgaaatatgtttatcggtgtatattatttttgtcgatattttctttcaatttccagaaatcctctcttctttaaatatcatggaggagttgagatttatgtaattttggtttcattataataaaatgttgtttccgttcataactcttgtatatttgtttaagtagccccttttcttatgtttgatatattttatctcgagaacttaattgtttttcttatgcttgatatatttacaagacaatgcaatgaaattatcaattttaatttgtatatcacggagatggtgattatcacattattatccttttaaggtcatcgggggtaaattgtgtagcaaacacacattctaatcataagattgaatataaaattagggaatttaatgaaaaaaaccctcaactttggccagatccatttttaaaccctaaactatgtttttagtaaaacaaaccctgaactaaaacctgttaataaacttaaccccacagtaattaaatattaatggaatattaatttccaaaaaaaaaaacaacgagacatttgtatttagcgcaaaaaccacatgatgttctttaaaactgttttgaatttattacaaaaaaacgttctaaatgattttgaattgcttaattagtttggattttagaagctggaagaaagacacaacaacttaaaataatccaaagagtcatgcttaaataaatccaaccaacataactatcgaaacagttgcaacacaacaatatttgtcacaaaaaaaaacaatcgtttcagagggacaagatattgtaaagtaaagacttgtcaagcattaactttgaagagaagattgtattggctgagtgatagggttctcttcatccattgttttctgtttttttcttggtcgtccttgaagtttcttgggtggttttggcactgctttacgcttgcatgaacgtttgttgtgtccgacttgttgacagttgctgcaagtctaaatatgcaaatattaaattaaataatttgaaaaggaagatcttgtgaaacataattcattgttctctattttatcatttgaactttttcacgtgtataaggaactttttgaggtggacgatcttcagttggatcacggattttgtcattgttctttgatcgatttttggaaattaatatcccattaatatttaattactgtggggttaagtttattaacaggttttagttcagggtttgttttactaaaaacatagttcagggtttaaaaatggatctggccaaagttgaaggtttttttcattaaattcccataaaattattgtgccttactttaattaatatgaatctttaaatagtttatgttcatagagtgtaattgttgatacatataccatcttttacgtgacgactatacaatgagatagcagtgtaagaaagagacatacagagttggcagtacaaaaacatataagctgacgctacattgctacaaaaattttatagttgtattttacaattaatatatacaaaaatacttaattacatattgccatctgtaaccaccaaaaaatattattgtctagtataatcaagaccagtacaatctaatcagacatgagaaagaagaaaaaataatggacatgcacgcatatatgattgactaattggtaatgttccactctttatgtgaatctacgaagcatctaaacgcaaaaacaaacttgtacttttccatgagcctactaaggaaagctcgaggttttctatacaatgcagtttcggcaattatgtaattccttttatatgaaaatatttggattaatatatatgattcttatttgagtctctgatctctgattaattattaatgaatgataaccgtcaattatgtggatagaatatcgaataataagctacttgatttccaaattcatcacaattcacacaccaagtccataagaaatgactgcttcgagggatataaaccacaaatgagaatgcaaaagaaaaaaataccacacacgagaatagtaaaaagagatctatccggtcatgcatcgacgatcccgaccactgcaagtatataaaatgtcccttcaaggcttcttcatctcttccatttttattcccaaattaataaatatctttttttcttttattttcttttactttaaaaaaaaacttaaaaattaataaattaataaagatg

SEQ ID NO: 15839 - DNA, 3003 bp, Unknown; identical to SEQ ID NO: 15838
  misc_feature (1)..( 3003): 2750-1469P.txt file - cDNA_ID_1022370; gDNA_ID_2926269; Annot_ID_205045

SEQ ID NO: 15840 - DNA, 3000 bp, Unknown; identical to SEQ ID NO: 6973
  misc_feature (1)..( 3000): 2750-1469P.txt file - cDNA_ID_1022478; gDNA_ID_1621119; Annot_ID_172005

SEQ ID NO: 15841 - DNA, 3000 bp, Unknown; identical to SEQ ID NO: 1355
  misc_feature (1)..( 3000): 2750-1469P.txt file - cDNA_ID_1022554; gDNA_ID_1620391; Annot_ID_155613

SEQ ID NO: 15842 - DNA, 3003 bp, Unknown
  misc_feature (1)..( 3003): 2750-1469P.txt file - cDNA_ID_1022586; gDNA_ID_1620459; Annot_ID_157720
gcgaccaatccagttatgaaactggcgagttcctctggtggcattttcgatggcagtatctatggacaaaatgtgaacggtctggtgaaagaaactgtgtatcttacccttggtataatggattctcttgggacgtattcccaaacagaagccaatcaagttgtaagcatgaacatactcagaccatctgcgaaacataaagtttctgttgagcacttgatgtccatcctgggaacatttggatcttttccacctcagcgtcttgaaatcgaggatccagttgagaactctgtctgtcaaggtgtctttctcttccaggtcctcctttagtttcctcagtctagcgatggtccagtcagatacacagaacatgagaagagcaatggaatcaagagctattccacatatgagcaatgcgtaagtaaggacgacatcgaatccatcatattgatctttcttattcatcttgaagaggcagagagatgcaacaaggcaccccaaagctataaaccggaacacagctccagtccagttatgcagaatctctgctttggtgaacagacaatcatagatgagtccgagctcgacttcgatgatacgtaaagcttcttctgcagtcagcttgtcaaagaatttcctgctctcgtcgcgctcttgattggtgaagattagatcaacaataagacctttgaagatgttaaagtatttgtaagcatactgaataacttgtagtgcggtcaattcattgtcgggcctaactggagtattgccttcccgtcctttctctggatccttcaccactattacatcagttggcatattcatcttcttcctagcttcatattcctccatgagtttcgcgtaattagcaccagggtcaggatcgtcgagcatagagtccttgaacttgtcaagactcgctgagaacaacgcagctgttctctcgacatacttgatcactcctcccacaaacatgattaatgttggagtcagaagcctatttggtatagacaacaagatcacatacacagtggctaccgcttgacagacaagactaaacaagtgtctgtcccaaagctcattatcctccaaggcaagtgctgtaatggtatctggacctccaaggtgcaagagaagaaacggtgaccaaaatgctagcagctcacggttcttggatggtttgtttgattcagcttcttcttcttgactgtctgagatttgcccaaccgcgtaatcagctgcccaatcagcaagaagataagctgaccatatgaggacaaggaagagcttctttgcggtgcgtcttcggctaggtgcaaagaaaataaggattgtttggaggaaaagactgagtattatgactccacgtatgttccatttgtcccaaagtttcctcagatgtggtggaatcatgtcagtcatcttgtcttcttcttcgttggaccgcaaaactgcacttggtttactgtggatgttcacagtagtgtcaaaggttagtgaacgtttctttcacataaagtttaagtttttgtctatgggtttctttgcttccattgttttgagacttgaaatagaaacacaaaccatcaagtgttattgttacactataagtaactttataccttgcttataaacaaataatatcttaatctcttttgctttttgtttttattcctagtctttgttcttttcttatgaccataagtaaactactaaaaaaagacaaaagcaatcgaatgtagatttatcacatggtattaaacgtatgtacatttaaatgtattacctcatagcttctctaaagttaaaagttaaaatattctacttgaagcttgtcttcactttcactgttttttgtttctaacactaatagctttctggataagtgacaaggtctctatattcgttgtctgagtattgtgtgaagttaaaacttggaaagttgataggtaaaaaacacattgggaaaaaagttgcatactcatttcctacattattacacactcttcaacataaactctctacaccacgtcaatccaagatggaaacacttgctaattgggacatatcttgctggtactttcgtatgtctttcttacctttggacttaaagggcttgattggttcttctgatattaaccgcaaacgcttgctagtatttaaacctaatcatagagacaatttcaaactgctccaaaatactctaaaccatttgtaatagctgaattttaaaaggtccttgcggtggcaagttaaaaaagaattcacataaacaacaaaaaaataaaattatcaaaccctttatatattaacgttaattctcaaaatcctaatttgatttcatgttgtcaatccaaactggagaaagtcaaatattgtaataatattatcaatttggaagatttaagaattcaaactcacttttagtagtttgtcaattatttgatgcaatttttggtgatgagctaaaatgaagtaataaacatttcactattaaatttctttgtctttgaataattatgtaacattttatttacaaattttattattagttatgttttgatgttttttctattttatcacaatagtagaaatttttgatatatctaataaccaccggctttgaaatttgtcctaagttctataaaaacatttcagacagaaagcaactgttttttttttctttgtatttttgcttgcccatgaagacaaattccagtttttcactattgtgtgtgtagtcaagtcacttgaattttccagctaataattgattatttaagaaacttaaggtaaaataccaaacattctgaaagttaaggggttttttaaaaatatgacagctaataagaagagagagttagagagaaagagaatcaacgagtctttcgtcttcatcatataaatactctctcactttttcccgtctttcagagactctctttctcatttccacctgaggaaaaaagctttttcgaatctcgcttgctttttgtcgccatg

SEQ ID NO: 15843 - DNA, 3003 bp, Unknown
  misc_feature (1)..( 3003): 2750-1469P.txt file - cDNA_ID_1022613; gDNA_ID_2926129; Annot_ID_196835
atgaaattataatttaggcttgtattgttcatttacttacatgtgttataattttaccttttatgtaataaaacttgatttttattacttagttaaactgaaaccatctcttccaaaatgaacacaatttatgatcattcttacaaaatttatgtaagaatttatgatcattcttataattgacatgtggtacactacgggtttataattgtattcaatagtttttttattttgtttttagcatgttttataaatatatgttaatatattttttaatttaaatatattatacattttggaaggatactttataactaaaaaatgaaaattttaagttgtattagttttgttaatattgtttatttttagtactttaaaattgtataactgtaatttgattgttaatataaataatcaagttatattttgaatttatcatattattttttatatctatttacttttgatattatattagtattttctgtaaatttaatttcacaatcaataaatgtaagatcaatatgattattattggttctcaacaaaatatctttaagaatccaaacatgaattttttcacatctaagacatctgtgaaaatagtcggatagatgatatcttttttactgtgtctattgcttttagtaagacagaagccatatttctgaatcttttgattagccaggtcacgatcatatatgttctcctcttctgccaaaatccaaacaacacaaactttagacgtggcagaaatcagcatttatttctaacaataattggaaaaactaaaaaaatagaaaaatatttcgagttttagctagagaatgaaacaaataatcaaaacgaaaactaaaagaaataaggtgtctgtaaacgctaaaatatttcatacctttgtgttgggtgatggtaaatggcgtggtggtgcatagtatttatagggacaactaataggttactaacccgcatctattaaatagaaaatattccctgaagcaagatatttggaagaaaatctatgaattcgatagattttgaggaatatactattgttatgcgtttttaattttttatgcggcattattatgtttctttaaatggtttttgtgtagattatgtagaggataaaatatgaaatccgaattggtgagttattacttgattttagtaaaaaacggaattgatttttatggagaagaaacattagttagtttcttaaaatctgttttgtagggatatattgcaatgtatgaatttcaaaaatggatatgatttgtttggaagaaatcgtggagttaatatggagagattttaggaaataattttgatagagacgattaagatggcaagacgttaaggaaatcataaattgtgattagcaaaagaattaattacgtttattaaagattgactaagattgcctattgttgttggaattaattaagaaaaatataggagaatatatgtgataccaaaaacatattaaaacaaatgaatgttaaatctggcagattttgaatcaaatcatattttatcctctacatagtcccaatcgtaatttctttgaaaacagaatgattctgaatggtttagaataggaatatgcttgagtatcataagtgcaaaataataatcaaaatgccgtatttagattttgatttgattctgaatcaaactgtcgagatatggtaaatgtatttacccttatttttacgcttgtacatgtaaaacagaaagatttgggtggtttataagatggaatattgcgggatttagattatatcttgactggcaagcaaatagtaaaagattttgtagttaaggtgatatacgtaaatcaggatacataattgctatgaatgaggagtggagagaatatatgattcgatcggataaattttttggaaggcaataatcaataacaatttgaataatattatagttggcgaaatttaatttgcgaggtgatatattggaattttgaattgatgatgatttgtagaatgtgtaaaaatatattgactataccatatgtaagattatatgataaatagagggttcttttaaggtttatggaattaatgcatgattaataatcgtttaacttatagaaatgtgatatcgaaatacgaatatttggtaagagtgtagtaaatatttagagattttggaatgaagtaagtaaagatatggttagttatttggttgttcggatttttaagaaatattatttcgtgtaatattgaattagtagagatttaagggattaatgtgtgcaatttatgagggtagtgcaaaataatatttttgtttaggtaattaattagtgcaaaacgtgaatagttcatcaaaaatttggtcattgtcctaacgcagacaatcttgtctgattgattttatagggactaaacatacaatatcgaaattgaaaaagaatttttcgacacaaatctttcccaaaattgtatatgtagataatttataaatttgttatcactatcttctaagaaatctgtcaaccaaaaaagtatgatataaaaaatctgtcgtatttaaaaaattctactgaataagaataaatctggtataactaaatgatagacttttgtaaaatcgctagaaatttttttaaagaatattttgtatttattttatttttaacacatgaaaaaaatattttaaacaaaaaaaacaatttaattccaatattttagaaaatattctaataattaatctcattacttaagttaacccctaaatatgttacgttttaaaactatctaagcacgttctaatacacatcatacatcatacagaaacacatatattcctccgtgctgtaacacgggtctgatcttagtaaaatagtggagagaagaatattcttctggataccttttaatattccccaaaacttctgaatcttcttctcaatttttctcgacattttctcatcgaaagctctcttcctttccctttttggcgctcaatacaatcatg

SEQ ID NO: 15844 - DNA, 2470 bp, Unknown; identical to SEQ ID NO: 15355
  misc_feature (1)..( 2470): 2750-1469P.txt file - cDNA_ID_1022613; gDNA_ID_2926130; Annot_ID_196843

SEQ ID NO: 15845 - DNA, 3000 bp, Unknown; identical to SEQ ID NO: 10205
  misc_feature (1)..( 3000): 2750-1469P.txt file - cDNA_ID_1022623; gDNA_ID_2213635; Annot_ID_181016

SEQ ID NO: 15846 - DNA, 3003 bp, Unknown
  misc_feature (1)..( 3003): 2750-1469P.txt file - cDNA_ID_1022691; gDNA_ID_2214514; Annot_ID_133918
acggaaaaatggctacgatttggtttctttcacttctctttctctgttgtattctcctcgccgcctttaaacacaagaagcgtcggacaaatcagcagcaaccaccgtcccctcctggctttccgatcatcggaaacttgcatcagcttggagaattaccacatcaatctctatggagtctttccaaaacgtatggtccggtgatgcttttgaagcttggaagtgtcccaacggtcgtagtttcttcttctgagacggcaaaacaagttctgaaaatcaatgatctacattgttgtagccgtcctagcttagcaggtactataactctaacttaacacatacaattttctttctttctatttgttcctttgttcatagaactcaacaaaaaccatgattttgatcattcgttaggggcaaaagagctctcttacaattacttggacattgctttctctccttttgatgattattggaaagaattaaggaggatttgtgtccaagaactctttagtgctaagcgagttcactctattcaacccatcaaggaagaagaagtgaggaaactgatcgtttcagccacggaatcagcctctcagaaatcaccagttaacttgagcgagaagtttcttgatttaactgtaagcgtgatatgcaaggcagcattcagtctagacttccatacttcagttctcaataatgatggatttgacaagttaatccacgatgcgtttttgtttttggggagcttctcggcctcaaacttcttcccaaatggtggctggatcatcgactggctcacgggtctacaaaggcggagagaaaaaagcgtcaaggatcttgatgtgttctatcaacaaatgtttgatctgcataaacaagaaaacaaacaaggagtcgaagatttcgtggacttgctcttgaagttagagaaagaagaaactgttcttggatatggcaagctcacaagaaaccatgtcaaagccatcttaatggttagtactatacaaatatgtgcaacacattagataccttatgattctaaactttgttttctcatcttatcacagaacgttcttcttggggccatcaatacttctgcaatgacaatgacatgggccatggcagaactaataagaaacccgcgagtgatgaagaaagtacaatccgaaatcagaaaccaaatgataaacaaatcagtgatcaccttagatgatatagatcatctaccttacttgaagatggtgatcaaagaaacatggaggctacatcctccagtacctcttctacttccaagagaagttatgtctgaatttgagatcaatggctacaagatacaacccaagacattgctttacgtgaatgtttgggctatagggcgtgatcctgattcctggaaagatgcagatatgttttatccagaaaggtttatggataataacattgatgctaaaggacagaactttgagctgttaccgtttggaagtggccggagaatctgtcctggaatgtacatggggacaacaatggtggagtttggtctagcgaatatgttgtatcagtttgattgggaagtaccagatggtatggtggtcgaagatattgacatggaagaatctcctggactcgccgtgggcaaaaaaaatgagcttctacttgttcctgtcaagtatttaggtcattgatgatcacttaaagtactaattttcttcctttgagtacaaaactaaatgtgttccctaaataaaactaaatcttgtattccattgtctctcggagtggatcaatccaacgatgttctttgttgccttcaatatttcatatagataatctatttattttgactaaaatatgaaccacctttcaagtaaggcatgttcgtttgtacatgagaatgatgcatatagatgacctatttggatgttgcacatttttgaatttggtagtacatctggatagagcatttgaatgaagttttgttcgtttggtttaggttttaacaatttgttatatttattcaaacatatataaggaatatgccggaaaaaccaagtatctgaaattccaaattccgaattaaacatttgattatttaaagttctagtatgattgaaaatccctaaaatttatcaaaattttctcataatttttagatatttctcaaattatccgaataccactatctaaattaaacttatattgaaattagcaagtgttttttaccaaaatttttcgaacatggccaattacgcgaattttccatgcggtattttatacgaaatagtagtggtagatttttttaatactcaaaactatttgcaaaggggggtgcaaccaaatcttatattgtcagtgatttgatttattttgagagtttttatatgatttgaagaatttgggtaaatttacggaagttgttaggatttattgtaaaatcctttcaaatttcacgtaaaggctaaaaccatgagatttaaaattctatatttttaactaagtaaatctactaaattcacttaaatatcttaaagtcactaaaaatccaatccttaaaatgttttttaagaagattttgaagtagattttaaagtagattttaaaatcactagtccaataacattagatttcatgagacttttaaaaatccatgattgaataacatatgatttactattttaacacaaatcacttcaaacgtttgattgaatatacccccttaagtgagcctaaggttttttcggttttatttcataacatgagatttttatcttgaattatataatctttgatttagattttaggaaaccatgaatatattcaaacatgttttatcaattaaatgttaaaccaagtattacagagagtttcatagtctttactctaaaaccacgtatgagcaaaccaaattgaacgaccaaacaatttcaggcatttttgctgcttctggaaataatatatctattgagtcaacaaagatcagatcaaagctgaactataaaaatg

SEQ ID NO: 15847 - DNA, 3003 bp, Unknown; identical to SEQ ID NO: 15846
  misc_feature (1)..( 3003): 2750-1469P.txt file - cDNA_ID_1022691; gDNA_ID_2214514; Annot_ID_184387

SEQ ID NO: 15848 - DNA, 3000 bp, Unknown; identical to SEQ ID NO: 11142
  misc_feature (1)..( 3000): 2750-1469P.txt file - cDNA_ID_1022712; gDNA_ID_2214480; Annot_ID_133229

SEQ ID NO: 15849 - DNA, 3000 bp, Unknown; identical to SEQ ID NO: 11142
  misc_feature (1)..( 3000): 2750-1469P.txt file - cDNA_ID_1022712; gDNA_ID_2214480; Annot_ID_183298

SEQ ID NO: 15850 - DNA, 3000 bp, Unknown; identical to SEQ ID NO: 11429
  misc_feature (1)..( 3000): 2750-1469P.txt file - cDNA_ID_1022807; gDNA_ID_2214495; Annot_ID_133561

SEQ ID NO: 15851 - DNA, 3000 bp, Unknown; identical to SEQ ID NO: 11429
  misc_feature (1)..( 3000): 2750-1469P.txt file - cDNA_ID_1022807; gDNA_ID_2214495; Annot_ID_183809

SEQ ID NO: 15852 - DNA, 3000 bp, Unknown; identical to SEQ ID NO: 4274
  misc_feature (1)..( 3000): 2750-1469P.txt file - cDNA_ID_1022876; gDNA_ID_1620694; Annot_ID_48645

SEQ ID NO: 15853 - DNA, 3000 bp, Unknown; identical to SEQ ID NO: 4274
  misc_feature (1)..( 3000): 2750-1469P.txt file - cDNA_ID_1022876; gDNA_ID_1620694; Annot_ID_164878

SEQ ID NO: 15854 - DNA, 3000 bp, Unknown; identical to SEQ ID NO: 4274
  misc_feature (1)..( 3000): 2750-1469P.txt file - cDNA_ID_1022876; gDNA_ID_1620699; Annot_ID_164997

SEQ ID NO: 15855 - DNA, 3000 bp, Unknown; identical to SEQ ID NO: 4274
  misc_feature (1)..( 3000): 2750-1469P.txt file - cDNA_ID_1022876; gDNA_ID_2926208; Annot_ID_141855

SEQ ID NO: 15856 - DNA, 3000 bp, Unknown; identical to SEQ ID NO: 4274
  misc_feature (1)..( 3000): 2750-1469P.txt file - cDNA_ID_1022876; gDNA_ID_2926208; Annot_ID_202409

SEQ ID NO: 15857 - DNA, 3000 bp, Unknown
  misc_feature (1)..( 3000): 2750-1469P.txt file - cDNA_ID_1022944; gDNA_ID_2926273; Annot_ID_143482
atgcgtttaatacagtgagattgggtggtttcctttacttgtgacgtcaacagatggttactattctggtggtcacagaccttataagtgagtgaattttgtttctgttcttgaacgttaaaaaatgagtcttgtgaaagaaggtactactacttcttctgagtttatatacgtcaccaatttagaatctaacgggttgcgtgcaaaatttcaagaattaatagtttttttttaattatgaaaaaaaaatcaagaaagtcaaagaaaatctactaattatctttccattttaaatttcactaattaaaaacttttccgattatatagatgagagaagggatgagataagctaacaacaagtaacaaggtaaagaggcaaccaatttacaaaataaaaaaaattgaattctgtttagacattaacactgaccctttccttctcgaatttcagcaaacaacaccaacaaaacaaaaagggactgtgttatttgattgtacaagtactaaagatctcaaaacaaaatgaaaaagaggatcttggccattctctgcatcaaaaccaagagtttcactggttacatatctgcaaaaccatttagagttccactgacaatgggtgtgtgttggcattggcaaagttaccttgtcaatgttttcagaaaagggctcattgaacacatattagtcgatatttggaagccataatttgaaatgtactacataatctggtccacatcttcaaaccaaagccaaccaaaaaaaaaatcctcagctacaacaacaacatcgttttatagtctatggtttcagaaacatttcctgtgaaccactgatggtccagtctcgtcataatctgctttagtaacgtgctgattctgcggaaacaccactttagctagtatggctcctccaacccaagccgaatacatccccaaattctccggcatatattctggcggtttcaccagtgttggcctaatggcagatgagcacaagtttgcttctttctggaatctactttcgaatcctgccatcgaccattccaacaaacccttcagttttccgacccaaaagatattcaaacacactatgatatcaagtgttgttagtacctgtcatggaggttgtaccaccacaaagtacagtgttctccaagagctgcctatggttctcagatgacactgtggagataatccggacaagctgctcaacgattccatgctcctccagtcccagtattgatggctgaaacagagcttctccaaccgagtatctctctcgcccgatgcttatcacctataaggccattggttttgttatctatatgtataaggtaacaacacaaaatgtagaatcttgatttcacacaaacctgtccatcaggaagagtatgctgctcgatttcacagttttgggtttttttgtaagcaatttcgtcctcggcacagtttgcatactgctccttgagtttttcaacatcagacatgctgagattcatcgacgggttggtttttccaagctcttgggcaaataatttagttagctcggttccacctagctcaaaccgtttcgaggcaatgtgttgtactgcaccttcaagaactggggcaatatctgaaaagagttggatcaaccacaaagttaaaacatcagacataacaacatcctgatcatatccagctataaacacaagaagaatccaaaaaaaattggtttaacaaaacgtttaagatcatggaaaaaggttagtatagggaatcagcatctcatgtaacatcataactcacataaaacatggaattatgagtttatgacaaagtgaaagacacaaagagtaacaaaggccaagcaagttataatacctatcttcccatgaccaatatcaacagtgcaaccggagatgcgtccaacagcataaagggacaacactgcttgctcagatgcataaaatccagagacattgaatgtttcaaacatcaactgcaccaattgctccctaatagcctgtccacaaacaaacatttgcagagccaaatcaggtcgaaacattaaaaataacaacgtcttactatctaaaatgaggtactaaaagaacaaaattgttccttttcataatccaacagaacaggattatgggaattgaaaagagactcaaagttgtaatcttttaaattaagaacaaaggaggaaatttggagataagaaccttaggagtacaaagtggatctgtaaaaagtatattgccttcgtttccctcttcccatccaagcccagtgtagacaacataacgcaacagatcttccatagcatcccaatctctaatcaaacccctttcaataggatcaagagtgacatcctcaaagacagtggtggggttatcagctgaagaagacccatcatcaaccattcgtttcatttgagagggaattatcattgcaggagactggtcaggaattgctgctcctgctttcaggaacttagagccagcatcaacaactagtgcttccattgttttcacacacacacccaaaaaccctaaattcccaactttccacaaatgccaagatttagtggtagcagcaagtcagtgaagctagagaagtagaaatgagagaaggaactagagtgagaggcaaaagaaagaacggttttttcgaagaacaaatcaatggtctagaagggaaaatggaagcagcttacgagtttgcgttgagagagaaaatcgaagacgaagaagaagaagaaaagaaaagaaagattatttctttggaattcaaagcccaaataaggcccattataaagcctattacagcccgtaatttccacgtccaaaacggtattgttttgagtctccgtctttttcttgttaacaaagccagagctaataagatccgattcggaagtttctttgacatcaaaacacaaacccggaaagcttcgtctgccatttttcattcttctaagccctagctcaaagctttctctctcaaatccgccatg

SEQ ID NO: 15858 - DNA, 3000 bp, Unknown; identical to SEQ ID NO: 15857
  misc_feature (1)..( 3000): 2750-1469P.txt file - cDNA_ID_1022944; gDNA_ID_2926273; Annot_ID_205209

SEQ ID NO: 15859 - DNA, 3003 bp, Unknown
  misc_feature (1)..( 3003): 2750-1469P.txt file - cDNA_ID_1023143; gDNA_ID_1620681; Annot_ID_164453
atcaatggcgtccatgtcccttcttttttttttttttttttgtgtgtttcgtttttattatttgttctgaatgaaaaacaaattgtgagtcttcggaaaaattacggcaaagaagatatatagaaaaagagagagagagggaacgtcacatggatattgaagaaccaatcacagaccgatcctccacggagttgtgccatgtcagcaaagtcaaaactatagtgggctcgcgttgctttttttgaccaaagcccattttaaacggctatggcactaggcactagctgagtaacattcccttcttgatcttggataacatcaggttttggtgagttttaaaatgattttaaaattttagtgatttcaaatgaatgaatatatagaaattgatatgatttttaaaagctttttgagattttcaatcaaaaccatagatctataacatgtacacacctttgtgttttgagtcaaaatattcctatatacacctaaccatttaaaagacaagtcaagatcaagtacaccagaataaccttgagagacgtgtacatctataaccaagaataccagatatcattggacttttaacattcatggattgtatacatagaatttgtccttttaacacaaaatcattaattctaaaagatgtggttgaatacactcctctcccttgacattggtacaatataacatttggaaattgtaacacacatcacctagctcctcaattgaaaaagttgtatagctttctttggttctcaaaggacaaacacaaactcatattaatgtctcaagtagtagtaagttggaaagtgatgaacaaaatatacattacttgcaatttattccatagattcaaaggtaggagcataccaaccaagctgatcgatgagcttcttcaacctctcttcttgtcccttggagtctccaaaagcagtggtgaaaggatacacaaaggtaaccttagtggccatacacctgtaagcaaccacatcttgcttcaccaaaaactccatcacatctctgctaaatcctcctccttctacctctgcctccacatacctccctgcaaatgcaattgtgtgtgatctttcctcaaatccttggtgggaatcatttaaaaatccaattgtggtgagaaataatttaccatagggagtatcttcaagaaccacaaacttggggttcttctgggtgctcattattgcttctttcagtttctgcgttgaacaaataatcagaaacgatgctaaattgatgaagataggaggaaatatacctcaatgggatcctgtgtatcggtttctgggatcgtcaatggaaaagagaaggaagatgaggttggattcgtcgatacacatcctgggttcgtggaagggcaaggcctaattttgctacaaaaaaaagagagtaataaagattagctttgtttagagagcagaaatcagagtgagaagaggaacaaacccattgagaagaccggtctggacgaacttggattgggtgaaaggagtggtgagtggctgagaagaggagagagaaggaatggctaaggcaggggaaaaggaagttagagagatagcaagagcaaaagagattagttttggtaaaagagagattggaggagaagtagaagagagttcttgttcttgttttgggctttgcaatgagcacaacaacttggtgcttctcggccgtggcgggaggatgagttgcaaactggcgaccaaactcatgtttgtagtttatggttactctcttctcctccaaatattattaatatataagtgtctcaaaacgctttactgaaatgaaaattaattaaaattgttttttttttttattgtatgtttgaacttttaaattttagttgactacaaattccataatgtcccgatataaaatgtgagatgtgttcttgtttgaccacaataaaaacactatgagattggtagaaaattatcaagaaatagagtttcacccaataccaatagcgtttcacctagttttcatcatcctattacaaaaattcgatggtaaattacaagcggcaaagttcaatgtaactaatgatacaccgatacacgtaacatgttcattgaatgtttcattaaaccaacaaaaaactattgactcatgccactagaaaaattaccaccgaattaaattaaagagagcgagaggcaaatgaaacgatagaaaataagacgttcaatggtcttgagagaattaaatatgtttctttatattcaccagtgtttgaacatttgcagaattgtgcagagaaaggactaaaggagaatgaacaacattttattggacaaggaaactctattttcacgatttcgcaggtatgtctttttataatattacttatttcataatattttgatatagatgattactcaaacaaaagaggtgaaaactcttgtaaattttcagtatttaacctgcaaaacagatactacttttttacttgatttatcaaaccaaagttaagacttacaaaagcaccggtgacaatccgacattgttgccatgcaaagactcaaaccaatttgaccgtcgacgcttttttagtatttcaaaaatatttttatcaattcatgaattatgattattgccaaacatcgattcagtggagactaggtttatgaattatgaccgtagaacatatgaaaactgtgtaaaactattgtataatttatgtattaaattttgtattaatcaactgatatgcggtcggaccggatccaaccggcgatcgaaacataccatttatattttttctttttctattttactagaaataaaataaatagaaacctccgttgcttttttggcaaacactgtgagagagttgaccaaaatcgacccagtgggaggactaggtttatcgaaagctccagttttcatagataaatccagtaaaattatacacgcaaattctagtttcttagagcaaagctttgttgaattgatagcttgaatttgggaatg

SEQ ID NO: 15860 - DNA, 3000 bp, Unknown
  misc_feature (1)..( 3000): 2750-1469P.txt file - cDNA_ID_1023205; gDNA_ID_2926272; Annot_ID_143438
aatgttgggatgattttgcaggcaatggaatgtatttatgttcatatatgcagaaggaggagcacataaatataaagaatcaacaagccagttttacagaggaaaccatagaagcctaggctaatctgaaacctgagtcctggttcaacatgtgctttaccaacataaataacgcccaaaacatgttatattgcctcatcaaacagctcaaatataaaagatcttctcaaatatcaacaggaaacctcagatgtcagactaatcctctcaagcaggacgatcttgctatctaaaaaaccatagtgccatagagaaataaatgatcgcttaacggacctcgttgatgcagaataagcaattaaaacgtaataatacaaatctgttttcctgcatacctgtgacaaaaatcgaggtagcatgagtttaagaatttgatcaagaacttgtgtcccagtcgcctctattgctcccactgggaagactctaaatgcaaaaggaatctcgatattgacctacaatcgccaagtaagtcagagataccacagcaatgcactgattaactaagcaaaaggaaaaaaaatgaagaacttagctacctcaatgactgcatctgaagtaatttgttgctctgatgagccctcctgagtgctatcacatgatacccggttcaccatagaagctgcatgactagaaaataataaatgttaagcccacacaaccatcactaaatttaaataatttcagtacacaaaacttgacaacatggcagtactttcaaaacgggttaacaaagtgaagcgtatacagggatatgcttaccatcaaatttgtcattttgagcaaccacaacaggagatccctcaagctatatggcacaagaaaatacaaaaatcatcacagtcttaacaaatcataactggatttgatttgacatatgtctaaacgccacaagttcctctctttgtttgcaaattcaatcatttccaaaagaacaaaagaagaattaccttgcaggacaagagcttgatgcagcagccattaggctgttcttcaaccctgacaagcaaaacagggcagacttcaaagttgaagaatttaaacgtataaacataacatctaaacgtgttatcatcaactctctcaatcctctccgcatcaagcaccgagtactgactcgcaggtaagctcatatactcaactgcaaaccataaacaaaaagcaaattcaaaatcaaacaatccgatccagatttaatcatccacaggaaacagaaatttagatcagagagaatcgcgctgaagttacttagaggtcgctgtagctgacgaacggagacggattgtttctgacgagcgatgaatcgagctttgggggtagaactagaggagacgcgtataggtgacgtagaagaggaagtggcgagagaagaaggtttgggtgattcgtcaaaggacgatgagctagtgatggtgaaggagagagctggatttctagggtttcgattcgtcttcttcgccgagaacgacagagaggtaagtctaagcgtagctgagctcaacgccatagctaaaacgacggcgttttaggatatgagatgtttaacgactaacggcttagcttaaacacacaagcgaaggagagagagtgagagaaacgtgataagattattgggacgacgaagatttgggaggtggcaccaccatcaccacctgcttcgactgcgcatgttagcctgctgacgttgtttcgttcgctacagttaaaatacgctgaatattgaaagcaagcccaacaagagcccgtgaaatgtatatattgggccaacaacgaataaccttcgcaatttgagtaagtaaatatgaaaatgtcatgtaaccagactcggttggatccataacacttgtcagtatttttgattaaaataattagtttttttcctaattaaagagtacaaaattaattaagaaaatgcgaaaaagagttatctaattattgaaaataataatgtgtgaggaatttgattactaattttaaagttcacaaaataacatgattattttattgaaggttttaaccaatgaatctgtagtcgtgaagaaaacacaggttgccacttcccattatttattttggctaaagagccacttcccattattgccgggctaaaaaaccaaaatcaccttataataatattgaacttacattattaaatcgaccgattcaaatcataaacatgcattaccattaatcgtatctatcgtcttcgtcaactctaccgtacaatttgataaacatatatttactgcaattcaagatctaacaaactatgaaaataaatcaaaccaatgcaataaaatcaaattctaaaatgagaaaatagagagaaaaagacacatattgccatttttattttattattatcatgttcattctattgctttaaaattgtagaaaaatgataattttggtgttttattttctaattatgttttatttcgtagcacattttgatgttaacacattttgtagttgagttgatttgatattttaacaaataaaaagtgagatgattgtgaaagaggaaaaaaaaattaaaaaagaaatagagaggcggtcaataaaattaaatttaggaaaaataaaaaataatagaataagggaggctagtggatagatagacgaaggacaccagagccaccttcattcacttcacaaaccgctcggcgacaaagacgaagaagccgaggaagcaccgatacgacgattgagacttagttttgctcagattcatttaaccaccggcgccaagtgacgacgacgacggagggagcagattcgaattgtgtgaagacaggtaaactttggaatttttccttctcaatctcagatttcgatgaacgagtcttatctcttcctctctctccgatttcgttcttatttctcttcattgaattgataatgtcgattggttaatgccgtttatcttctgtagcagcaatg

SEQ ID NO: 15861 - DNA, 3000 bp, Unknown; identical to SEQ ID NO: 15860
  misc_feature (1)..( 3000): 2750-1469P.txt file - cDNA_ID_1023205; gDNA_ID_2926272; Annot_ID_205157

SEQ ID NO: 15862 - DNA, 3000 bp, Unknown; identical to SEQ ID NO: 988
  misc_feature (1)..( 3000): 2750-1469P.txt file - cDNA_ID_1023208; gDNA_ID_1620344; Annot_ID_154103

SEQ ID NO: 15863 - DNA, 3003 bp, Unknown
  misc_feature (1)..( 3003): 2750-1469P.txt file - cDNA_ID_1023229; gDNA_ID_1620620; Annot_ID_162250
cctcgttcaattatagcatggagatagagaaaacagacacagaagcaggatttcccctgcaaatgccatgtccagcaacttatgggagatcttgttcatctaatgaataaccaaaccacaaaagaaaactatgactcgaagactcgagaagatgttaatggaaacatagaaccgtaacaaaatttatgaaaaccagctgacttcttcttaagcatcagactctttcttttcttcttggttctctcctccctgggtaacaccaacctcagctggtcttataactcggtcatacagcgtgtatccagactgcacatattgacacccatcattactaattggtatttaagactatacaatatgaaataaagagacaaagaattgagcaagctttatatatttaccttcaagacatgagcaactgtgccttctggcttagaagcatcagggacttggaacactgcgttatgtctgtttggatcaaatggctcgtttataggatcatacttctccataccaaatttcttaaatacctgcagcggcacacatgtttaaccggtctcatctgcattgcttacttaaggtcttataattacatttctcgatatttacctcagcaagctgtttctcagtcatctccactccttctaaaagggtctttaatagtggagctgctccagcagaatcttctgaggtgtcaagctttgagaagctttctttgacaaccgaagaagctcttccaagattatccgccacatccaataggctctttgcaaaattctgcatacatatatagtgaatatatatatttcagaaaactattatatgaaacaaaagctgcaaaccaagttcttaaagactaacctgtacggcatactttttggtgttttcagcatcacgtcttgttctgtccatgacattctccatctcagcataagtgcgaagaactttgtctttcaactgcttaatctcttcttccttctcagacagtagctcttccttctcagctacgagcttcaccaaatcatcggctgacaattcatcatcatcactctcagaatctgattcagaagatgaagatgcagctcctttagcacctttccgctttctttttgcagaatctgtcacagaatctttagattcagagtcaagacctggttggtttgcctcagctgtaggtttctcttcacttgtctttgaggcctcagtgtgggtcttcttctcatctgattcaggcgaggtagaggaagaaaaattgaacctttgcagtgcaaacgaatccatcatagacatctgagctggaacaagctgcccccaaaaaaaaaagtaaaatgggttaaactcagtgaaatgatacagagcaaaaacctatagagaatctaaaccattcttctattgtttattcatatatctgaagattcaaacataagagatcaaggaaacagtatcagaagatagcaatcatttctagaaactcaaatgagggaaagccttaaaccctaacaaaaccctgaattgcaatttcggcatgaatagtgattaatttgagtgaaaatcgaaccttatgcgagaaatcgtgagctagggagtgaaaccggctcgagaaaacaggagtctgattcctcgccggaagagtgacggcggatagagatgagcgtatgcccgcgttgcgggttactcgcgacaaaattctcaaaaccaacatctggagatccaccacagatgaacaaacagagatcaagaagataagagaatcgaatcgaatcgaaatgtaattgttctgaggaaattgttaatttgcagaggcacacagagtgcttggtggatggatagtagaattcacaattctctctttcggggtttttagtaatttacgtaaatagccttaccgctgcacgagcgggctgaggctaaaatgatcgctttgattcggcgagcctgtgagggtattattgtcattatagcaaatgggagattttgaaagctaatttgagaagcctctagaaagaaccaaaggtacttgtatatctttgggacagacgaagtccatttatctcctgggcctgattggtacagtcctaccaaacagaacaagcagcagtatgttactgttgctaagtggtttggcttttttagtttcattcttgtgtttaattaaaattgctggattaatatagaggttgtgtagatttgacgtcatttggatgggagaatttggaaattaatgttcaactacttaatctataattcaacaaacgataaatgaccacttaattgctaatagcctctagttaattcaaaacgcaaacctatgttatgaaccacttgtcaataaatttataaatctttagttgagactcaaaaaacaaagttactttatcggaaatgtcacatttgacgcatgagagacactttcttgccgttacttgttattgtcgttgcaacaaccaaaactatggttgaactaaaaagccccaaaacgtgcgacacagttcacccaaagtgcaaataatctttacattcaagactctagactcagtaagcaataaaaacagtaagtgatacaagaacagagagttgagttttgagcgtgaatccggtaaaaaggaagatgcgttacatatacatctgaagcttgcaatggtacgaatccttctattttaaaatattctgtctttctctcttttttagtagctataaatacggctctctgctgcacaactattattgaaactctcaatcattttcagctcattactcacctcaactaactctctgtggccaaaaataaacagagacatatcagactaaggagtatttaataagcatcatctaacaacaggccaaggtattaactacacgagctaaatctgttttagtcaggtttgatagaagatacctatctttctccatcttaaatgcttgctccaattgttcttcccaattaatcgtgaggttcttgttttgcagaagcaaaaaattgaaaaaacttgtgtaaaaagcatg

SEQ ID NO: 15864 - DNA, 3003 bp, Unknown; identical to SEQ ID NO: 15863
  misc_feature (1)..( 3003): 2750-1469P.txt file - cDNA_ID_1023229; gDNA_ID_2926189; Annot_ID_200912

SEQ ID NO: 15865 - DNA, 3003 bp, Unknown
  misc_feature (1)..( 3003): 2750-1469P.txt file - cDNA_ID_1023233; gDNA_ID_1971816; Annot_ID_175990
atctgcgatttgacaggtgtcatatgtttcattgaaacagtgataacgcttagtaaacagctcggaattggatgaggtcggtctctattgaaagataagcctcggggctcagttgacacttagatcgcctcgtgatgccttttagatcgccgggaatttgattccgaggtcaacagatcggatatagctcgatctgtattttatcagtcttctgcagataaacggcagtatctccgagaaaacagaccctaacgaagtgagctggggcttgttaaaaagaggagcctcagcctatgcaatgtgcttttcaagatcatcactaagacgatggtagagcgtctgaaacctttaatgacaaatctgattggtccggctcaagctagttttatccccgggagagtaagtacggataatatagtgttcgttcaagaagcagtccattccatgagaagaaaaaaaggggtaaagggctggatgcttttgaagttggatttggagaaggcttatgataggatccgatgggattatctggaggatacacttatttctgcggggttccccgaagtttgggtaagatggataatgtgctgtgtgtcgggcccggagatgagtttgttgtggaatggagagagaacagactccttcaagccgttacaaggtcgacattcgagccgtgctggtccgtcactggagcaacttgagaggtttgcctcgaaaaaccaagctgatctggagacatgttcaggtcttcatccccaagctcgatgacgttcaaagcattgacttcgtcggacgcccttttggttaactccttaaggctgctgagttcggatgccgcaatcttcgcgcctctctgcatcagaatacctactatctcctcagcacctttggcctgattctcagcatccacctttggcccgacgaggtcctcttgctccttgagataagcctttactctatcaagacgagcttgggctttctttgtagtacgggcgaccttagaagctcgatcattccgcagtctgttgcactcccgctccccgtgctccttcgcagcaaccaacgcgacttgaagatcgctgatctctttctgaagagcagcttccggagatcgcccggagcacgtttggtgcaaggagggttgctcctgaagtgggtcgtgcggatgcttctaaacgaccgcgggtaagcgaccatagatggggctttcgttacgacgatatggctgctccctttacttctaattctgttgcttgtgctgagcttcttcgtgaaattggtcgtggctcgggtattccttcgatgcccttagacttgaaggaggagaaagttttcgccggagcggccaggaagtcgatcgaggtatgctcaccttctgggtttgattccaattttttctttgaattgcattcgcttgacacgctctttgtccaggcgatcgccgaatgggatcgtttgacttatttgtacgagcgttgtgttcggagcctttccgtagaggctactaacgcgaaagatgcccatgaggctttggccgttgaaaaggaaaaagtagctcaggcgctggccgacctggcaaggtctcaagacgacgccaaggagatgaagaggaaatatgacgagttagctggtcgcgctctttcggagatgaagaggcttcgagaacgtcgacttgaatatgctgaatttgtccggagatcggcccttgataagatggcggagctcgttcagaagcgattggatcgtattaaagctcatattgacgatacgaaggcggcagaaccaaagtttcttgaattcaaccaagtatctgggaatatcaagactctcgaggcgttggtcgaaggtggcgaagtggagatgaagtcggatgacagatgttaagattggtagcggatgcagaggaattggaggccgaggtgaaagcttttggtatcaccgatcttatggacggcgacttcgatgttcgtactttatttgccgagctgagtcctgataatcgtaattccgttccaccgccgactgaaggggaagatctcgcggatggacgaggtgagtgcgaaggccaagctggtgaaagaatcgttggtcaaactgaagttcgagacgagatcgcggatgctagagactgatattccaggaggctaagccaaagggaagaagcggagctcagatgcctaaagagatcccaatatggcaaaacaaaaaatattctaaaaactgaataatcaacgaattttatattatgtgaccaaaaaatgaaaacagaaactatgtaacaatcatcaaatacagtgttttcagcatttatttttttctaaattttccagcaacatacaaacataacgttactactagacataaaaatactccctctgttccaagttatttgatggtttggatttttttatttgttccataagattgatgttttgtaaaaattaaatatgattattaatcttgtttgttgccaatagtgaaaggagagaggtaatagtaatattattaaactattaaaatagtaattaaaattaaatagaaaagttactttttcttaatttatgtgcgaaacttaaaacatcaaacttacagagagagtaatatataacatgatatgagatgaaactgtacggtgtcgttgcataattacataaactagttataaactcacacactgccttcatttcaggtcgagacagaacttattgtgtgatttaaatcagacaaaccttcgaactttgactttttcatcgcctcctgtcccttcgccgcaaaatactagtctaaacgctcaactcctctctcctgtcttataaacttttttttttagaaaatgagatgatcaatcgaattttgttgtgtgtgacctcaaactgacaacttccagtaattgtaatattaccaattttttttatcaaaaagatgaacttcactttagagcaatagcaatccctcgagtctcccctatataaagattccaactccttaacgattcatctaatg

SEQ ID NO: 15866 - DNA, 3003 bp, Unknown
  misc_feature (1)..( 3003): 2750-1469P.txt file - cDNA_ID_1023233; gDNA_ID_1971816; Annot_ID_175992
gctacaccgaagaaggtgaggatcccaataacgtctttgtcatgttccagtgtcgcggcgactcctactggtccaagtgccccccttgcattagcaccgccgtctctggggtaattgtgacttcaatattataaattagcagtcatatagttacatgtaaaaattacgatgagcacacacgtcggttaattttttctgtcaaatcttaaatatgtgggcaatgatcctgatactttatataaatgattgaattgagacaaaactgatagacattaaaggctagttaaaaaatactgattaaacaatgcaatattgttcttgatatatatatgtacgtatatgtatgtgacagcttcgtaggagatgtccaagaaataagggagcaataatatggtatgaccaatgtcttttaaagatatcttcagttgcctccttcaataagatagattatgagaacgatttctatttgtccaacccaaacaacatgagtgatcgggggttgttcaacaaggagacgtcggctctcctggagaagctggcatataaagcctccgatagaaacaacttggatggtaaacaattggtgttgtacgcagcaggggagaagagaattgggacaaagaaggtgtatgcaatggtgcagtgtacgaaagacttaatatttacaaagtgctttgagtgtttggaagggattttgaggaagtttccacagtgttgtgacggtaaacgaggagggagagttttcggtacgagctgtaactttaggtatgagttatatccttttcttagaaactaacagcaacaacagtacaatgagagctccatattaaatgaaagggttctagagataaacagtcttataatatacactgtgttgcattttagtacgtgaacttgagcgaataaatgtactttcctctttgtgatttttgttttttttttgtgaacttgagttattaagaggaaatcttcaagtaaagaatttatctaatagtatatacatcccacatagaataccaaatagctcagctcatacaaactctctcataatgagagaaaaaaatcctgaaataagggtaagaaaaactcttatgcctcaaggttttagtaaatctcataattttggccgaaccacaaaaagagacgtgcgaaacaaaatagtagaaaattgatttcccgaatcgacaaacatggactaaactatatgtatgatacataactggtcgtacttacaatgatgatacttggtttcacgaagacgagggagcctggagatgaatgatggtgataaggccatgtgtcatcaccaaaaggagggttgctcctgaagttttcgccggagcggccaggaagtcgatcgaggtatgctcaccttctgggtttgattccaattttttctttgaattgcattcgcttgacacgctctttgtccaggcgatcgccgaatgggatcgtttgacttatttgtacgagcgttgtgttcggagcctttccgtagaggctactaacgcgaaagatgcccatgaggctttggccgttgaaaaggaaaaagtagctcaggcgctggccgacctggcaaggtctcaagacgacgccaaggagatgaagaggaaatatgacgagttagctggtcgcgctctttcggagatgaagaggcttcgagaacgtcgacttgaatatgctgaatttgtccggagatcggcccttgataagatggcggagctcgttcagaagcgattggatcgtattaaagctcatattgacgatacgaaggcggcagaaccaaagtttcttgaattcaaccaagtatctgggaatatcaagactctcgaggcgttggtcgaaggtggcgaagtggagatgaagtcggatgacagatgttaagattggtagcggatgcagaggaattggaggccgaggtgaaagcttttggtatcaccgatcttatggacggcgacttcgatgttcgtactttatttgccgagctgagtcctgataatcgtaattccgttccaccgccgactgaaggggaagatctcgcggatggacgaggtgagtgcgaaggccaagctggtgaaagaatcgttggtcaaactgaagttcgagacgagatcgcggatgctagagactgatattccaggaggctaagccaaagggaagaagcggagctcagatgcctaaagagatcccaatatggcaaaacaaaaaatattctaaaaactgaataatcaacgaattttatattatgtgaccaaaaaatgaaaacagaaactatgtaacaatcatcaaatacagtgttttcagcatttatttttttctaaattttccagcaacatacaaacataacgttactactagacataaaaatactccctctgttccaagttatttgatggtttggatttttttatttgttccataagattgatgttttgtaaaaattaaatatgattattaatcttgtttgttgccaatagtgaaaggagagaggtaatagtaatattattaaactattaaaatagtaattaaaattaaatagaaaagttactttttcttaatttatgtgcgaaacttaaaacatcaaacttacagagagagtaatatataacatgatatgagatgaaactgtacggtgtcgttgcataattacataaactagttataaactcacacactgccttcatttcaggtcgagacagaacttattgtgtgatttaaatcagacaaaccttcgaactttgactttttcatcgcctcctgtcccttcgccgcaaaatactagtctaaacgctcaactcctctctcctgtcttataaacttttttttttagaaaatgagatgatcaatcgaattttgttgtgtgtgacctcaaactgacaacttccagtaattgtaatattaccaattttttttatcaaaaagatgaacttcactttagagcaatagcaatccctcgagtctcccctatataaagattccaactccttaacgattcatctaatg

SEQ ID NO: 15867 - DNA, 3003 bp, Unknown; identical to SEQ ID NO: 15866
  misc_feature (1)..( 3003): 2750-1469P.txt file - cDNA_ID_1023233; gDNA_ID_1971816; Annot_ID_175994

SEQ ID NO: 15868 - DNA, 3003 bp, Unknown; identical to SEQ ID NO: 15866
  misc_feature (1)..( 3003): 2750-1469P.txt file - cDNA_ID_1023233; gDNA_ID_1971816; Annot_ID_175996

SEQ ID NO: 15869 - DNA, 3003 bp, Unknown; identical to SEQ ID NO: 15866
  misc_feature (1)..( 3003): 2750-1469P.txt file - cDNA_ID_1023233; gDNA_ID_1971816; Annot_ID_175998

SEQ ID NO: 15870 - DNA, 3003 bp, Unknown; identical to SEQ ID NO: 15866
  misc_feature (1)..( 3003): 2750-1469P.txt file - cDNA_ID_1023233; gDNA_ID_1971816; Annot_ID_176000

SEQ ID NO: 15871 - DNA, 3003 bp, Unknown; identical to SEQ ID NO: 15866
  misc_feature (1)..( 3003): 2750-1469P.txt file - cDNA_ID_1023233; gDNA_ID_1971816; Annot_ID_176002

SEQ ID NO: 15872 - DNA, 3003 bp, Unknown; identical to SEQ ID NO: 15866
  misc_feature (1)..( 3003): 2750-1469P.txt file - cDNA_ID_1023233; gDNA_ID_1971816; Annot_ID_176004

SEQ ID NO: 15873 - DNA, 3003 bp, Unknown; identical to SEQ ID NO: 15866
  misc_feature (1)..( 3003): 2750-1469P.txt file - cDNA_ID_1023233; gDNA_ID_1971816; Annot_ID_176006

SEQ ID NO: 15874 - DNA, 3003 bp, Unknown; identical to SEQ ID NO: 15866
  misc_feature (1)..( 3003): 2750-1469P.txt file - cDNA_ID_1023233; gDNA_ID_1971816; Annot_ID_176008

SEQ ID NO: 15875 - DNA, 3003 bp, Unknown
  misc_feature (1)..( 3003): 2750-1469P.txt file - cDNA_ID_1023233; gDNA_ID_1971816; Annot_ID_176010
gacgacgccaaggagatgaagaggaaatatgacgagttagctggtcgcgctctttcggagatgaagaggcttcgagaacgtcgacttgaatatgctgaatttgtccggagatcggcccttgataagatggcggagctcgttcagaagcgattggatcgtattaaagctcatattgacgatacgaaggcggcagaaccaaagtttcttgaattcaaccaagtatctgggaatatcaagactctcgaggcgttggtcgaaggtggcgaagtggagatgaagtcggatgacagatgttaagattggtagcggatgcagaggaattggaggccgaggtgaaagcttttggtatcaccgatcttatggacggcgacttcgatgttcgtactttatttgccgagctgagtcctgataatcgtaattccgttccaccgccgactgaaggggaagatctcgcggatggacgaggtgagtgcgaaggccaagctggtgaaagaatcgttggtcaaactgaagttcgagacgagatcgcggatgctagagactgatattccaggaggctaagccaaagggaagaagcggagctcagatgcctaaagagatcccaatatggcaaaacaaaaaatattctaaaaactgaataatcaacgaattttatattatgtgaccaaaaaatgaaaacagaaactatgtaacaatcatcaaatacagtgttttcagcatttatttttgggaaatttactagagtaacccatattttatacataatgacccaaaaggaatgctaaaaatatgagttatttgagtaataattatacctaaattatccttgttttcctttgcagagaaaaacaatattacagaaatgccattactatttaattccagcaaggcaataaaaccacatttatttacgaaaatgccatcgtcgtttttggtaaatctgtggctcttgttgcgacggatttgttatcgatcacagatttgttggtcaaccacagattttttacaacagacttgttttgtaccacagactttactttgttatgttacgccagattttttttttttcgcagattttttaaccgtgactgatttgtttcatatagtctccacagattttatttaaatttcaaaagtaagaatgttgaaaccaaatctgtcactgatttgttttccggaccacagatttttctttatggtggcaacagattttctatttgcacccaaaaatctgttgtgttataacagatttgttaacctcgaaaaatgttatataggcatgacagagttgttttgtgtaatcacagatttaattaacttgttaacaaatctggtgttttacaacagatttttgttaaaaaataaaattactacacagtcacatagtgataacagatttgtttttagtgatgacagttttgtttttcagtgtcaaagcataacagatttactcatgtcaatgttatggccgatttgtttatgactagaataacctttttagtaataacagactttttatggcagatttatttttaaaatttcgaaattttttgttatatgagatttattagctagccctcaattaaattatttccggtctgattgtatgttaaatccggtttgactgaattttttttttttttgaaaaagaaataacgttacgacagacttttattaatgtcggcagatttttacataatattgtcatatttgaattttaatgaattttattagtcatgataaattctccaagggttttcataaccgttttttttcttcttctattcctaccatcaaatcaattatttgtgaattgatacatgtcaaaatattattggtaagctaaaacaagtcaatttatcaaaattaaattgtttttctttagtatttttaaaatcaaaaacgaaatatgtgaagaagattcttctttatctaaattttgttcaaaattattcttttaaaaaaagtttgttctcacgttaactggattttcgtttttgttttaattatataatataggttttggttttcttttttatccacgatttcttttttgattttataattctgttgaaaaataatttggttttgctgatttgtcaaaattttattggtggagtgacttgtgttttaaaatataaaagatttgttttattttttattttttgttttaatttgattacaattaatcattaaggttatttcgtctttttaccaaagatatgggttactacagtttttgaaaccaaacgtgtgtcatttaagttatttatgttaagagttgagtcaatctaagcaaatcttactttatttttttctaaattttccagcaacatacaaacataacgttactactagacataaaaatactccctctgttccaagttatttgatggtttggatttttttatttgttccataagattgatgttttgtaaaaattaaatatgattattaatcttgtttgttgccaatagtgaaaggagagaggtaatagtaatattattaaactattaaaatagtaattaaaattaaatagaaaagttactttttcttaatttatgtgcgaaacttaaaacatcaaacttacagagagagtaatatataacatgatatgagatgaaactgtacggtgtcgttgcataattacataaactagttataaactcacacactgccttcatttcaggtcgagacagaacttattgtgtgatttaaatcagacaaaccttcgaactttgactttttcatcgcctcctgtcccttcgccgcaaaatactagtctaaacgctcaactcctctctcctgtcttataaacttttttttttagaaaatgagatgatcaatcgaattttgttgtgtgtgacctcaaactgacaacttccagtaattgtaatattaccaattttttttatcaaaaagatgaacttcactttagagcaatagcaatccctcgagtctcccctatataaagattccaactccttaacgattcatctaatg

SEQ ID NO: 15876 - DNA, 3003 bp, Unknown; identical to SEQ ID NO: 15866
  misc_feature (1)..( 3003): 2750-1469P.txt file - cDNA_ID_1023233; gDNA_ID_1971816; Annot_ID_176012

SEQ ID NO: 15877 - DNA, 3003 bp, Unknown; identical to SEQ ID NO: 15866
  misc_feature (1)..( 3003): 2750-1469P.txt file - cDNA_ID_1023233; gDNA_ID_1971816; Annot_ID_176014

SEQ ID NO: 15878 - DNA, 3003 bp, Unknown; identical to SEQ ID NO: 15865
  misc_feature (1)..( 3003): 2750-1469P.txt file - cDNA_ID_1023233; gDNA_ID_2926176; Annot_ID_199849

SEQ ID NO: 15879 - DNA, 3003 bp, Unknown; identical to SEQ ID NO: 15866
  misc_feature (1)..( 3003): 2750-1469P.txt file - cDNA_ID_1023233; gDNA_ID_2926176; Annot_ID_199851

SEQ ID NO: 15880 - DNA, 3003 bp, Unknown; identical to SEQ ID NO: 15866
  misc_feature (1)..( 3003): 2750-1469P.txt file - cDNA_ID_1023233; gDNA_ID_2926176; Annot_ID_199853

SEQ ID NO: 15881 - DNA, 3003 bp, Unknown; identical to SEQ ID NO: 15866
  misc_feature (1)..( 3003): 2750-1469P.txt file - cDNA_ID_1023233; gDNA_ID_2926176; Annot_ID_199855

SEQ ID NO: 15882 - DNA, 3003 bp, Unknown; identical to SEQ ID NO: 15866
  misc_feature (1)..( 3003): 2750-1469P.txt file - cDNA_ID_1023233; gDNA_ID_2926176; Annot_ID_199857

SEQ ID NO: 15883 - DNA, 3003 bp, Unknown; identical to SEQ ID NO: 15866
  misc_feature (1)..( 3003): 2750-1469P.txt file - cDNA_ID_1023233; gDNA_ID_2926176; Annot_ID_199859

SEQ ID NO: 15884 - DNA, 3003 bp, Unknown; identical to SEQ ID NO: 15866
  misc_feature (1)..( 3003): 2750-1469P.txt file - cDNA_ID_1023233; gDNA_ID_2926176; Annot_ID_199861

SEQ ID NO: 15885 - DNA, 3003 bp, Unknown; identical to SEQ ID NO: 15866
  misc_feature (1)..( 3003): 2750-1469P.txt file - cDNA_ID_1023233; gDNA_ID_2926176; Annot_ID_199863

SEQ ID NO: 15886 - DNA, 3003 bp, Unknown; identical to SEQ ID NO: 15866
  misc_feature (1)..( 3003): 2750-1469P.txt file - cDNA_ID_1023233; gDNA_ID_2926176; Annot_ID_199865

SEQ ID NO: 15887 - DNA, 3003 bp, Unknown; identical to SEQ ID NO: 15866
  misc_feature (1)..( 3003): 2750-1469P.txt file - cDNA_ID_1023233; gDNA_ID_2926176; Annot_ID_199867

SEQ ID NO: 15888 - DNA, 3003 bp, Unknown; identical to SEQ ID NO: 15875
  misc_feature (1)..( 3003): 2750-1469P.txt file - cDNA_ID_1023233; gDNA_ID_2926176; Annot_ID_199869

SEQ ID NO: 15889 - DNA, 3003 bp, Unknown; identical to SEQ ID NO: 15866
  misc_feature (1)..( 3003): 2750-1469P.txt file - cDNA_ID_1023233; gDNA_ID_2926176; Annot_ID_199871

SEQ ID NO: 15890 - DNA, 3003 bp, Unknown; identical to SEQ ID NO: 15866
  misc_feature (1)..( 3003): 2750-1469P.txt file - cDNA_ID_1023233; gDNA_ID_2926176; Annot_ID_199873

SEQ ID NO: 15891 - DNA, 3000 bp, Unknown
  misc_feature (1)..( 3000): 2750-1469P.txt file - cDNA_ID_1023297; gDNA_ID_2926239; Annot_ID_142816
ttcagttagtgatttatgaacagtgaacactgaacagtgatgaatattttcttcttcagtaaaagaataacgtatgactgtagcataacacaaaaccgacaatgataaaagttacaggtagacattgacaaaaaagaattaaaaaattagaggtagactaaattaagaagattatcaaataacctctctaaacttggaaaaatcaggagttcttattcactcaaacacagttgtgtcatccaaaataaataaaaggaacaagacaacagtttaaccaacactacaaacagataatgtaaattcttcaaaatgtcttaggccagaatctgaaaatattgaagaagaaaaacaaagaagagcagagaacgaagataaaaacccagtaaggacaaactggaaaacccccagggcttctccggaagcagacttaacttcaagctcaaaagcatttccggtgaacaatcgacgggcctgactcatcatattctgcctttgcgatccacatctacaaaattcaagaacggaagaccgatcagtcagagctgcagagtggaattattatgtttagtgaaaggaaattgattggattattattcacctgctggaaggtactgagggaggccaagatggatcctccaatccagacagagtatttcctctcaggaggtgcaacgactttgatcttcatgctgctcggtgccaaagcagtgatctctttgctcattctgtcagcaattccagggaacatagttgttccaccactgagcacaatgttaccatacaagtcctttctgatgtcaacatcacatttcattatggagttgtaggtggtttcatggataccagcattctccataccgatcatagatggctggtaaagaacctcagggcaacggaaacgctcagatccaatggtgatcacttgcccatcaggtaactcatagttcttctctacagaagagctggttttagccgtctcaagctcctgctcatagtcaagagcaatgtagcaaagcttctccttgatgtctctgacaatttcacgctcagctgttgtggtgaaagagtaaccacgctcagtgaggatcttcatcagagcatctgtgaggtcacgacctgcaagatcaagacgtaggattgcatgcgggagagcgtaaccctcatagatagggaccgtgtgactcacaccatctccagagtcaagcacaatacctacaacataaatcaacaatttttacgacttggtctagaatctacagaataaacatgtaaagcctatcaatttctggagttaccagtagtacgaccactagcataaagcgacaggacagcttgaatggcgacatacatagccggagcgttaaaggtttcaaacatgatctgagtcatcttctcacggttagcctttgggttaagaggcgcttcagtgagcagaataggatgctcctcgggagcaacacggagctcattgtagaaagtatgatgccagattttttccatatcatcccaattgttgacaataccgtgctcaatagggtatttaagggtaagaataccacgcttggattgagcttcatcgccaacatatgcatccttctgtcccattccaaccatcactccagtgtggcgaggacggccaacaatacttggaaacacagccctcggtgcatcatccccagcaaaaccagcctaagtcaaacacacaacataatcaccttaactacattgttcatatgataaaaacatattgaaattttctaaggttcagattgatccccaaagattatatttgtaatccagtttgaaaacgttcgttagtagaaataccttaaccattccagttccattgtcacagacaaggggttgaatatcttcaccatcagccattttctactctctgcaaaaacatgagaccaatttggcaaaaaaacaagaataataaaaagacaaatcagtcaatgctatgtttcatatttatgctaaaacaaatgccggtaaggaatatatctaaacattataataaacagattcattttcaagggagtgaagaatattaatatccaaagagagacaaaatcaaatcctaagaagaatgtgacatatatatattccagatccagaatcacgttatcaattcaatctattataatattacagctgaagatctctgttaaaaaaaaaaaacatagcaaatgataaatgaggtacacactcatttacgcctcaaacgcatataagcacgctgatacaatgacgaaatcacagatcggaaaaaaatcaaaatttcacagaatagaagatgaaactgacaattgtcaatcagaataacgatatccggatcaggaaaaagaaaaaaacacaaattaggctataacattaccgaggaaaatagattaaaatcgttctctcggcaggagaaatctcagactgaaaacaattcggttctatggaaggagaaatcaaagaaacaagtaatcaaatgaggccaatgaacaaaaaaaaacgaatggcaagtaaaaaagtataaaaacgggtccaaaggcttcgaattcggcacacctcgttttccgattcaattccttgtggaaatgacgttcttgccctctaccttttttttgtttttttttctcgctcggcctcggttaaggcttttggtaaatggtaaataattaatcacgttagcaaagcagctatagccttgtatttactttgtcaaaactgacccaaaatttataaggcccaataaaagcccaaactggactagggttttttcttgagtctctctggtatatatacaaaaatgtaattttcagtcggcgtccttcttttgtctgaaccaccggaggagctcgatccattgattaggtatcttctatcaatcccttttgatttaactctcttcatctctttattatctctgaatccgtctcttgtaaaatttgattttgtattgaatagaaagttttgtttgtttgttgtctatgaaatttacagaagatg

SEQ ID NO: 15892 - DNA, 3000 bp, Unknown; identical to SEQ ID NO: 15891
  misc_feature (1)..( 3000): 2750-1469P.txt file - cDNA_ID_1023297; gDNA_ID_2926239; Annot_ID_203988

SEQ ID NO: 15893 - DNA, 3000 bp, Unknown; identical to SEQ ID NO: 14840
  misc_feature (1)..( 3000): 2750-1469P.txt file - cDNA_ID_1023335; gDNA_ID_2684228; Annot_ID_192138

SEQ ID NO: 15894 - DNA, 3000 bp, Unknown; identical to SEQ ID NO: 8948
  misc_feature (1)..( 3000): 2750-1469P.txt file - cDNA_ID_1023490; gDNA_ID_1971948; Annot_ID_58602

SEQ ID NO: 15895 - DNA, 3000 bp, Unknown; identical to SEQ ID NO: 8948
  misc_feature (1)..( 3000): 2750-1469P.txt file - cDNA_ID_1023490; gDNA_ID_1971948; Annot_ID_177303

SEQ ID NO: 15896 - DNA, 3003 bp, Unknown
  misc_feature (1)..( 3003): 2750-1469P.txt file - cDNA_ID_1023494; gDNA_ID_1620491; Annot_ID_158615
gtaataataacaggatactttgaaatagcaaaggcattagctttaatagattccaaacattttcccaacttcacttcctttgtcaatgtcctgtagtttcatcaaagtgagaaacataataataacagttccatggagccaatacatacaaaagcaagaccataccttccatgtttaacgcagacatcatcggtaccacgtggccaaagatccaactcaacaactctcacgcctcgtctcaatgcatctgcaataggaagttcactgcagttgctacttagctgatttccagttaaataggaattgtggcctgtgaatataaagtaatgtgacaatggagcatccatgttttgatggacctgaaataaacaaccaacaatgttttagttatatcactgaagaattgagaatcttctctctgcagaagtaagcaactactagaatagaaagtatccaaaatagaaacttctaaatttagacaggttaatcaaacagtcagattccagaatttcagcagcagctgcagagtacacaccaagaacatatcatcgagaaaagtttcacccttttattgggatttgatgaattattcataagcattaagaagaagctaccaaaagtgatgatttttattttctctttgatcaaactaaatttaggccagaaaatagcaaaaagagaaaagagtcaaatagcgatgagagagaaaacattctgagattttccggtaaaaccaacagagagaagaatctaaagtcgtaatctttcaatctcaatctttatcaagaaacaaacaccatcaaatcccagattccaaaaagtctcagacttttcttcccaggaacaaaaaaaaaaaaaagagtttgacttgaaaaatttataaacctgatcggcgataggaggattaagatcagtagaaaagaggtaataattgaaatcatcaagagtaaggtttcgtctggtgaactttgcaatgtgatgtttccggcgaagaacctcgtcaacgattctctctgcttcctctagacttgtttctccttctcctccttcctccgtcatgagcttctgtagctgctccggcgacatatgagcatcgccttcggtgtatttctcgaaaagatctctgacgtcttcgacaggaccagactccgtcatcctgaacttccttgtgaagatcagacagaatttgtaactacccatctctttttttccttccatgtttgtgtatgtatcgtcgtcttgttcagatccaagaatgtgattctgattctacataaatactcggattgttcctgagttttaatattattttaaaacttcgaaaccatttcagagaaaacctcgtcaaacctcctctcttacacgctcacacctgaacacacaaaaatacaaaaacaaaaacttttttttactgaatctcgttttttgtaataatttacaaattagtctcctcgttaattttaaaaccagggaaaaaattgactaatttaaaagggatgagtaaaaatagtagttactgagattatatcgccaggtgttcattgtttttgtccctccccataaataacatactacaaaagatattttcattttcatttttgtgtgaagtgtgaacacaaaatcgagactattgagaaaaaaaaattagatatgttgaaatggcaaagcaacaaaataaagaactggtctggctacattggtggggcagatgcagatctaaatcttttgcaatttgttgtgttttgtattgtctttgtttttcttctctcaacagaatacattcttccattgaaataactccaagattaatatcgtctattgttgtaagttttgttactatactgatagacaattatctaccgcaagattacactctcgaaagctaaaggtcataatttcttgttggtgtttgaatatcttgttgataggattgagtggcgggccaaactgtagagttttgaaagctttggatctgttttgaacataacatcatggttattcatgatgtctcttttagaccaaaagtgtaaaaatatattgttttgttattcatagtaaaattaattcatatatttccattttattttatagcatgcttgggaattatttttcccccaaattatttgatgtttgtaacaatttgtatttttgcactatttatcagtggttgaatttctttaattatctattaaatgatgttttatgtaggaaaaaacaagaaatgcgaaattcaatttaatttttgaaatacttcagatgtcggccaaaagaaaaaaaaaaacagataacattagatatgttgcaatagcaaagcgacaacaaataaagtgttcggctatattggtggtgcagctgcaggtctgttgtctttccaaatccatcttttaggccaaaagttaagtactaatctcgccctttttaccctttctttttactaatagtaaaatattatcaatgatgtagcaaaataaaatgtactggaagactggcccaggaaagttgacagtatttaaatgtcatcgaattcttaatatggatggaaacgtgcttaattaaaatgatactgacaattaatatttaactaaccacttataaagttaagtaaccatattaatattagctggaacaagagtaatgtgacatgcttatggtattgatgttgagtctttttgactaagaattaaaaatgacttttgggtatccgatccagccatgagccatttcttccattagggttaccaactctgaattactattattatcatttcttaattaacaacaataaagaatcatagaattcacaaagattaatgggctgtaaccaaaccactcattagcccattacggttctacaacgatccgggcccaattacaattgtacacgctacaagccaggtggcggaatttaattggatattgacgtggctttggtgagaaatagcggtggacaagggaaaaaaaaagggactgtggagaaacactttagcacggtgcgacaagatg

SEQ ID NO: 15897 - DNA, 3000 bp, Unknown; identical to SEQ ID NO: 9603
  misc_feature (1)..( 3000): 2750-1469P.txt file - cDNA_ID_1023528; gDNA_ID_1972159; Annot_ID_179534

SEQ ID NO: 15898 - DNA, 3000 bp, Unknown; identical to SEQ ID NO: 9655
  misc_feature (1)..( 3000): 2750-1469P.txt file - cDNA_ID_1023634; gDNA_ID_1972165; Annot_ID_179748

SEQ ID NO: 15899 - DNA, 1727 bp, Unknown; identical to SEQ ID NO: 4250
  misc_feature (1)..( 1727): 2750-1469P.txt file - cDNA_ID_1023707; gDNA_ID_1620692; Annot_ID_164840

SEQ ID NO: 15900 - DNA, 3003 bp, Unknown
  misc_feature (1)..( 3003): 2750-1469P.txt file - cDNA_ID_1023707; gDNA_ID_1620675; Annot_ID_164252
cggcttcggctgcaaagaaaaaaacgaaaagtctcttctgagttttgaaacgaattgtatcaataatcgacgagaaaatcgcgccgagagttacaccgaagaactcgagctctatctcaagaggcgtcactgcagaaatcccctgaggagatgatgcttgagaagaagaagaagaagagctgttacaggagattacgcgagctcttccacctccggaaacttttcgatgctgctgaatttgtgcattggagaaggtgaagccgaggttgaaacctaacgaagccatttcttccggctaaatcttcccgtgttagcttccgatctccggcgactttggtacgaagattccagaaactaaagctaaaccacgaatttaattatgtggacttcatcttctacatgttataaggctttttgtctctgttgttaacccattaacaagcccatttaacttattttcaatttatatcttcgacttatctttaaattataaattgaaaagacgttaagtgggccttttagtgctaattttttcaagcccatttaacttatttgagtcttggaatatttcacttggaaaacaatgcgctaattccatctcctataatttccctgtatatattttgagaagatggatggattgagcaattttaaagacaaatatttatgtaactaaaaaattattcttaactttctgatgatttatgtctgagggaagcatctagtatgcattgtttctgtttcatgtgagataagcaagaaaagtaagtgggaaacaagaaagcagaacagtgagattaccaattgtgcaaacaatcatatcatatagtatactttgttcgccatcttactgtcacttaaacaacaaaattcactatcatcgtttagcggattattttcaactatataacccagtaaaagatagtttacttgtcatgtggtatatttgacagttatcaaacttttgagagtttgtgacacgtacgatacagacacaaaatcaaatctccctctccgaccatttttttttcttagttacataaatctcttttccttctccagcaacagaagaattctgctcgataatagattggtaatcacaaaaagaaaagaaaaagtgttggagatccttccgagagagacgcgacatctccttcctcttcgaagatgagtggtactgtgaaggatatcgtttcaaaggaggagcttgataacttgcgccacagcggagcaccactcgtgcttcacttctgggcttcttggtgtgacgcttcgaagcagatggatcaagttttctctcatctcgctactgatttccctcgtgctcacttctttagggttcgtcgtctctgttcgaattttatctctttcaattggtttttgactttgattggttttatttatcttcttaggtagaagctgaggaacatcctgagatatctgaggcttattctgttgctcttgtgccgtatttcgtcttcttcaaggtaaactttaggcatattgattctttgtttggttgcaattttttggcttattgacaaagcttgaatctttgtcactgcactgaatccttttcttattgaaggatggcaaaactgtggatacacttgaaggggcagatccatcaagtttagctaataaagttggcaaagttgctggttctattactcctgcaagcttagggttggctgcagggccaacgattcttgaaactgttaagaagaatgcgaaagcttctggacaagaccgagctcagcctgtatctaccgctgatgctctcaagaatcgtttggaaaaactcaccctgttatgttattcatgaatggtactcctgaagagcctcgatttttaatatctattgagtactttctttatagttggaattcttgtggatatatatcaggtagctacttggagcaaacatgttgctaaagttgacctgctactgttgtttgaagaacacgtgctatgtcttgtcgttgaaggaattatgttcatatgggaagaacataagcctactggaaagtttacccctagctctattgttaacccagatacttgagcctccatatcacaaacatctagttaaggtttgtgtagtaagaacaagaaaaacaacacgtgttcccaattcccatataaatgaccattatacttctatcaacccaattaatcacagtccggagactagttgattaaaaaatcagctaatactaatttggtggtttcaataaacatcttaaatactccataattaaactagattaaagtgggaaaaatcgtcatgagtagttgtaaaatcgatttcatttaagagtatagaaattcgtcatgagtggttggttcatgagttctctctcttactcatattagagtaagaaatcaaacacttataatcattcaaaattcaacaactctcatctcaaaaccatatatttaggtaaagttatatgcatacattttgcattttaattttaaaacagattatttggcgcgtaatgataaaattatgtgtataaaaattatttaactaatcgatctaacaaccacatatgagtaaagtagttaacattgtactactacaccaaattatagtgtgttggttagattagatacacaaactcactttctcaaatcaataacattatgaatctatgataaccttaatttaaaaagagtctataatgccatgattttacaatcgtacttttttcttttgggctgaacttttaatcatatattatttgaaagatgtgattattataatattaaagggaattaaaatcatgtaagagaaacccaataaagtagcttgaagaagaaaaagacaagctttattatacacttacccagaaaaacaaaaaacaaaaaactgataatatctctctctctctctctcgttgagtgtgtccatgaaataatactctgccagagacagagagaaagactgtaacggaggatgtggtggcgaagtggccacactgacacactggtttcatg

SEQ ID NO: 15901 - DNA, 3000 bp, Unknown
  misc_feature (1)..( 3000): 2750-1469P.txt file - cDNA_ID_1023707; gDNA_ID_2926202; Annot_ID_201936
cttcggctgcaaagaaaaaaacgaaaagtctcttctgagttttgaaacgaattgtatcaataatcgacgagaaaatcgcgccgagagttacaccgaagaactcgagctctatctcaagaggcgtcactgcagaaatcccctgaggagatgatgcttgagaagaagaagaagaagagctgttacaggagattacgcgagctcttccacctccggaaacttttcgatgctgctgaatttgtgcattggagaaggtgaagccgaggttgaaacctaacgaagccatttcttccggctaaatcttcccgtgttagcttccgatctccggcgactttggtacgaagattccagaaactaaagctaaaccacgaatttaattatgtggacttcatcttctacatgttataaggctttttgtctctgttgttaacccattaacaagcccatttaacttattttcaatttatatcttcgacttatctttaaattataaattgaaaagacgttaagtgggccttttagtgctaattttttcaagcccatttaacttatttgagtcttggaatatttcacttggaaaacaatgcgctaattccatctcctataatttccctgtatatattttgagaagatggatggattgagcaattttaaagacaaatatttatgtaactaaaaaattattcttaactttctgatgatttatgtctgagggaagcatctagtatgcattgtttctgtttcatgtgagataagcaagaaaagtaagtgggaaacaagaaagcagaacagtgagattaccaattgtgcaaacaatcatatcatatagtatactttgttcgccatcttactgtcacttaaacaacaaaattcactatcatcgtttagcggattattttcaactatataacccagtaaaagatagtttacttgtcatgtggtatatttgacagttatcaaacttttgagagtttgtgacacgtacgatacagacacaaaatcaaatctccctctccgaccatttttttttcttagttacataaatctcttttccttctccagcaacagaagaattctgctcgataatagattggtaatcacaaaaagaaaagaaaaagtgttggagatccttccgagagagacgcgacatctccttcctcttcgaagatgagtggtactgtgaaggatatcgtttcaaaggaggagcttgataacttgcgccacagcggagcaccactcgtgcttcacttctgggcttcttggtgtgacgcttcgaagcagatggatcaagttttctctcatctcgctactgatttccctcgtgctcacttctttagggttcgtcgtctctgttcgaattttatctctttcaattggtttttgactttgattggttttatttatcttcttaggtagaagctgaggaacatcctgagatatctgaggcttattctgttgctcttgtgccgtatttcgtcttcttcaaggtaaactttaggcatattgattctttgtttggttgcaattttttggcttattgacaaagcttgaatctttgtcactgcactgaatccttttcttattgaaggatggcaaaactgtggatacacttgaaggggcagatccatcaagtttagctaataaagttggcaaagttgctggttctattactcctgcaagcttagggttggctgcagggccaacgattcttgaaactgttaagaagaatgcgaaagcttctggacaagaccgagctcagcctgtatctaccgctgatgctctcaagaatcgtttggaaaaactcaccctgttatgttattcatgaatggtactcctgaagagcctcgatttttaatatctattgagtactttctttatagttggaattcttgtggatatatatcaggtagctacttggagcaaacatgttgctaaagttgacctgctactgttgtttgaagaacacgtgctatgtcttgtcgttgaaggaattatgttcatatgggaagaacataagcctactggaaagtttacccctagctctattgttaacccagatacttgagcctccatatcacaaacatctagttaaggtttgtgtagtaagaacaagaaaaacaacacgtgttcccaattcccatataaatgaccattatacttctatcaacccaattaatcacagtccggagactagttgattaaaaaatcagctaatactaatttggtggtttcaataaacatcttaaatactccataattaaactagattaaagtgggaaaaatcgtcatgagtagttgtaaaatcgatttcatttaagagtatagaaattcgtcatgagtggttggttcatgagttctctctcttactcatattagagtaagaaatcaaacacttataatcattcaaaattcaacaactctcatctcaaaaccatatatttaggtaaagttatatgcatacattttgcattttaattttaaaacagattatttggcgcgtaatgataaaattatgtgtataaaaattatttaactaatcgatctaacaaccacatatgagtaaagtagttaacattgtactactacaccaaattatagtgtgttggttagattagatacacaaactcactttctcaaatcaataacattatgaatctatgataaccttaatttaaaaagagtctataatgccatgattttacaatcgtacttttttcttttgggctgaacttttaatcatatattatttgaaagatgtgattattataatattaaagggaattaaaatcatgtaagagaaacccaataaagtagcttgaagaagaaaaagacaagctttattatacacttacccagaaaaacaaaaaacaaaaaactgataatatctctctctctctctctcgttgagtgtgtccatgaaataatactctgccagagacagagagaaagactgtaacggaggatgtggtggcgaagtggccacactgacacactggtttcatg

SEQ ID NO: 15902 - DNA, 3000 bp, Unknown; identical to SEQ ID NO: 3288
  misc_feature (1)..( 3000): 2750-1469P.txt file - cDNA_ID_1023835; gDNA_ID_1620636; Annot_ID_162918

SEQ ID NO: 15903 - DNA, 3000 bp, Unknown; identical to SEQ ID NO: 3288
  misc_feature (1)..( 3000): 2750-1469P.txt file - cDNA_ID_1023835; gDNA_ID_2926204; Annot_ID_202068

SEQ ID NO: 15904 - DNA, 1006 bp, Unknown; identical to SEQ ID NO: 510
  misc_feature (1)..( 1006): 2750-1469P.txt file - cDNA_ID_1023870; gDNA_ID_1591537; Annot_ID_151132

SEQ ID NO: 15905 - DNA, 3003 bp, Unknown
  misc_feature (1)..( 3003): 2750-1469P.txt file - cDNA_ID_1023889; gDNA_ID_2926166; Annot_ID_199151
aaagttgccgtagttaatctgaaacgaggacagagtccaatctctgtagccattaatgagatgtccaagaggaaatccccagctttagtagcatttcaatctggagaccggttactaggcgaggaggctgcgggaataacggctcgttatccgaataaagtttattcacaactgagggatatggtgggaaaacctttcaaacatgttaaggatttcattgattctgtctacttgccttttgatattgtagaagattctagaggtgcagttggtattaagatcgatgacggttcgactgtttactcagtggaggagttgttagctatgatcttgggttatgcctcaaatctagctgagttccatgctaaaatcccagtgaaggatatggttgtttcagttccaccttactttggacaggctgagagacggggtttgatccaggcttctcagttggctggggttaatgtcctctccctggttaatgagcattccggtgctgctttgcaatatgggattgataaggattttgctaatgggtcgagacatgtcatattttatgacatgggttcaagtagtacttacgcagcccttgtctattactcagcttacagtgagaaggaatatggcaagactgtttctgtcaaccaatttcaggttaataatgctcttctattatatgactcggatttttttgagatatattgtattttgtggtttcttcattttttccttcttggaacatgtgtgacacaagctcagcgtactaatttgtattcgtttggtctgctttcagttggaatagattttcaatatgggtcatgatatatttatgttaatgtaggtcaaggatgttagatgggacttgggacttggaggacagagtatggagatgcgcttggtagagcactttgcagatgagtttaataaacagctcggtaatggagttgatgtgaggaagttccccaaagcaatggctaaattgaaaaaacaagtcaagcgtacaaaggaaattttgagtgcaaacactgcggctccaatatctgtggaatctcttcatgatgatcgtgacttcaggtataactacaatatttgggtttctctatttccccagcacatcgaaaattggctgcaaaagtgttataatgatgtctcatgctctaaattgcatcatgattggtctaatttttgtgatgtgcgtgatattctaacctacttatcttttttcaggagcacaattacccgtgagaagtttgaggaactgtgtaaagatctgtgggagagatctcttacacctttaaaagatgtgctcaagcattcaggtttgaagattgatgatatatctgcagtggaactaataggaggagctactagagttcccaaactacaggtaggttttcatgctctcaaagccaatcaatttggcattctcatccaaaactgggggactttcactttttttttcttttcaaatgaagctaagatataatttttgttttaattacagagcacaatccaggaatttattgggaaacaacagttagacaaacatctagacgctgatgaggctattgtcctcggctcagcactacatgctgctaacttgagcgatggaattaaattgaaacgtaggctaggtatagttgatggttccccctatggttttctggttgagttggaaggccctaatgttaagaaagatgagagcacaaagcagcaactcgtaccacggatgaaaaagctacccagcaaggtaccgcattacattcaaaatctgtttaagcttagaaacatttctgtcttgtaataattctgtgtacctgattctcttacagatgttcagatcctttgtccttgacaaagattttgacgtgtcacttgcttatgagtctgagggtattctaccaccaggaaccacctcccctgtgtttgcacagtattctgtctctggtttggcggatgcatctgagaagtaagagcttaaagtttgttctctgaatgttctgtttatctttctgtttggagagatatatgttttcttaatatggaaaatcttcgaataagttgataaatgtaagttcattgatatggacagatattcttctcggaatctatcagcacctatcaaggcaaatctgcatttctctctaagtagaagtgggattctcagtctagatcgaggagatgctgtaattgaaatcacagaatgggtagacgttcctaagaagaacgtgactattgatagtaacacaactacatcaacaggcaatgccactgacgagaattcacaagaaaataaagaagacctgcaaaccgatgctgaaaacagcactgcttcaaatacaacagcagaagagccagctgttgcttctctgggcacagaaaaaaagctgaagaagcggacattcagaatacctctgaaggtggtatcctgaatttattgtttccaagattttcttgattcatttcattaccaccaaccaattctgtgtgaatatataacttgtaggtagttgagaaaactgttggacctggagcaccattttcgaaagagtctcttgctgaagctaagataaaattagaagccttggacaagaaagatagggaaagaagaagaacggctgagttaaaaaacaaccttgaatcttatatatatgctaccaaagagaaggtgtgtgcttatatatagatcactatctctgctgcttcatggattttttgttgctatagtcttcgtttcccctgtagctattttttgtctttggttggcattcctctcaaaattcttaagtgttggttttattttgttcatggtgcagctggaaacacccgagtttgaaaagatatccacccaagaagagcgcaaggcgtttgttgaaaagcttgatgaggcatgaataaattttcttttgaactatataatattatttgattccaatgatgagtgtaatcgtttgacactgaggacggtcttgtgtgtttcaggtgcaagattggctttacatg

SEQ ID NO: 15906 - DNA, 3000 bp, Unknown; identical to SEQ ID NO: 12031
  misc_feature (1)..( 3000): 2750-1469P.txt file - cDNA_ID_1023980; gDNA_ID_2214528; Annot_ID_134222

SEQ ID NO: 15907 - DNA, 3000 bp, Unknown; identical to SEQ ID NO: 12031
  misc_feature (1)..( 3000): 2750-1469P.txt file - cDNA_ID_1023980; gDNA_ID_2214528; Annot_ID_184838

SEQ ID NO: 15908 - DNA, 3003 bp, Unknown
  misc_feature (1)..( 3003): 2750-1469P.txt file - cDNA_ID_1024003; gDNA_ID_1621094; Annot_ID_55594
tcctgccaaagttaatgagccatgatttcagatccattcataaggaccgaaggcgagaataacgaaggaagaaaatatatcttaccaatatctggtacaacccgtgtgtagggtgtgcttgggaatacccagataggaggtcaaatgttggaaatagtccagcacgctgcatgataggagttttgtgtaaacttagacaagcttaagaaggaacagatgtagagaactaatcttaatgccataaatttgcctcaagaataggtgatggagacttgagagaagagtgaagcaacggaagatcctctttgtgcaaacaagttacttcgccaatagggaactttgattgaaacctgccagctctccctacaacaggatcatcagaacattagagaggacataccaatactcttgatgtattatttggtgctttttgttgaaaatttacctgcaatttgtttaatctcagatactgttaggtctctggtctcggaaccatcatatttttgaagggtcgagaagataatccttgaaatattcaaattaagacccatgccaatcgcatcgctggcaacaagcacatcaaagtcattggtctcatcgttaaaccttgttgcctgcagattttaaagcatttggaaacaaaaaaagataattcttagagcatccagttaagcctatagccaagacagtaaggaactcaaacctgtgccgtgcgagtctctggaggcaacgaaccataaaccacagagcaaagatgcttccccgcacgttcaattgttttctacgaaaaggtaccaaaaaaaagagtaaagaatatgtatggaagcattcaatactcatgacgcgtagagaatagagctatgtatgcatataatatgatgccaaaatgttctatttctttcgcagcaaactcaagcagaaaaaagcaaaatacaggaagagagaacaagataagtaactgctaaccttatacgcatatatatcttttcgggaaaaagtgacaagacaatccccagttttaatactggaaactgatgaaacaggaaccttcaaagggactaatggtgaaagcctctcataggtatgaacctgaattcaaaataaaagggatcaagaggtcgtgattacatcaagagtattggtatttaattataaacaagaaataattagagaagaaaaagggactctagctcgaataaacatgatacctcgacatcatctccagttactttcagtatatcttcaacaagaggtacgacagctggatcgccacataaatgtagctcatcagccgcgattccaagtaaagcacgagtaaatgcaaatcccctttgtttacatcccaccatctgaaattagggaaagaaaggatgagaataacaaacaaaaagttcttgtcgatttcttaagccaaagtcgagcaagactagcctgaatttcgtcaatgatggcacaatcgtagacagatgtaacatcagccatttcaactgtcacagctttgtgtgttgccccttccactaagtctttctcttgtcccgtgatcaaatcacatggaacatttgctttgtttaaccgtttagctacctcccatgccaacaatcttaacggaccacaatatacaccttcaagtgaaagaagcaaattttaaacagttcaagaactggcttccaaaaggtttattagtcaccttcaaggcatacctgaagaactctgttcaaggtgcttaagggcactatatgtcttcccgctgtttgtcgggccaacatgtagaatgaccttacgcttcttcttccgagctataggataccatgtatgaggacagctagaattcaaagtaatgacagaaatataaatcagttcctctttactaatctctccacaacaacaatggaactgcaaagagaatcgcaattagttgctactggggagctaacaaaaaaattctacaagaagttttactcttacgtgagatcagtgaaatcgaactttgaggtggttccagtgccagtgaaatcaaactttggagatccagagttctttctataattcctagtcaagacacctaatctcaaaaggtcaccaaactcaggttcaaagtgaaaccgccacaaacttcctttatcagctgaaacattaggcaacacgaagccatcataagatacaacgttaaaccaatccaatcttcttctagacactacacagaaacagatgtagaagctgcaaagctcataaaggttcaaactttctgtatccagatgatcaaaatttctgatagttcctttctaagatcacttacaaactacaatccgcaatttctaaccaaaagagaaccagaaaacagagaaaaaaagggtttaaaagctccaaccttgaagaacacgagaaatccccaaagctgaaacctttcgaagccgaacaacagaatacgccatgtttagattgttttatctattgaaatgaagacacaacacttccttatcctttattcaccatgggaaatacaattcgagtatactcacgacgacacctttcatttgctttgaaggaagctcaaagttacagaaatcaaactcttgaaatcgaggacgagataaacaataaagagaaattaaaaccaaattctcttttataattagaaactgaagaaaccatctcagacttccattgttagaccttattcttctcagagggtcggcgactcagcaagaagcgggagagagaagaaaacgagaggttcctttttaatttacaaattaacccctaagcttttcctattactctctcttacaccctcctactttaaaaaatagaaatgtccccataacgttaatatgtctaaaatacccctgactatattctagaactaccaaatcaacccgtcttgttcgccaagtcgctttgatctaaaaagctcttaaactattcttccagcgaccggaagaaacgaataatcggaatcgaaaaattcgaaaaaggaactgagaagaaacagatctgaagatg

SEQ ID NO: 15909 - DNA, 3003 bp, Unknown; identical to SEQ ID NO: 15908
  misc_feature (1)..( 3003): 2750-1469P.txt file - cDNA_ID_1024003; gDNA_ID_1621094; Annot_ID_170855

SEQ ID NO: 15910 - DNA, 3003 bp, Unknown; identical to SEQ ID NO: 15908
  misc_feature (1)..( 3003): 2750-1469P.txt file - cDNA_ID_1024003; gDNA_ID_2926162; Annot_ID_139742

SEQ ID NO: 15911 - DNA, 3003 bp, Unknown; identical to SEQ ID NO: 15908
  misc_feature (1)..( 3003): 2750-1469P.txt file - cDNA_ID_1024003; gDNA_ID_2926162; Annot_ID_198812

SEQ ID NO: 15912 - DNA, 3003 bp, Unknown
  misc_feature (1)..( 3003): 2750-1469P.txt file - cDNA_ID_1024037; gDNA_ID_1971713; Annot_ID_175142
gaatctgagattttgcctgtgagattcatccccgccaggtcgagcttctcaacattgccatttgagttgcaccgaacaccggtccaattacagtgatcgctggtgtctgaaagcttccagtctttgagaaagttgagaggatccacaagagttgatttcaccgacagcaaaacagagagctcgttgacattgtcgatggaagctaaaacagaggaagtagaaccaatgtaacagtagtaaaggaagagaactattatcttcatcttcatcttcaacttcttcctctgtctcaacagcttcaactgaaacttgactccttagttcattaccaagaacgagactagtgaacatgcaaggaggtggtggaggaagagagtagaataagaagaaactctgtaagtatatgcttgttctgtgtttattatgttatatatatgtgacatataaacacagagatatataaaaatgaatcttggttttatatggatgtagtgatcaaagagtatgtagggttacatgttctaagaaaaaaagaaataaacaagatcttggaagtatttgagaaatttcttaagacattgaacatgtgaagagagaatgtgttttcttcacaattacaactaatccaaaaatgtgttcggtgttttaaaattaattaagtcaactattgatttgctgtatagtgatttgtgaatgtgccatagatagcttaagcttaaactaatactaatataattactattttttatacatacacttggtgtgtggcatagaggtagcttatgcttaacttcattctaattcagcttttgtagaatgtctttatctattttcccacctttttccttttgtgtcttttaacgcttgccttctaaggaagaaaaacaaaaaatataccattagctcttagcaatattcgattacattacatattaatgatgaatcagtgattatattgtaaatctcgtatttaggatatagccaccgaggtgaacgttcgaagcatataagaatgggtgacctgcacatgtgatgaagaagaacagatgatcctattaccctatgctctgcagcatatttaaatatcagataggtccaaataaatttcattattaattaaaatcagcaataatgaagatattcccacgatcgatcttcacgtttcttcttaccccttttgaatttcgaaaagcttctttctatttggttggttaaaaaaaattaagatcgagcccactcatggccattatacgtgaaaacatatttctttagttcaatcatacttaccttgatgcgtaacaaaagtgtgaatactataatgtatgccactgcagagagtgcaggcttgttactgttctttcgtttgcatgattgattagataagaatcttcccatgttacagatttatggcagtgtaatataggtatagtataatattgttgataatataacaaataaaaattaaataaagtggttaattgtatcacttcttgaatgtatcagcaaattgtccctaattaaaatgctactttcttaaacgttcttcagatataaaattctaatttcgtaaactttctacctgatgtctaaaagactaaaagcatgtgtagacgtatacacccaaagtcagtgccaatgcctttaaggtaaagtaaaatggagacggaataaaaaaaacgtacgtcaaacgagagaatataatttttatttttttttcagactgcccaattagcatagcatagtaatttgatatcactaaaaagaatccaaacttgataaataataaccgtgacaaattcaacaccaagatgtttaaaaactcaaacagatatgtatgtatcaagaacgggtcgaggtaaactaactgatcaatttgataaaggataagataagctaaatgctaaatgatttgtgggaaaatggcagagaaatgcacacgcataatattcatcaaaacaattattgtaatactccaacaattacccactcctcttactgatttcatgtttccatccttcttattacagtactaaacacaaactgttgcttcacatgcactcatgtggacctgtcttttatacaattgttttttctttcttattatttgttgtttttagaaaacattccgatccgtagttaagttcttcatttgcttaattatcctttcgatcgttggataaaataccttaaattctacgattactcagtaagtaatttttttttatataattgatagaatacacttttcagttttgaatctttcgactgatcactgatatatacaatatcttaggaaaataaataaatttgatctacaccataaatattataataatcaattattacccaaaagaacaatggatggtttataggagattttatagactatagatcataaagaaataaacacttacaagaggtttgaaggcttaatgggatgcatgtggatcagcacctatagtgacttaatttagtattaatttctgtattatcagagagagaaacctaatcccacaaataagtacctaaactctttgcaaatggtgttttgttgggttatattattaataccatactaattaatatattaacaagtaagtatgtatgctgacgattcgtcacatggccatcagggatcaggccatgggattcgctatggcatcacagacttgagagtccagcttttccttacgatctacacgcatgtgccacgtgtgtttcatgcatcttaaaaacctctgagacagcaagagactctctgactctgtctaaagccaaaatgggtttattatatgacaatttgaccaaaatgggcttattataaacatctcgggcctaaaggtaaaagcccataagttgagacgatgacggtatccaaatgaaggaacggctttggtagtgacacgtcacgattctcccgccaccacaccacagctttttgcttcatctccttcttactctctgtgtctctaactcctcgtgcactcagacatcacagatatg

SEQ ID NO: 15913 - DNA, 3003 bp, Unknown
  misc_feature (1)..( 3003): 2750-1469P.txt file - cDNA_ID_1024045; gDNA_ID_2214551; Annot_ID_134669
gtctattataacttttttattttgttcatcaagtaagatttcaggcttttgtttcgatttaggttacacatattcaaacttatccatatatacacttcagaatctaaattaaagtaatctgatcatgttttgcctaatgttgtcataaactctttagacatgtacatatttcattggaaagttactgaaattattgtttttgtcttatgcgatacgaaaatattatcacacttacctttcaaattataccaaaaaatatgacaatttattatatagattatcttgtagataaccgagaagtttgacatttccttaaacgttacgtgccgtcaagaattggcaaagccactcccaactactcacaaatcacaatccataagtcatagccaagaaaaccctttatgaaacacaaatgtttattattcctgaaaatacaaatttaaattccaatttctaccacgaagatagcttactttataggtatatatattttcttcaccaaatccgtaaaaagcaaaagtgatttgaatttaaatcagaaacgcgtatagattgtgtatatatgtaagttaaagggcatgcatacctttttaatgttatttaatattaatcttaattccattcttcatagacttttgaataaattttatttttttcttgagtttataagtcagggaaattgtcacccacttaaccactaggaaagcagatttggttactgaatctttttcacacctaaggctcaatcaagttttgatgggacctaagttgacctagaactcattttcacacccataataataataatatgacaaaacttatcacactttatttctttaatataagggaatctcaatattcgagtacaacacggaccattgatcatggaatttaaaagactagctagatcatgtacatcaataggaattttggtctcaagtactgtcatgctttgtgttgtgtctcaatcagacaggacaaaaaactgatctcttggttgcacattgggtattaagtatttttcgtctgttgtgtgaatcttaccaagcaatggttttgatgcaaatatgcattacatctggcctgctcgtatgtcccggtctatacgatctgcattatatgtacctggaagctctctaaaatcctcgttgaatatggaatatgcactgcgaaagaaagcatgaaaaaagatcgaacttattcagctctaacactcaaaagagaagatatttcatggcctaaaactcaacaatactcatgaggataccactttacagctaataagaatactagcagaatcttatgcttccagaatcctaagacttttttttcacatctccaagttaccaatgatgtttacgttttagataagtgttatataatttggtatctggaaaatgagttgctatgtcagtcagatcaatggaggctaagtgtttttagaaatgtacatacctaacatcaccaggctgtcgtttaccaagattgagcaagatgattgaaaatccagtccctagtatctgaaaccccccgtgataacaaagaaagccatcaaaggagattaaacagaaacgacttgttagagacactacctctctatacaaaatgtctcatattcaatggcattgcaaaaacgttgggcattttcaggaatccagacattgaagataaagatgacttacaaatatagggcccagatcccaccgatgtgcaataggcgccaagataaaccacaaggtgataataacccacatctttagacttaaagagaaaagtcccataagaatgatatctagaagatcatcacacaaccacagatcaataaactatttgtttcataagttcttggacattgcagatgatgcacatatcaaagattaaagagttctcacctggcagcttcaacttgttacgcagaaagtagtataacttcctcttccaccggcttgctgacggtgggagtttaaacttctgcaatgccaaaagagattttataaggacagaaactaaaaaaccattctttaccagttaagaaaccattctttaccaaatcatcatcatcatcatcatcaaatgactcaactccagctggtggatttggtattacagcaacaataaaggaatctacacaataaaatcaagacttgtgcataacctaaagacgcatttaacaaacacagataagcattgatgcttataacattttcagcagaacctgtttaccttggtccttgagcgtaacgtataaatcatctccatcttcttcgtcttgcaatgcctttccacgaagaatcatccttaaagttgaaacgggaaatttacccttttccgcaattgcatttctcaaatcacgaatctaaaatcagcccaaggatcaatcaatcattcccttcgtacaaaggaattcacttagagagataaagaagaagaaaattctttactttgatatgagacgccactcgaatttgagacggccgagctgggccgatggttttgtacgtgatctcgacggtgccattgttggttgaatctgagctcagctcttcggttgaattcatcatctcaccacgaattgtatgcaatcaatgagaaattgaggattagggtttcgaatttgggaattgaaaaaaacagagtttgttttctcacttgctacttctccgatgacggagagtcgacttgagttttcaatattttcatatctgtccttacatatgtttttaattccacttttaaccccaaaggtttcagagagtataaaaaactccaaaacattggaaaagcaattgtaagagcttctgcgtcaaaaagaaggtttgggttacacttttcatacacaccatatgcataggatgaggccttcaatttctgccttacatatcaaaagatagaacacacacacaaataaagcaaagaaacagaatatctttgagatctcctctttatttggagaagacaaaacacagaacaagaattagaaagaagggagagaaagcaaaaatg

SEQ ID NO: 15914 - DNA, 3003 bp, Unknown; identical to SEQ ID NO: 15913
  misc_feature (1)..( 3003): 2750-1469P.txt file - cDNA_ID_1024045; gDNA_ID_2214551; Annot_ID_185559

SEQ ID NO: 15915 - DNA, 3003 bp, Unknown
  misc_feature (1)..( 3003): 2750-1469P.txt file - cDNA_ID_1024126; gDNA_ID_2926147; Annot_ID_197830
atagttttattggttttctcatatcgttttgggattttctcggtaatgttttgtagttctaactgaaaatatgagtagacaataatgtggttggttagctaatggtgtaagtaatttttttgtttgaatctttgtctacataatatatcacaatggctgatggtacctaagaggaatttcatcattaaatacttgaggttttaaaaaccgatgaaacttaggaggagtaccatcattaaatacttaaagaatttttttttttagtataaaaaagttcttgagttttacactcacacacgatacaaaatcatttgatattacttgccaatgataaaatatgattaacataacgataaacccaaatcacacctccaattgtaaaacaatatgataatataacgattgaaaacggtagaattttgtaggcacacatctgttgtgctagcatgggagcatcggttctctcgccggttaccccttcttgttacatggcttcataccatcggttaaaccatccccggttttgacctcatattttcattcttagtcggaattttgatcttacgataatgaaatcgggagaaaacccttttgaagacatgtctcaatagattcaataaacatttcctcgagactatacttgaagttaaaccccatctctgtgagcttcttggaactgaactcaatactctttagattctcatcaacaccttcaaacctgttatatagagttttgtttaggacaaaacaattatgggccaaaacattttaaataatagtcaacacacttttcagtattttgtttagtaattttctaaaaaaaccaaattttaatcttacacattctattttgctatataatttaactatctatttcattataataatcccgattttgattatgcacacgttattttaatggataaatgttaaattttctatcaaaataatatgtataccatatcaaatgaatataattacttcatactaaaataattaccaaataacaaaacataatgaaccaaaaaaaaagaaaaccacaaaaatgttttagaaaagaaaaattgcttaagatatagttttgctatattctataatttcacaaattaattttacctaatgtcaaactcatattaaatgacttaaaatttataaataaaacactaaaattttatattaactttttttttatatcaaataataaaaacaaatcaatccctttaagccctaatttcctaatttttggttttttcactaatggctacatgcattaaaattgttagactaaaaaataggtataactatacaaatattctcattaagtatagaaataaaatactatattacattgaaaaatacaattttaaccaattcaatttatgttaaataaattattttgttattttaaataaatcattagttattattcatactaatgatttttttttaaaattaatacatgctagatttatttaattgaccaataacacatgtaaaatcaaatttgttaattttccttttgatgaataaaaatgattatatatgtatatatatatatatatagacataaaaattagtatatgtcaatttgtttacttttttaggttttttattttgtaagagaataaaaaaattaaatctttaatgacatatgtaaacatcttatcgttagacttgccacatgtcatgatctcgtgagttactaactttcaaaaccgtactttatataataagatatattgaaagtacaaaaatgggaaaacatcttattattgatttggaaaataaggaaaacatattattatagatatgagatttcgtcatggccgacgacgacgtgagacaaaaaaaggatggcaatttcatttgagaccctttctatccaaatctccacctaaaacctaagaaattgttctttacattttacactagaatttctattaaattcttgccaaatcattttgtcatacaaaaatacaataacttgaataacacttgcttttaatagaattcagaaatccggaaattgaataacactaaattttaatagaactagatgatcacccgcgctacaccgcggttttttcggattttttttattgtttaatttaaatataatcttttttatctactcattcactcatgcaatgagcaattacttttagtattaaaaatatttttttctaacaacgttctcaacaatgcatcatacacataattcataaacaacgtttgtctttaaccaatttaacaaagggtagtgttggattctaaaaacttaagaatttgatgatggaaatccttacgtattatataaatatcaatttaaaagaatataaatatcaatttaagagaataacttactcaaatcattaagtaatccacgactattaaacactcatactttgagtttggattacgaaaaaaaatcttcgaatatgagaaaactattaaaatagttttattgaaaaatcatgtaatattaaaataaatttagtaatagtacagataaatatataaaataaaataatatgtaaaattaaataagaaatatatcattaacctataaattagaagttgaagagcttacattaattattttaatagacacatggcaaatgctaagtgatgatgtgtcaatcatacggaaagagttagccatgattaataaaatacctcaatgacactagaatttgaattctattaaactctgtcaaattccacggtttaataaccccctttataaaagttgatcaactctgatataaactttttgttatttatataagtgttccatcgaaaataatattttaataaatattcatgaagggtaaaatggtctttaactatttcagtattacgataaccctactaatgtgtaatatatataaatcattgaaaaaccctagcagacctcttttgtgttcttcactctccagcgatcgtttattgcttgaagacggcttcttcttctcacaaacctcatctctgctaatcaaaatg

SEQ ID NO: 15916 - DNA, 3003 bp, Unknown; identical to SEQ ID NO: 15915
  misc_feature (1)..( 3003): 2750-1469P.txt file - cDNA_ID_1024126; gDNA_ID_2926147; Annot_ID_139161

SEQ ID NO: 15917 - DNA, 3003 bp, Unknown; identical to SEQ ID NO: 15915
  misc_feature (1)..( 3003): 2750-1469P.txt file - cDNA_ID_1024126; gDNA_ID_1620633; Annot_ID_47303

SEQ ID NO: 15918 - DNA, 3003 bp, Unknown; identical to SEQ ID NO: 15915
  misc_feature (1)..( 3003): 2750-1469P.txt file - cDNA_ID_1024126; gDNA_ID_1620633; Annot_ID_162773

SEQ ID NO: 15919 - DNA, 3003 bp, Unknown
  misc_feature (1)..( 3003): 2750-1469P.txt file - cDNA_ID_1024170; gDNA_ID_1972155; Annot_ID_179455
tgctcaaactctgaagcgatcggagtctcctctggttttgtttcgtctttcttctttcccaagaaatcgaacaatccacgatctgtaacctctgccgatgattcctctgttgctacctttggcacctcctgttcaggaacattcttgatttcctcagccatagttatcggaaaaagattcgatgaatgaaacacggattcaaaagtattttttttatgtgaaggtttgaaattcaaaagcagatgaaaataagaggtgatggagattagagaagaaagtgtgttatatagtgttgaggactcgggaggggtccaagccaccgcggatttcacgctctttgtacactttttttttgcaatttaaaaacatatatctaattatatgaaattacaaaatgacccgctttttatggcatcttctccttcgtccccacgttaattatcatttttctgttaattagataaagttatattggattaagaagaattcattaattaattgttaatagtttgcttacgtgatctgatatcaatttagtggaataaaaaataatggataagaatggcaactagatagttttttttcaaaagtagtgaaaacaaactaaatggtttgttcaaggcgtgtactgtttttaatttaaatattagactttcataagtttttttgtttgttttaatacttgttatgtggactttgtagttcaatgatcggtttatcaagttaaagaaaactgattcaaactttaaatagagtaagaataatatggaataagcaaaaatgttttttcatttcctctgaaagcaaaaataatttatttttgacaacgcaaaagagattttaaagaatgggatgtccctataaattattgttcttaaagtttcgggctttcttatatatatatatatattcacaaatataggaaccatcttgcaaattccaaaaatggattacagattttgaaaggattaacaatttaatgcaccatagattggaagacacgtgtcaagcattagcgcaaatcggacgacggagctcatagtcagaaatggaacgtcggatgtagacaaagaaaagagtcagagagaaatttagattaatcaattacatcttaaaacgtgtcaatataacatgggaagttgtccttttgtaggacccaatagtatgtactgattggcgtaaaagacgtgatgtcggttacgtgggtccacttgacttattgactagtgccacgctggaacaagcttgttcgagaagaaatgatgattttttagaaatttataacgttccttattttttctttcttctattctatgcgttacaaaatacaaacaaaccaataagaacttggttatttaattcttatcacgctatgaatcctcaacgattaggtgttattttaacttattattcactaaacatgttgaagaggccaatctagtaacgcatgatctttgaaattgtaaatacatgatcttggatactctaaacaaaaaaaaaaacaaatccaacaagtaatataagtccgattggctcaatcgattaggaaggtgttgttgcaatgctaccggatctcatttttagtcctaatgctacaataagacgggtaatttgcgcttgtgaatccgccaaaagtattatcaaagaaatgatcgtggacataaacaaactaaaactaaagatttagattttagaacgaatagaaagttagcatcatcttttgtttaccatttttggggcacataaaacaatctttcgtaatctcgtttatgggaaaagggtttgtgtatgtattttttcaacgtaaatggttatgttttcatgcagtttttaaagataaacttagatgtagataatgaaatcatgagtagacaaatgagcataagatgacttggatttcttatgaattaatatgttaatgtgtgggatgtcattttcgacctattgaaaaagatatactaaaaatattaatgaaggacagatggtaatcggtaaatgcatcatctcttaaaattcgcctaaaataaaaaaaatgaaccgacgtgccacatcagtaatctctggtctctaaatttaacaaagacgtagcacgaaccgtgacgtatcaacacacatatcaaacaaacctatctttttcaatactaacttattcgtctttttggttcttgttgtcatatacaccgaagctcagctcttaacttattctttggataatgttttcggtgatagcgaaccgacaaattgtagccgacacttagaattcacaactaaactatagattttaaaataatattaattaattcgaaagtttgagatatctgaacaaagttttctgaaaaacgtagaatacatatggatcaaatactataattcgaaagtttcagattagtgctaagtaatgaacgtcatgcgtttgttcttctgtcgatttcttctttttcaccgcccgtctgagttttatgggcgtgatattttccttattgtggtcaaatcaggaatattcaacaatatttagcactcgctttacttggtgggacatgagaatcaatcgatgcatcgctgttttatttctttttctttgatgtttctatttctgttagaacaaagttttcatgattcttaaaagcccaaatttcatggcatcggaacaaagttttcatatatgatgacaactcaaaacaaaagagtaacggtaaaagcccaatacccataaaatgggcttaagaatccagatcggatctataacccgacccggttgttgacaccgagagagtccacgcaacgttcgccgaattcctaacgaatcggacaccgtttcgtcgctgtaaaattttgatgcgaaattttccaattcacagattttgtttttccattgttttggatttctagattctagttatatgttggtgatagatttttcctacatctcgtgattctcaaacgcttcttgagctcttcgtcgaatcgggactgtgatcgggacttggtggagaagaagcgatg

SEQ ID NO: 15920 - DNA, 3000 bp, Unknown; identical to SEQ ID NO: 10522
  misc_feature (1)..( 3000): 2750-1469P.txt file - cDNA_ID_1024257; gDNA_ID_2213659; Annot_ID_132510

SEQ ID NO: 15921 - DNA, 3000 bp, Unknown; identical to SEQ ID NO: 10522
  misc_feature (1)..( 3000): 2750-1469P.txt file - cDNA_ID_1024257; gDNA_ID_2213659; Annot_ID_181811

SEQ ID NO: 15922 - DNA, 3003 bp, Unknown
  misc_feature (1)..( 3003): 2750-1469P.txt file - cDNA_ID_1024370; gDNA_ID_2214471; Annot_ID_133076
gcaaccatggagcaaaacatgaaggacacatacaatatccccagagagattgttcccaaatcctgaagtaatcaaaacaactcaaatatcacaacacacacacacagtctaacatgtcctgctcctaaattcatattcctctctcttaagatccatcaatacaaaatgacagtataatttaacggtagagcaccttatttacggtagtttcgaggttctgagcagcaccgtaagcgaggaagattagcagaaaggagatgctgaggatatgaacatcccttgtgtagcactttccagctctgactttccgatcctcaccagaggcagagatcaacggcgcctcctcgtcgtttcgagattccatggcggagatttagtccggtcacctcactgactacagctccgggaaagatgagcggtgctccacggagagagtgaaagtcaaactctgtagagagagagatcgatgcctaccgtttcagagatttggaacttccaagaccggtgatgattgcggttcggtttattttggtacggtatttctaatttcaatttatatcggttcagactaaattgagattggtgtttgttgggctgggccaattaaagaatctcaagatttataatttccgtttatttcccggggaaactgaggaagaaacgagatcctttacaattttgtatttattatacccaaagatttgtaaaccctaatttcaatagcatcataacgtaaaatcaatcatagaaaatatcgaagagactgccgaaaattatatctttgaaatcaactggtgaacatattaaccgaaaataaaatcgaagagaaaaaaagaacctaatctaagaactggtgaatttggtgacggctttggtaccctcagaaacagcgtgcttcgctaattcaccaggcaacacgagccttacggcggtttggatttcccgggacgtgatcgtcggtttcttgttatacctagccaatcgcgacgattccagagcaattttctcgaaggtgtcgttgatgaaactgttcatgattcccatggcttttccagagatcccgatatcaggatgaacttgtttcaacaccttgaataggtagatcttgtacgtctctgtgctcttcttagtcttcttcttcctctcgcttcctccttctttcgtgatcttcttatctgcctttggtgctttctccgacggtttcttctctgccttcggtgccattgctttggataaaattcggatttcgcgactagttgtaaattgacgattaatgatcgctctccgagtgataccgagatatatatagaggtgctgatacgaacatgattggtttttgatcaatctcacggatcgtctacgtggcgttatcacgtgcgttgatacaagataatctacggttgaattcacgagaggaaccgaactaatcgtgggctcatctaatgggccttggccttttacaagacggcatcctttttaaaaaatttcgtcgatttccaacttatttgctctgctcttctttaatctgctctgttcttctctttccatttcagcgttgacttagttattgggatttctcagaagcaaaaatggcgtctccggcgacgtttcaattctctagaacaaaacttaaccttcagatcaacctcgtcgagcgaaaatctccttcaaaactctcgtttcctcttttattcagagaccaagcaaagtcaacaccaatcagatttcccgtcataagagcttcatcatcttcgtcggcgtcaaatcataaaccttcactgcttaaaaccaccttcatcagcctcaccgcagccgcagctctgttctcagcatcgttttacttcgtcaacaaacgcgccgcgatgactccagttgctgtggtagagacgacactcgagaagcacctcgagacacaatcaaacgatgtgaatgctttatcattgctgacggaaatcaaatttaagtccgataaacatgagcaggcgattgtatttctggaccgtctgatcgagatcgagccatatgaacgaaaatggccggctatgaaggctcggattctctcataccacgggaaaagtgaatcagcaatcgaagctttcgaggagattctcgaaaaggatccgatacgcgtcgatgcttatcattacttggtgatggagtattacaactctaaacctaaattaacagagatagagaagaggatcaacaaagtgattcgaagatgcaagaaggagaagaagacgaaagagattctcggtttcagaatgttgatcgcacagattaggtttattgaaggaaaatcagttgaagcaattcggatttgtgaagagctagtgaaggaagatccaaatgatttcactatatatttgtttcaaggagtcgtgtatacattgatgaataagggagaggaagctgcgaagcaatttgagcatgttgctagggttataccaaggaatcacccgtctagagagactgccgcgaggaccacgaactcaaatgaatggagagtcatcgtagcttacgataatgtctactgctatttatctacatttgctaggctttccatggcttctttgtttaataagtttggctaagtatggtggaaattgaaaaagttcaaaactctctattgatttttgtttgtgattttaacactttgtacaaagattgggtgagtatttgtcatttgagaagcggaagcttcattgtgataataaagacaagatgaaattagatgatgcaatgtgactgaaaccataaaggtcacgtgcgtttatttgctttaggcttctcgtaatgaaagtgataatacatgggctaaggcccattaagtatttctcttaagttaagctattgggtatgaataatgagctttataccacccaataaggagactcgtcatatataaatgaccactcctccgttattagggtttctgattctcggagctaaaagaagagcaagcagcggcgcagaagttgaacacaagtgaagctcacaatg

SEQ ID NO: 15923 - DNA, 3003 bp, Unknown; identical to SEQ ID NO: 15922
  misc_feature (1)..( 3003): 2750-1469P.txt file - cDNA_ID_1024370; gDNA_ID_2214471; Annot_ID_183015

SEQ ID NO: 15924 - DNA, 3000 bp, Unknown; identical to SEQ ID NO: 7337
  misc_feature (1)..( 3000): 2750-1469P.txt file - cDNA_ID_1024400; gDNA_ID_1621141; Annot_ID_56630

SEQ ID NO: 15925 - DNA, 3003 bp, Unknown
  misc_feature (1)..( 3003): 2750-1469P.txt file - cDNA_ID_1024400; gDNA_ID_2926149; Annot_ID_139242
cagcattttaaactaaaagaataatctaaaaccactattttcagctttgattccaaaaacacaataattcttttaagaagatgtacaaaaattcgaaaaaactaggtagatttgctaaatttatccccaataattacaaaaccagataccaaatcaaaacacatgtatattatttccgaactggttcggattaattgattttcaactcatagaaacagcataaaacataggggtaattagaagaagaaaaattatggtaatgtaaatttaaaataatgtagacaaaatcaattaagatgttgtatttgtttaattcttgaccgccactatatgtaaagcctattcttgttcgacgagcagtttgctatttttgaaggctttaaagatttgtttgtcggtcttcaaaaattatatatgattcttttttgtgttttgttctcattcaaacactaccgaaaatcactttccggtagatcatctatcatgaaattgctccagcacaaacatgcttaactgtaaagttttttcgatatgtttaatcgaaaagataagtgcatttcgtggatatagatgatctaattaatttttaaaactcttttcattcactactatatatcctgaaatcgggatgttacaatttatttctgaatttttttaagtgtctcctacataactagatatgttacaaccactatggatcttatttctaaaaagtattgaatacatcatgtctaaattgattaattctcaaatatactacattttatgctattttctgtaacttccatcagaatccaaaatttttttttaacataccataaattttaattttatgatttatgaaatatttatagattttattattttaatatttttaaaaaaatccaaaataatagtatctttttagctaaaatttcttttactgtattttaggatatttctctatctaattgtacaccatacatataaccataatttggtgtaattcagatttaaattaggatgacatcaaaattagtcaaaatcaaaatagcatctctattttattcttatacttccaaggaaaaaaaataaaagagctttaaacgtgtcgttatagctgtaaagctggtgatggaactggtaagttggtaactgcttcgaccaccgtacgaatatggtggttactggttaggctacacggtaatttcttttatttacctgcagtgagaaaggtaaataataatgagtgagagagtaatggataattctgaatttgtaatgtcattgtcattgttttgtcagtaagtgatgctttagttaactcatgtttatccatatgggccattctatgtttcatatatatatatatatatatatatatatatatataatatgttattttactttttataattttgattcttagtctttatcagaaaagaaaaagaattgattcttagttcttggatttatgaaaagtaaataattatgtgcaaagagattctttgataatttttcaatataataaaatattaagaatattatttaaaaaaaaaaaattgagggaagagattcatttgattttacgaaaacgctaaaacgagatggattaaatgttagcctttttcatgacaaatatgttgtaaagcataatcatgtacaaggtaaaataattttgggtttttagtgtttatgtcgtaattctataatttttctcaactacttttttctttgtataatttagcatttttaatatcaaacacttttgattccaaatacagtttatttttattttcttaagactacttaccaaacacacataaacggtttttaatatctaaagttaccaaatgtatgtatttcaaaaaacaatcatcagcaaatttagatgttttgaatttttattagaagaaatgcattgcatggttataattagaaaattaaaataaaatataaatcaggattatatgaccaaaaattgttttaacttttacttagcatttacacataaattaacagaaatataatattttttaaaaaataattttcttataataaaaattgttatattgaaattcgaatattaagatttggcaagtcgccaaaatataatcacactcaacaaatttatattgtctcactaattatctgttcataatacatatatcaaatgtataaatcttaatataataaattttaaactaatttcaactgtcatactaaacaagagtttatacaagtctttacctagtgttatactccctctggaaatgttaaagcttattgtttaagaaaacatattatacacctaaagaaaactatgcattcgttttgtgccatgtgttgttttactagtcgtgactcgtgattctccatatcattacgttaatcccaactctcaactattattatgttattttttactatagaatggaaacttgtagattacttatatgaaggttgattaaaatgtaattaaaatctgtatcttttttataaaaaaagtctcttcatatatgttttagttgatgagtgatggacaagtaaaaataaataaaataagtacatacgttttgttttagtgatataaatatatgatgccaaaaatgtacatatattttctggataaatattagagttgtagatccaggtttgctatgatctagctctgtccgaaaattgcagagcgtgatcttttctctgtagtacgaccgatttgttttactttatccaatcgttttaactttttcaccacggttaaaaaagttaaaatcagatctctaaccattttctcaacgaacctcgctaatatttctcatttaatcaaaatttaatcaccattaatcctttggttgattactcttttgtcctcttcttcttctctcttctctttcttggtggctctcttcttatagccactgttccctttttcattgtattcctcaaatctctttacttgatcgttggttctctcaaaaatcagatttttatttctgggttttgttcgattttgtgatcatg

SEQ ID NO: 15926 - DNA, 3003 bp, Unknown; identical to SEQ ID NO: 15925
  misc_feature (1)..( 3003): 2750-1469P.txt file - cDNA_ID_1024400; gDNA_ID_1620725; Annot_ID_49269

SEQ ID NO: 15927 - DNA, 3003 bp, Unknown
  misc_feature (1)..( 3003): 2750-1469P.txt file - cDNA_ID_1024576; gDNA_ID_1620673; Annot_ID_48189
ttttctattgataaaatttgactgtttacttatttacaacaagaagttttcattttagaaacagtcttcacttggaaactttattaacctcaaattcacctaagtattctacacatattgtgaaaacaacaaataataatagtcattataattaaaatagcagtaatggtttgactaatgattttaaaagtccactagaacagcgattcatcaatacgacaaaggaaggtgaaaagctgactatttaaaatgttaaagtagtagtgctactaaattattgtaagaaaataaaaaataacgaatttacgattatttctttgaacataaagctatttgacgacctcggtaaccgggtggtcccattaactcttatatgaaccactggattttcgaaaggtcaatccaacggtggatctgtggatacaagtgttgactatgtttttatgattttatgagcctattaaaatctccagccagctattaagttcttgtcacgtgtcgacttttgttatcatgttccactattgaaattgtttcaaaaatgaatggaacagaaattaggcaaggcataaaattgagaaaaagggaaaaaaaatttatttagtgttttgatgaattatttttgtttgtagaatttttattaacgaatgattgaaaaataaaaaatatcggaaattgtatatagtgacataaaatgtactcgtatgtatcaacattatcttggatactagtccattggttacaaaaataaaatcttccaacttggattttaatcgtattcagtaattgtgattatcttagctggcaataattatattgtctctctatgttttggaaattaatctggacttcagcttaaaattcttaaattattaacaaaataaaaaatgaaaatagaacgtgttgagtgttcatgtaacgtgttttatggctatatatgggtggggaagaaaccatggattgttgttatttaaaacagtttcttatgtcaacgattaaattataacatggggtagttgacccgatcgaccgagttgtattattattgtcgtgcacgtctatattatctacatagttacaaaatctcaatgatcatccttttttctatgtctcaatcactcattgtgttataatatttctgagcatctctttttcttcccgatcaatatttgtttggttaacattagaataagataacaaatatatatttgtaagagaaaaaactaacatgtcaatgcggttttggaactagtctttcactaattttaaaagtaaacttgtttttgttctatacatgcggggtaaaatcgttccccgtattaaaactacaatgaaacataaaacaagataaaaaaaagtaagatgatttttagaaaactaaaaataaaataataaaattatgctcgtttttctctggttgtatttcgttccaataatttatattattattttctatcaagcaggtgcaagaaacgtgttcgttaaattgcatgttgatataaaaaaaaaattaaaaaaaaattgcatgttaattctatctctacgactctgcaacgttacgtactatttattttgtcgtattaataattgagtatattttgtacttcatgacaagaagttacataacaatttaacggataaaaaatattaattcaaataatcttgacataacaattatgttatttttttttaacaacaactcaaacaagttctttaaacaacaaatgttctgatcacaaatctcttttttttttttttttgtcaaggatgattataaatcttaaaattagaaataactacagagtttatatacagagaaatatgggatgataaaaaagactaatatttgtagtcctattagttttgtttcataagtcttaatctcacttcagttacagttaatacatgcatgatcaattctactatatatgcatatataatgcatgcatgttgtagagttgagggttatgacacaatgctatgcctattttacttgtactaattaaataaacattgaaagaaagctgtaaggaagaatatgtagataaaagacaaaaagtaaaatgagagtggaatccaatgtggacttcaactagatgtcatattttgtatttttctaatatcaatgtttaacgcatatttggatgtaacgttgggtgtcgaataattttgctttatattcttcactttaacgtctaaacatgaaccaagcacatggtggtcttggaagatgaactataaatatcaagaaaatgatgtataatgggtgatccaaaccaaagcacatataatctctagagttaaagtgggtcgaataatctctagagtttgtggaacgcatagtatctttgccatttaacgtacgtacgtatctagaaccaataatgataaaaactgtagtggattaattactcgaaactcaaaagtcttattcccaacatcaagataagtggtaaattttaatactggaataaaccattatcccacgaaagagaatattataaagtttatatattggttgactttgtgttaaataatgatgggattatattaagaaaaacttgttaaatgaatatcagaatcaataatcgtatcaattagacaacttgattaagatttgattctggtcagtaaaatatatgaaacatgctccatatgctatcatatcttcaataaaataaacgaattgaagacgagtatatcgctatcatggcaggttccaattagttatctccatcctcttttttgtttccacaaaggagccactttgtgttctttatttttgaaaatgtttgattggttaattaaccaagtgaagttgtaatactattatgcaagaattaattgcagcactctatgggtttcgtaatttggttaatagtttaatgggcctcgtacaagtcagcccattggatatatttcagattaatcgggtcgggtcacaaatgattatccttgttgccttgcctttgccaatcgtttgtttccaaaataaaaatcatg

SEQ ID NO: 15928 - DNA, 3003 bp, Unknown; identical to SEQ ID NO: 15927
  misc_feature (1)..( 3003): 2750-1469P.txt file - cDNA_ID_1024576; gDNA_ID_2926200; Annot_ID_141467

SEQ ID NO: 15929 - DNA, 3000 bp, Unknown; identical to SEQ ID NO: 6000
  misc_feature (1)..( 3000): 2750-1469P.txt file - cDNA_ID_1024639; gDNA_ID_1620835; Annot_ID_57957

SEQ ID NO: 15930 - DNA, 3003 bp, Unknown
  misc_feature (1)..( 3003): 2750-1469P.txt file - cDNA_ID_1024639; gDNA_ID_1974092; Annot_ID_180635
atatataaaccaaaaaaaacaatttaaattgaaatccaaacaaatctagatgtccgtataaaatcacgtttaaaaattctaaaagttatcatcaggtgtgacacatgtataatcaattgtattatccagaacaatgagttgatgtcaatgactcgatgctatgagcttatgagtagatcatacaatgtggacacgacaacctaaatttaacaaaggatataaaattgtgaactgtttttctgccaaggatttaaaattcatttagcgttgtaatttggtacacacatatacatattaataaaatctacggcatattattaacgaggtaatcaacatttagggtataaatggttgcaaacacgatcaatcatacaattaggttaaccggtttgtgacacaatgggcgactcaggataagacatggaggaggagctgatatgataagacgaagttaggtgatatatatagagatgtaccagagatcataatgcatatgaaatgagatcgatagctgtcttctcttaaactgaattacgacctctctatacttctggtcctatccgtgagtcatgtgctctctgtctttagtcataatatgattttgaattggctctgcaccattcaagatcatggcccattatggttctctgcacctgattctgtttccataataattccatttacctacaaggctatacatataatttattagtataataaccatattatgagaagattaattatactgttcatacggcaattaagatatcgatgcgaaaggattcgtgatctttatagagtttatattccgccgttgctagctaatcatgtttattttgtttctctagtacttaacgcgtttgtcaatttattaaattcgattagctaaaaaaaggatttgactcaatttcatctttagagacttacaaaccaatttatacaaatcaattttttatagatgttacattttttcgttcacattaatgacaggttttcttctttctatgacttaaatccacctaactccaaaattaaatccccaattcatgttaaagaagtgaatttcaacgcttcgaaaagttaataaaagacaatgaagaacatacatgaaacatgcttagcgcctagcggacgagcctcttaattagaaccaagtccttagaaaattacaaaattttaggtatatgccaaaaatcaaactaaagttgtcgataaccatgataaatgttgcgtatatctatctaagaaatatcacgcctaaaagataaattttggtacaactctcctcaacgttcatttttttaatactctgaaataccacaactatattccatatagatgaggtttgaggtttctaagacttttaaaacttaaagtcctagaattaaagaaacgtgtaacctttcaagtttaatatgggggaggtttggatcggcggaagctaaaaacagcaaggatcaggacaacaatggcctaacgaatgacacgtgatgctcttttcatgttgctcaacttcgatagcgaccgtttttctatttttatcactttcatattttacccccaagaaaaacaaaaacaagcgagtccgatatgtttaagagtcccaacctaaaatctattttcatcaccttccctatatagcccgcacaccgcacacaactaatacctcaaaatattaatttgtttgtgtttgcgcttgtttttatgttcttaacatcagggtaaaatgtatcttatgtgattagttttagtgggatactctacatagcattcacatgtctattagtttaaatacgtgtatgtcaatctaatgatacaattcagttcgcatgacttgcaaaacataaacgtaaaaagcaacacatatgaaccacttaccacaattttcgctacaactttttccaccatattagcaaaaaaaacaagggcgaataacattcatttggtataatccataacgatcaaattatcgattatcatcactacatttagctagagattttctagcctttctatttgccaaaccttttaatccattcttccttttaaaaaaaaaattatttatttcttttcaatttttatgaaaaccgtatctttaactaattgttatccttgctaatacatgcatcaacattttcttaaagtttttggtaaaattaacacataagaaataagaaatagttttcttctttaaactcgtccttatcacaaattttagattgtatgatattaaattcgatcttatcttaaatactttaaataacgttttatttactcttctcatattacaaatttactacactgttgcttttctatgttttacaattatatttaggagatcttttgttgtattatcaatactcttagatattcatttatgtagttaaaatttattaagattacttagattttattgagctttgaaatatattttaaaaaaaaacttttaattacacgttggtaaaaaaaaaagacacgtatgcaaaagcaccaaaaaaggtaaaaccggaaaaattctcaaatttcaaaattacccaaaaaagcctttaacctaaccaccttactttataaacaacctcaccgtctctcttagctcaccaacaatcacattcttctcccataagaaaaaaaaaataatcaaatcctcctcctctgcttcaccaccaaaaagcatattcttctctcgtcttctccggttaatcaaaatctctccgtgtgaatcgtttgtgaatggtggaaactaatccgatcggtggtaagtttacgctctccctttccatcaaaagggcgagcttttctcttcctctctcgacatcctctgttttcgctttcggatcttgcaaagaaggctggtactttcgctgccttggcctcgacccgtgaacgattcgcccctaaaattcacaacccggaaccctaatttcctaaaaagtggttctttttttattgattctgttacttgtgagatttgctctgttttttgttctctcgatttcgaagatg

SEQ ID NO: 15931 - DNA, 3000 bp, Unknown; identical to SEQ ID NO: 6000
  misc_feature (1)..( 3000): 2750-1469P.txt file - cDNA_ID_1024639; gDNA_ID_1620835; Annot_ID_169834

SEQ ID NO: 15932 - DNA, 3003 bp, Unknown
  misc_feature (1)..( 3003): 2750-1469P.txt file - cDNA_ID_1024765; gDNA_ID_1972069; Annot_ID_178530
gttattattcttttggaactgatacactagttgatgcagttctctcattttacttttgtttgttgaatcacctttataattaatatagattacaaggatttgcaagctataagagctacagtttttttttttttaaacttgcttccatttctttgtacaacataacaaaacaacacaacatctcatgctaattcaaataggtcaagtatgctactttgttgtccaaacatagacttgtcctccagctgtggatcctgcaagcgttccaacattataaggatggcaatggattctgcatggtatagctctctgcagagggttatgcagttccatcactgttcgctttagttttggattgatcacatcaatcttctttgacaaattgcccacatagatgtatgaatcatcccacccccatactgccctgcaatcaaaatcattaccaacttcagtttttcgacaaatagacgaaatcaattcctacttcttttcatttctcataacaaaaaagagtggaaaaagagtgtattggtcagagaaatagtgaaagactcataacaattacttgtggattcttttgtcagaacacagtacattaagcaagaagtgtattggaactgagaggcttattaaggtacaagatactggaacatacttgaatttggagatccatctgctggtgttattgtgatatatcatgcaagtgttctcaaaattggcgccgcttagaacaccaatgtagttgtcaaggctacaaggaaaacaaaacaaaacaagagttcagcaaaccccagagatgcacatagggacctacattatacatcagtttcactctctctacacatgtttactcttgtctacgttgctaaaagtttatgagatgtatttatttcccgtctcaaaaccatcaaggcacaaagttttctagctaagtaaagttcccagacataattgcttcaaggcagtggtgttttttcaaatatgtgcaacttttaaaccgaaatgcacagactttatgacctcaacaaaactagaacatatattacttaatctctccaatataatgacaaacaacatttgatgtgacttaaatcaaggagattatacttgtagttcttaatgaagtgtattgaataggctgtggaaaaaatgacaagataccttgtagttgcaagtgaaaggccagaaggtgagaaataagcagagtgcacagccctagaatgattaacagtagacaatgttttcggttttttggctcccatgcttctcaagtcccaaaggcaagcagttccatctgtggaacttgtcgccatgacatgcggattctgcgggttgaagtctatagagttaatcctccgttcatgtaactcccaatggaaaactgactttcctgctcggaggtcccatacattgaacactccataatcctgaccaaagtacaagctttgctcatcatttggtctctgcgagagtgaaaatatagcttcgtccgtggaataaaccagatcaaaaaccgacttctcgacatccatcaaccggatgagaccatcatagctgctgctaataacctgccatgaatgcaccaacgaacttgatgacttaaagaaagagataacgtttctccaatttcaatagacaactaaataaagacaagtcgtttaacaaaaaacttacccttgataaagagttttgctgaaacacaatagatgaaactggtgctgagtgaggagtgaatagatatatcccatcattatcttcctcattcccacaatccaaattccaaaacccaacattcccaagtttgtcccctgcagcaaccatcttaacattctcgcaaggtaagaactggacaacaaaaatcctcccaggcacaacacgagctacattctgcggttctaaagtcaacaaatccagatcaaactcaattttctcaggcttaaccggaatactaaattccttgttcacataatcactgaaggaatcatcttcaggctcttcctttttaacagaaactttagatacacgagaactactcctagtcctcaccataggagactcgttctcatccttaaccactccaatttctcccttaaccaatttgcctctacaagacttactctcaatacccaaaagagtatcaaccaattgcgtataagaaccgtatccttcatacgcggattcgaagggaataggagccaaaagacgcggcgattgcttctgaggagatggttggttgtgtgtgatctgagaacccatccggaaatctgaaaagccatcaggtaagccagcggaatctggattcaaacctctggtgcgtagagacattcggataacagtgggcgttgaagcaggtttgggcttcttcttcttaaaagatttagaatcatctcgagagcgtttggcggcggagagaagagaagaagctttggcgcggacattgagagcagccaacatctcatcgttccgtcttatgttctccaatctcttccgctcgtactccgtcgccattgattgattgatgcttgagaaaattgagattttttctctttacacacaaacaaaaaaggagagatttttttcttcacaccaaaactgaaagaagacctagaagaaaaagaaaaaagctaacaacatttgatgggtcggaaataggcggcagaataacaactgccgccaaaaaaataaaaaaacgaaaatatataattacacatttacaccaaagtgtgatctaaattgaacggtgcagattagtttaacatttatcccaaattttaagaaccgtacgatggagcatcttaatgacttaaaccctaaaagaagaaaaaccccaatcgagctctgtcaatggctcgcttcgtcagatgtctgagaagaacactcttttctaattcgtctccttctattgctcaccggagccctaggattggtttgcccacgaatctaaatcctaaaattttaatcagccgcagatgtctgagctccgggagttacgtctcagaaatg

SEQ ID NO: 15933 - DNA, 3000 bp, Unknown; identical to SEQ ID NO: 6872
  misc_feature (1)..( 3000): 2750-1469P.txt file - cDNA_ID_1024765; gDNA_ID_1621110; Annot_ID_171771

SEQ ID NO: 15934 - DNA, 2552 bp, Unknown; identical to SEQ ID NO: 99
  misc_feature (1)..( 2552): 2750-1469P.txt file - cDNA_ID_1024912; gDNA_ID_2569; Annot_ID_145788
  misc_feature (1)..(1): n is a, c, g, or t

SEQ ID NO: 15935 - DNA, 3003 bp, Unknown
  misc_feature (1)..( 3003): 2750-1469P.txt file - cDNA_ID_1024961; gDNA_ID_2926258; Annot_ID_143163
acaatttaagataagttttgacttttgactaaatgattaatagtaaatgcaattactaattacaacgaaagacagggaggtatggaacaaagagagtttccatttgtaaacgaatagttaatgtgaactgtgacaagggttgtggatgattatgactattcgtatgattagtcaccattccttaatttcttgttccctcaattaagttgtcttctcatcatttttttttaaaatattcatcctgaatataaccaacaaacaaaaggttcgagtatctataaattccgcaatgcaatctaaattggactactagtgagatctgcaacagtgaaaagagaaaacaaaatggacttgaagaggttttgacaatgccagagataatgcttattccctaatatgttgccagccaagtgtcaaattggctttttaaatatggatttctgtatcagtggtcatatttgtggatccaacgtattcatcatcaagttctcaagtttgctttcagtgcaattctaattcacacgtttaactttaacatgcatgtcattattattacttcttcactaagacacaatacggcaaacctttcagattatattatctccataaatgaaataattaacctcataatcaagattcaatgtttctaaatatatatggacaaaatttacacggaagattagatacgtatattagtagatttagtctttcgtttgtgcgataagattaaccacctcatagatagtaatatcattgtcaaattcctctcggtttagtcgctaaattgtatcttttttaagcctaaaagtagtgtattcgcatatgacttctcgtcctaactttttttttaattaacaaaaaaatcgaaaagaaaataatctgttaaatattttttaagtactccattaagtttagtttctatttaaaaaatgcttgaaatttgacagttatgttcaacaattttgaatcatgagcgatgtctagatactcagaatttaatcaagatgtcttatcaaatttgttgtcactcgaggacccacgcaaaagaaaagactaatatgatttttatttggtctggatatttttgtagaggatgaaactaagagagtgaaagattcgaaatccacaatgttcaagagagctcaaagcacaaagaaaaatgaagatgaaggactaaagaacaataagcaactacttataccctatttcccataaaggattcaggtactaggagaagttgaggcaagtttcacatgcaagtccctgtcatcatatatccatattataccacacctacgtctctatgtgtatttcttggcatcgactttctcatgaatgattcaaattttcatttatttttacaatttaattcacctaagattattatgcatttctcatcattggtacattttctgtatagcgtatttacatatatgaaataaattaaatatgtcctcacgttgcaagtagttaatgaatgtccccacgcaaaaaaaaaatccctccaaatatgtccaccttttctttttaattccaaaattaccataaacttttggtttacaaaagatttctagaaattgaggaagatatcctaaatgattcatgaatccttcaataatctgaagtttgcgatattttccgattttcttcaagagttgcgatatttgtaatttggtgaccttaaaactttttttgataaagagtaaaacgttttttcttaaaagtaaaacttgattttatgttttagggttctagctcaactttgtattatatttcttgcaaaaagagttcgttaactgcattcttcaacactataaagtgattatcaaaaacatcttcatgaacattaagaaaaacaatatttggtttcggttagagcttggttttgcttggcttgattcacatacccattctagactttggcataaatttgatacgatagagagcatctaatggtaatgcagaagggtaaaaaaggaagagagaaaaggtgagaaagattaccaaaaataaggagtttccaaaagatggttctgatgagaaacagagcccatccctctccttttccccttcccatgaaagaaatcggatggtcctccttcaatgtcctccacctactcttctcttctttctttttttctttcttattattaaccatttaattaatttccccttcaatttcagtttctagttctgtaaaaagaaaatacacatctcacttatagatatccatatctatttatatgcatgtatagagaataaaaaagtgtgagtttctaggtatgttgagtatgtgctgtttggacaattgttagatgatctgtccatttttttcttttttcttctgtgtataaatatatttgagcacaaagaaaaactaataaccttctgttttcagcaagtagggtcttataaccttcaaagaaatattccttcaattgaaaacccataaaccaaaatagatattacaaaaggaaagagagatattttcaagaacaacataattagaaaagcagaagcagcagttaagtggtactgagataaatgatatagtttctcttcaagaacagtttctcattacccaccttctcctttttgctgatctatcgtaatcttgagaactcaggtaaggttgtgaatattatgcaccattcattaaccctaaaaataagagatttaaaataaatgtttcttctttctctgattcttgtgtaaccaattcatgggtttgatatgtttcttggttattgcttatcaacaaagagatttgatcattataaagtagattaataactcttaaacacacaaagtttctttattttttagttacatccctaattctagaccagaacatggatttgatctatttcttggttatgtattcttgatcaggaaaagggatttgatcatcaagattagccttctctctctctctctagatatctttcttgaatttagaaatctttatttaattatttggtgatgtcatatataggatcaatg

SEQ ID NO: 15936 - DNA, 3003 bp, Unknown; identical to SEQ ID NO: 15935
  misc_feature (1)..( 3003): 2750-1469P.txt file - cDNA_ID_1024961; gDNA_ID_2926258; Annot_ID_204630

SEQ ID NO: 15937 - DNA, 3000 bp, Unknown; identical to SEQ ID NO: 7610
  misc_feature (1)..( 3000): 2750-1469P.txt file - cDNA_ID_1025036; gDNA_ID_1621154; Annot_ID_56964

SEQ ID NO: 15938 - DNA, 1018 bp, Unknown
  misc_feature (1)..( 1018): 2750-1469P.txt file - cDNA_ID_1025094; gDNA_ID_1591353; Annot_ID_150865
ggttgttgttgcgagagtttgctttatccctgtgatttaatttataaacttcaaatctaccaatattttagtatgcaaaatgttagtgtgcaacatacaataatatgatggtacgaaccttttgggaagtggatggaaaaaatacagactavcaataaatttaggatggtacgaagttgtatgttcaattacatattactagtgaaattttttaggatttgaatggttacggcagttgaggcggacaaaaccgtcaacggatcagaccgttttttatttaccattcatcaattatagtccgcagtggtttggactaaaaaaaatagaagaaaaccgatgcggaccatctgccgaccgtttttacatacaaataaacttggtccgcagcggtttattgtccgccccaaaaatgagatgaactaaaccgcagacaaattagaccgctttgtccgctgcctccattcatagccctaatctatattaatgcatattaatccgcaatagtgaatgatgaattaaatacgggcttattcgatttcagtcagatttgcatcatactacacaactatttatattttagatttggttaaccaacttataaaaactttaaatactacacaaccatttgttttttagatttggttaaccaacttataaaaacttaatttatataatcttgttggtttttgttaattttcacatagatgtccaattgttcccacacatctcagttttgatatccatcttcttatcttcgttaaccacctaccaaatgtcacgtggacgctccattcggtttctatccggattcgcggtggattctcctcccaccccaatcatcggttcatttcagcatttggttatatccaaataattttaaccggtttataccgaaactactcgaaccagacaatctttgattggtagaaagagagccacgtaagattatctcttctaatggcaaattaaccaaaaacgtaactgaagatccaaagagagagagagaaaaaagacgatg

SEQ ID NO: 15939 - DNA, 3003 bp, Unknown
  misc_feature (1)..( 3003): 2750-1469P.txt file - cDNA_ID_1025117; gDNA_ID_1620689; Annot_ID_48539
agtaggttgtcacacacaatcttcccaccgtgagacgctgcaacggattaagataacaaatacaactcctcctgagctgcaacgaaattccattcatacctatactttatatagaccgttctagtcaccaagcacacaaattctattattcagcattgctcctcttttctaaaaggaactagcttctaggactttctcacaatatataaaccagatgaccaaaattcgaaaataactatagctatgatctttaactaaaagccacagatagtcaataaacggttaacagttagtatgggccagctcatttaaacgagaaacccgaagggttcaagcctcaaggcctttgacacattttttttgtgtgtgtttgctaagtccaaaaacaaataaaaagcgtctttgacaaaataaaattttacatatttttgaagttgatggatttttcatttttccatacatttggtatttggatataccaaaaacaactttaaaaaaccaatttaattaaggtggtcgttttcaaaatattattatacacatgtttgatgtctctgtgtcttttatattctttttcaattgcaaaataggagttcgggttgcatgattacaaatgaattatcagcaaatccatcttattcaatcgttttccaatcctaaaatgcaaatttctctggaagtttagaagattgtaacgtgaaaagaacagagttagattatgaatccggaccatccggtctattgacatattttgatcgccagttgttgtgcacttgactttttaaatattcagattattgcatgaacgatgaatcattcctttgatataattaaagaaactaatgattacataaaacaacacgaccaacggcgtcgcagagggacgcaattgacgaattaaagatatcataggtcggcataaaatgacaagaacaatctgataataccttaattttccacgtttcaatagaattttataaagaaaaacatagatcaatcgttagctatctaaaatttaggaaataacatgtgtggactatatttaaagtatagagagacctcaatccatttgtttatcaagtaaattggcgaaatttgttagtatttaacattcgatggaactgattccttatcctaaaatgacggattaaatttcagttttcgtgaaaacccaaacatagtggtcaggtggaaataccacaagttttcatatcatttatatatcaattgaacatttcttattctacatattggatcaataagattctgcactttcaaattagtgatgatcaaaagaacgctacattacacataagtaggtatcgtccctttaacaactcgtaaaaaggggacatctacaagactactagctagtaaaaactgagaaaataagctatatttgatcatgaaacaaagtgccatgcaagtactaatgtttgggctaaacttattagatcatggaaacaagtcccaccagaccacttagacatgataaattgataagcttttcttactctacccgatgaatcttgttcttgtcttacataaatttaccaaaggtttcttatactcgtaaactttatacattaattttttggtatagagtgaaagttaaaacaccgacacggtatggtataaaccaataatacgaatgttttatataatcatgtttgagaaacgcttatcttctttttattaagttcaataactttaaatatatagtcgctgtctcttttggattatttgcttgcgcagacttctttgtttgattattctctctgttgaaacaccttttcgtttagtgattattcttttaatgtgtactagtatagtagtatgcatgttattcatctgctgaatatatcgaaaaggttaaagaaacagttgacacaattatcgactacaataagacttgcgaccaagtttataataaaattataaaatgaatttaattagtaattaacgataattttagtagttaattaattttccctccaaatatgaacaggtagttaattccgttaatcatggtggcatgtcaagatctaacccatccccacacctttcatcacaaccagctgtcctcctgccatcatcttatttgttctttggctttttcttctttttttttttttttttttgcaactagatttatcatttttcaattttattaagccagccaataagattgaagaaaaaaaaacttaaccactgaaaataaattaaaaagaattcgacactgttttttgacaaacaaaacttgatatttacggttaaattcataacgtcaagtgaatatttgatcatttttgagacgaaaatagatatttaggtttagtagttccaaacgcaagttttattatgggattatttcatggcgttatagagtttggtgactttggtctttaatattaacctaatgaatttcagaaaatatttatctaacaacttgatagattacggagtgaggaattaatcaagtaaacaattacatattaaaataccatttgcagtcttttattaaaacctgttgaatctttagcaacttttctacatattgcccaatttttctgacttgtgtctttttaaatatctcttccgtgtcaaaaatagtttgtgtgttcttgattatacgtaaattcatctgggcatctcttaattttttctaatcgttaaccttaattacaacctcacgatctgtcttaatcgtgtcttaatcgtgtttttactttatcctctttttattgcaacattagagagttttgtgtgttgcagctttatcggtgtgtaagaaaaagacttataagcaagcagttgaagtggtggttgaggtttcggtttcatttccacgagatctctttggctttcttgttgagatctttccacaagaaagtttagttgttttcttcttcctgtgatttcttcgcctaattttttctggatttaaaaacacgagaagtcaaggtgaaatattatcgaagtctctgaatctgtttttgaatg

SEQ ID NO: 15940 - DNA, 3003 bp, Unknown; identical to SEQ ID NO: 15939
  misc_feature (1)..( 3003): 2750-1469P.txt file - cDNA_ID_1025117; gDNA_ID_1620689; Annot_ID_164710

SEQ ID NO: 15941 - DNA, 3003 bp, Unknown; identical to SEQ ID NO: 15939
  misc_feature (1)..( 3003): 2750-1469P.txt file - cDNA_ID_1025117; gDNA_ID_2926184; Annot_ID_140684

SEQ ID NO: 15942 - DNA, 3003 bp, Unknown; identical to SEQ ID NO: 15939
  misc_feature (1)..( 3003): 2750-1469P.txt file - cDNA_ID_1025117; gDNA_ID_2926184; Annot_ID_200464

SEQ ID NO: 15943 - DNA, 3003 bp, Unknown
  misc_feature (1)..( 3003): 2750-1469P.txt file - cDNA_ID_1025139; gDNA_ID_1621194; Annot_ID_57532
cattgaagaaaaacttaagaccaagctgaaggcctaaggcatatggctcattaatgtgtactaaatatatattatcggcccgagttacggctcgttaagaaaacatagaaatgatttaggcccaacaaataatgtatgttctatattataagcccatttattattacccagctaagtcggctttgaaaagagtataggcccatttaggtgtcacgctcattagggtttattgtaacctagaatcaaagctatataagccgtcttttccacaaatccatacatcggccaagcgagctcctcaatttttcttgtttacttgtttcctcatcttttagttattgttagaggttatcttaggatcgtagcctgtgatgtttgagattgtccgtaccatctgagtttctccttgacgattacctccactttctgaggctttagatctaagatcattagttttatttttacttcggcgatgatgatgaaacaagattaccatcaaactttgagaggtttttcgctcgttgatgtaaacttctttttataatctgagcctagtttgtttgtttgaaatcttatgtgttacatgttatatgaaatcgttttggtgataggaaaggcaacaaattagagtctctgattcacttatgtcaatagtggataaagcgctgtacgttgccgagatagatatggcgatattctggtacttggactagttttgatagttccatgtgcattcaaaagcccttacatgtttctctcaacttattcccattagtatatgtattttgatttggtaaaggcaacaaattagagtctctgattcacttattcaatagtggataaagcgctgtacgttgccaataattacttggtccaaagatctcccaatcggctttcagtcttattttagccgatatgatcgatgttcctaaattatagattttgttacgtgttttcatatagctgagctgaccatatcatgctatttaccaaatctttttgatcaattacctgacacattgacagacgatcgatttttagacactgaaatatgggccgaaattttgaaggagtaatgtctggtaaagcaatgtttgataatgttatggactgctgcgcttgtagcagttagatttcattgggttataagatcgaattcaatatcccctaaaaagattgatgtaaactgtagctttgtagcagatcataaattatttcataaaacagctttcgacgggaaagtttataattttgatataggaaccggataataattgtatcagtaattcttaatcgggctttggatagtcccttcctttttagtgaattcgaatcgaaatgcaaaaataatgaggctgacgcgcttaattttctcaaatatccaaaaatggccaatttcaaaaggggttacctacagatttgtggcgcgtggtaataactcgcttatagtgcaagtggttattttgttttctaatagttaattatttaccatacaaattgtcttctaatgtgggcttactaaatactttacggccttttcgttttcaggcctagggagttaggcccattttacatctttcttgtcggtttcatttttaatgttcgtatattcgagctcttttctcgtctgtacaatgaacaaagttttactgagaacaataaagatactcaaatcattcatagggtgatcaattcgtataaacttaaattttgttcgaggattaaagtataatttataatgcctattaaggttctttgataatgctatgagcccaattttacgatcgtcgtattctatgctaccatcccattggacaagtacgatgccatattagactatttagttcaattgtctaatttaattccgaatttaaaaggccttaaataaataaatatagtaaggtttgggcgaaggttacaaatcatttcactctttcagaacacaaaatagcccaaaacatgtttcgacgagcaaacttaaaatttgtttatgaaaaccgttacgcgtataagagtaaaaaattgtcgtaactgggctagaaagagctaacgatttacagatcttaggtgcaaaattacttttcgaattccttaaactacagagataagtcgagggagagttaaaacttagaagcaccaaaaaaaaataaaaaaaaaataaaaaaacttaaaagcatcacgcgctagttgacaaaaaaaaaaaaaaaaaaaacatcacgcgcttactttttcgaactatacaaaaatagctaatttcgaaagggggttaaacctacagatttgaggtgcgtgctgataactcgcatatagtgcgcgtggttattttattttcaaacggatacaaatatcgctagtgtgggctttcttaataccggtctttttattttttgggcttaggcccagtttacacgtgtcttatcattttatttttttatgtttttctatgcattaaaaaattccttatggcaaggacaataacaaaaaaaattcattaaagatcacatagtattgtaaatgtgagattaaacatgaaaattttattttccaaaattactgctttttaatgcataagattatacttttacggtactaatgtacaaatattttccttgaaaaatcatttactaaaaataattaaataaattcgtacgtcttttctttttggtcggaattagtacgtcttttctttcttttttggtggctatttattttgttcatattagatcaaacttaggagaaatataaatatatatagatatcaaataaaaagtaagaaacataaaaatattagaagtcaaaataaagaaaagaaaaaatacaacgcgaaggtttgattaccactcaaaaaacgagcagctgtttatcttccaacaaagcttcttcgtgcatcttcgctcttctcaactcgtcatcctctccctctgattctcttaagtcgccttgaaaaattaagacaaaacaacaacaaaagaacaagagaagctctaaaatccagcagctatg

SEQ ID NO: 15944 - DNA, 3003 bp, Unknown; identical to SEQ ID NO: 15943
  misc_feature (1)..( 3003): 2750-1469P.txt file - cDNA_ID_1025139; gDNA_ID_1621194; Annot_ID_174667

SEQ ID NO: 15945 - DNA, 3000 bp, Unknown; identical to SEQ ID NO: 11124
  misc_feature (1)..( 3000): 2750-1469P.txt file - cDNA_ID_1025215; gDNA_ID_2214479; Annot_ID_133213

SEQ ID NO: 15946 - DNA, 3003 bp, Unknown
  misc_feature (1)..( 3003): 2750-1469P.txt file - cDNA_ID_1025318; gDNA_ID_2926145; Annot_ID_197701
cggagccgtacaacgaccaatgttaagagcgaaacccccacaccactctcccgcactgtttcttagcactcctcccgctgtagccagacccggattaccccgtgatgccccaccagtattgagcttcagccacccatcgttaggcacaccccaaccaaccattacttccaccctaccgcctatccccgaacctcctttatgtttactagtagcggtagttacttccttagccgcatccttaataaacctcgttctatcccgacacttaccacgtttgtcaaacacgttatcacagcgccacttccaagcccaccaaatagccatcgtgaaaaccgtagaccatacactctcatatatttcccggtcatcacctaggttatcatgctaccattcgatcaacgactgtgcaaagaaggatctcctccgccgctggggaatgatacgatcccaaagtcctgccattgcgggacaatcccgaaggatgtgaataatcgtctcacttccccccttacagacttggcaaacatctgttatacacagatgccttctaaatcgctcagcatccgtcattagagcttgattcccgactaaccaaagaaacatttttgctctctccgtcgccaccaccccccatatgcgactaaaaagaacaacacaacatatacaacaaaacatagaatatcaacattaaagaatataaaaaatatcaacaaaacatatacaactcgcagtgtattatatatttaaaatcaaataaaataatatcataaatttattaatcatctttacaaaaaaagatttttagtttaactaaaatataaacttacccgcggtataccgcgggttaatatctagtgcaaacatatttagtaggagtatcataaaaaatctcaaacattataaataatacttaaaaattccttatgataccatatgagtatcacccatatacatgctattattgtgggtaaaaatagatagttttgcgcaagacctattaaattatgaatattttgattatttgttccataattattaaaatttgaacatttttgttgttagcgcaagattcaatccttgctttggggaaaaattaaagctatacgtaatttcactgatcgtttttggaaagaaacatggaaattaaaaggtgagctttttttttagttgctgcttctctattgatgagttcctagcgttatgtggaatctagaaactttgtgattttgtttataatctatgcttactcttttctcatgtttacgcttctagatgataaacaacgaacacgttggaataagtcctacaacatcttgtttgggatggagccaggaagttctgagatgaatctatcttatatgcccaactacaaaggactttgttgatttcatgtttgaaaagcaaaagcctatccaattcttcactccaacggttaattttaaccacattcgcggttctactatatatccttaatgaaatgtagattctaggaccttaaaattgtttttcctctgtggcagagaactttttctacatcgatgcccatgaaagtctcttgacttcttgcctcctactattttatgcatcctaaagcgaatctcgataaggttgtaatctctattatatccatcctaaacaccgtttgtgtattctccatgtgtttgattccttttgaatgttttggttcctagctgaaactccaatatgaggggttagagcattagttattcaacctaaaactccattatctctgactcaaagacctatcattgtctttagtgtgactccaaattatgaggctttctctctaccttgcaagatcaaacttgaaagaaatcttgataaaatcctaacttcaggaaaattgtgtatatacatatgtcgtttaatcgatactctacatgtttgcttgtttaacaacgatatgtgtgtacgttttgtgcatactattttcagcaaatagtttttttcatagagaaattaaattttagtaaatacacgaatattataattatgatctcacaaaaaagaaaaaaaaaaccgagatcttcaaataaatataaaacttacttacatagacatgcaaagccttcttgacatgcaaatggatgttgtccatgttcctaatagaggggatgaaaccaatccacaaaatttatttttactaaagtgatgaggacttatagccttagaaatatagtaattatgagtatccaaaacagaacagttggtcttcttaaataaaaaaaataaaaaaaataattagatgtttataataatatcttattataacagttggtcctcttaatttttttttaaaaagagataattaaatgtttataataatatttgtaaattaacgatgtcggctcactagatttacgatgattgacgtatttgtttgtaaattttatgaaattacgttcattaaattaaatatttaaatactaaagattaacagctaaagaaatcttaatgaaatattgccatctttgggttttaaattttctatttttcatatttcatatcggatatccgattaaaaatgaaatcagtaagtataccaaaatacaagcgttatatttattgggcctattcgggccattcaataattaattcacccacgcgcaaatgagttaatccgtaaaataggctttaaagcccattcaataaacccgtttcgcaggaaaaaagcccattaaataagtaatttccagaaatacccttttccaatcattgaaaattcaaacttgacctaaaaagtatctgaaaagccagcgccttttttcgttacgaatccgtgtttttgccagctttcaatccaacggctctcctttcttctcacaatccgtaatcatcgctccccactcattcattataaacaaaaacaaaaatccacggagccgataaaaaaaaaaaaaaactctctcagatctgagaatcatttcttcttcttcttcctcactttgttcatcatcttcttctccgatctaaacaacaatg

SEQ ID NO: 15947 - DNA, 3003 bp, Unknown; identical to SEQ ID NO: 15946
  misc_feature (1)..( 3003): 2750-1469P.txt file - cDNA_ID_1025318; gDNA_ID_2926145; Annot_ID_139082

SEQ ID NO: 15948 - DNA, 3003 bp, Unknown; identical to SEQ ID NO: 15946
  misc_feature (1)..( 3003): 2750-1469P.txt file - cDNA_ID_1025318; gDNA_ID_1620778; Annot_ID_167825

SEQ ID NO: 15949 - DNA, 3003 bp, Unknown
  misc_feature (1)..( 3003): 2750-1469P.txt file - cDNA_ID_1025340; gDNA_ID_2214558; Annot_ID_134837
ccggtatgcctagcgatatttttcaacgccattgacgacgctttatataccactggtaaatctctcctctgttttttcctattttccgatttcttctttgttaagaattctatgtatgatgaatttagctgagtgaagaagatgaattttagctgagtgaaagcttatgatagtctggtgaaatctttaatccatttaggttcaatctggtgcaagtttgtttttactgtattatgcgcctctttatttgtttgtgtggatgtaatgaagagtatggagctaaaaggatcaaattatggttttattctagcttaggctgacctgtctaaggttctcttgtctggtctgtacttttacattgacttttttcttgtgcttgatttgaatcagtgactgttcttttagttttgagtatgttaatgatcgcgaggaaagctttggcctcggcgcatactaaggcgtttcgtttggcaacaagggatgtacattgctttagttccatcttagtgtctcctcctctcgtgtcacttgacttgcctgaaaattggattccttactctgatcctccacctcctgtttcctttggtaatactctttgttgcattttcatggctatatatatatgttacaagaaaattctctaattgtatgagttgatttctgtgtgtatgcatttatacagagactgaacagaagactgtggtgatagatggtaatgttatcgctgaggaaatcagaacaaagattattagtgaagtggggaagatgaaaaaggctgttggaaaagtccctggtcttgctgttgttttggttggtgaacaaagagactcgcaaacttatgttcgcaacaaaattaaagcttgtgaagaaactggcattaaatctgttttggctgaattaccagaggattgtactgaaggacagattatcagtgtattgagaaaattcaatgaagacacgtctattcacggaattcttgtgcaacttcctttaccccaagtatgtttctcatttttttctttggacgttgtgatgggggatgttagtgttgttgatgtcaaagattagttctatgttaggaggtcaagtagttacgtttactttgttttcatacttgtatgtagaaattcttgattcatatattttcatcgaccatggactcatgcataacattttcccctttaaggtttccttttcgttggtaggtaaagcatttaatttacaggttatgcgatagagcatcttacttgtggagctctttttcaggagaacgttcttgtattttgttggtttcctttcctttttttttttttttctcatgagtccaatcatttaatggaagatatcttgtacagcatcttaatgaatcaaaaatcttgaatatggtgagattggagaaagatgttgatgggtttcatccattaaacgtggggaatcttgcaatgagagggagggaaccgctgtttgtatcttgcactcctaagggctgtgtggagttgttgataagaacgggtgttgaaatagcaggaaaaaatgctgtggtcataggcagaagcaacatcgttggactaccaatgtctttattattgcaggtattagttcttctttatagttcaagtggattcttatgcttaaacattttggtttgggaattaactatgcatttatgttttctgaaattctcggatagaggcatgacgcgacagtaagcacggtgcatgcgtttacaaaggatccagagcacattactaggaaggcggatatcgttatagcagcagcgggtatacctaatttagttcgtggaagttggcttaagcctggagcagttgtcattgatgttggaacaactccagtcgaggtaaaaacgaaactattttccttaactgatcaaaagtcttaatactttccaatgaaaaaagacttataccatagcttgaatccaatctgatatagaaaacgttaaactgaattagagcttgaaatgtttttccttcagattgttttcttgtttctgattagacattgaagcatgacgtgttataatattgcaggatagtagctgtgagtttggttaccgtcttgtcggggatgtatgttacgaggaagcgttaggtgttgcctcggctatcactcccgtaccgggaggagttggacctatgacgatcaccatgctactatgcaatactttggaggctgctaagcggatcttcctctgagtatggtatctctgtctattactaaatatattttgtaatgttagataggagactccatgctgttcgagttattaacgatctcttttgaattattgtataatagacctggcgattgtgatgccatggtttatcctaactcatcagcatctttagcatcaagttcaactaaacaagtattcatgttttcgtttcattggcttttagaagatgagaatccatttagttataatttaaaacttaaggtagttagatcactggtcctactagcagctaaagtaggaggaatgttgcgtcttacatcaacgatagaagatgactcaagcaagaggtgtcacatgaaggatcacgaaatatttgcttcctacgatattttacacgtcttctcaaagtttctcacctttacattgtttgctttggttcggtttagattctctcttttgctgcttttatcacttttgtaaaactcgaaaccggttttggttcggtttagattctctcttttgctgctttgatcacttttgtaaaactcgaaaccggtttttgattctttttttccttcgaaacttaaatgatatctttaaaccaaaacgaaccaaactaaatcacacaattacgatccggtttgaagatattttgttgtccgtaggattctgattccgagtctctagttccaaagagaagagaacatctgtgagagatctgagacgtctggaaatgtgaagaaaacaaaaaaaaaaaagatctgagagagagagtttcgaaattctcgtgttcgtaagcaaaaatg

SEQ ID NO: 15950 - DNA, 3003 bp, Unknown; identical to SEQ ID NO: 15949
  misc_feature (1)..( 3003): 2750-1469P.txt file - cDNA_ID_1025340; gDNA_ID_2214558; Annot_ID_185808

SEQ ID NO: 15951 - DNA, 937 bp, Unknown; identical to SEQ ID NO: 173
  misc_feature (1)..( 937): 2750-1469P.txt file - cDNA_ID_1025443; gDNA_ID_24186; Annot_ID_146430
  misc_feature (747)..(747): n is a, c, g, or t

SEQ ID NO: 15952 - DNA, 3003 bp, Unknown
  misc_feature (1)..( 3003): 2750-1469P.txt file - cDNA_ID_1025511; gDNA_ID_1620391; Annot_ID_155621
agaatcattgaaaaggatataattgattttaatatctaagtggtaaccacatcaataattataaactttattatagaaaaaaaaacgtagcgaatcatcgtcactctcagtcgttttgtggcatatacaataataagccaaaacacaatgaatctggacaatttgcgaggcattattcactagtttacaagacttgccgctcactgataaacattttggaccacaaagcaataaggcaaatagtgttttcggggaatacaaaaatatacaataattctacggacttgagacttagctataagtcaatattgaatattttatagaaatccgagactagtggagacatcgcatgaattaagacggtttatcagcattattcaagattgatttggtttgcatctaactaacatgattaaaaataagaaccattgattaattcattccttagagtatgggttcatgcttgcatataaatcactcgttcgatttatttcgtattacatctatttattctgtttaggtgcaaagccggtcttaatagaatattgtcttgagaacatacatatataaactgtcattgtttctatctccataaattttgaaatcgatcctaactagttgaataatccctctataccaagaaggcaagaaccgacatttgaattaatttaaccaattatcttccacaattactttctttttgttgtccattgttcttcatttacttttgggttgaatttatgaactcaacaagtcaacaacattttatgaatcatatcaattttgggtacacaatcgtgaagataataacggagaaagcttgctaaagacttaaaagtggtgtttgtgaagcagtctatatggcccactattaaacatatgtgatatcatgcatgagttttggttactcattcaaaagtatgctgaacaattctttttttgttttcaaaaattacgggtatgttagattattttgagttaactaaaaagcatagaagattaaaaaaatgttacattttttatataaaatattacaactacatctagtgccggcttagcacatgtgcttaaggtgctaggacatatggtctagggtccaaaaaaaaaaaaacatgatatgattacataatagcactggatctacaaaatgtttgagccggtcctgactacatcacataatttcatgctaatgtttttgtgtgttcttacgcctaacgtcttctctacacaaaacaaaaacatgatcatgatttagatttggctgaaaacagagttcttgatttgaatttgactggaaaaatgtttcttgatttggttgaaacatgttttcttattcgccttactctcggatacctcgtagctgagaagatatggacattgttctttatagaaataatgtaaagcacgacttccataccttcttgcaaggatctttgataagttcctatcctcattaacatgtgttgcaccttgtttttcgatcctctaagcttccaagtatatgactacaacaacgagattgaatatctaatgatacaaatggtatcttaactatatactttcttttcaattcttctggtaatgtgtatttaacaattaattttgctaatcttggatgtagctttgcacatggattgctacagattagagctgtcacagcgggctgtccatgtccattagcccagtccaataatgtccatttcgatattggacaaatagtgttcatgtccactaaggcacatgtccattaacgcccgtgcccattaatgtccatgtccaaatgggttgtccaataggcataacaaaaccaaattttaacacaatagtatttgcttcagcaagatgcttgaatgtttctttgtaaataatcgctctagagagcattagatgtgtagaattccattttgtgcttactaccaattcttttttctgtttaagtaactcatattagtgagctaagcttttgatatttgcagtttcatgaatacacggtgtcaaaggaccaagcttcatagttcatactatgcataatgcagacaatgaacactatatcaaacaatagtaacagaaatcgaaagagacccatgtcaaaatcactctcaataagcaaaaaacagtaacaaaaaatcatttcgaattgagtaatcaaaaacccagatcgaattgagtaaaaatgacgagaatttgcttacttgaactggattaggaatctcaggaggatccatgatgtgatggagttgagatgttgaaggaactcgccggagaaatcgccggaaagaagaaatcgccaaataagcgtcggggaaatgttttttccccaaatttatttttgcccgaacacttaaacctaatattttttgaccattgggccgcccatgtccatcacgtccagtccgctgatgcccatgtccgttaacgcccatgtccattaatgcctgcttcataatgggcttgtccatgcccggtccattaggcgttggacacgggccactcgtccattttgataactctactacagatcaatcgttcaaagaaataataaaatctcagtagacctatgtttggaagaaacaagaaaatttcatagatccgtataatggatccatgattcaagattagcataattaaattcgaaagtaaattgaccttataactaaagtaaagtgaattaggtggttacagttttttccaatgacattgtaacataatatcttacaaaagccaatattactatttgaaaggtacttccgtactagtaatgtagggatttgagacgtgattatttatccttaatattctaattagattgaaggtttatatattaagttttccatagttaaaagtcaatcttgaaacaaaaagatagtttgagggttctcttgtaaatttcctaaaagtaaaacattaataccctaaaaatcgaaaaatcagaaaaagcttcggagcaagaaaaatcagagaaaattcaaaaacccttcacttgcctcactgttcttcgtcatg

SEQ ID NO: 15953 - DNA, 3000 bp, Unknown
  misc_feature (1)..( 3000): 2750-1469P.txt file - cDNA_ID_1025540; gDNA_ID_2684239; Annot_ID_192513
gcctcattttatgtcatgattattatctttaaaccacatttgaatcactctcattagaatcagtttgattaatgaagcgtttaaagctaatcttacgcagaacttacttgacaagcactggagtgaattgcagttttgagatctcacgtctctcacgaatcgggaaaatcaatgaagcacgaaagtttttcgattcgttacagtttaaagcaatcggttcatggaactcaattgtatctgggtatttctcaaacgggttaccgaaagaagcacgccaactgttcgacgaaatgtctgagagaaatgtagtttcctggaacgggttggtttcagggtatattaagaataggatgattgtagaagctaggaatgtgtttgagctaatgcctgagaggaatgttgtgtcgtggaccgcgatggttaaaggttacatgcaagaaggtatggttggtgaagcggagtcgctgttttggagaatgcctgagaggaatgaggtttcttggactgtgatgtttggtggtttgattgatgatggacgtattgataaagcaaggaagttgtatgatatgatgcctgttaaagatgttgtagcgagtactaatatgattggtgggttgtgtagagaaggaagagttgatgaggcaaggttgatttttgatgagatgagggagaggaatgttgttacttggactacgatgattactggatacaggcagaataatcgagtggatgttgctaggaagttgtttgaagtgatgccggagaagactgaagtttcgtggacttctatgcttttggggtatactttgagtgggagaattgaggatgctgaggagttttttgaggtgatgccgatgaagccggttattgcgtgtaatgctatgattgttgggtttggtgaggtaggagagatatcgaaagctaggagggtttttgatctaatggaggatagggataatgcgacttggcgaggaatgattaaagcttatgaaagaaaaggttttgaattggaggctcttgatttgtttgctcaaatgcagaaacaaggagttagaccgagttttccgtctttgatcagtattctttcggtttgtgccactttagcaagtctacaatatggtagacaggtccatgctcatttggtgagatgtcagtttgatgatgatgtctatgttgcctctgttttgatgaccatgtatgtcaaatgtggtgagcttgtaaaagcaaagctagtattcgacaggttttcctcaaaggacattatcatgtggaattcaatcatttctggctatgcgtcgcatggtctaggagaggaagctcttaagatttttcacgagatgccatcatctggtaccatgccaaacaaagtgaccttaattgcaattctgacagcatgtagctatgctggaaaactcgaggaagggcttgagatatttgaatcaatggaatcaaagttttgcgtgactccaacggttgagcattattcttgcacggtggatatgcttgggcgtgcaggacaggtagataaggcaatggagttgatcgaaagtatgactattaagccagatgctacagtttggggtgctctgttaggagcgtgtaaaactcactcacgattggatttagctgaagttgctgcaaagaaacttttcgagaatgaaccagataacgctggtacatacgttttgctatcgagcataaatgcatctcgatccaagtggggggatgttgcagtagtaagaaaaaacatgaggacaaacaatgtaagtaaattccctggttgtagttggattgaggtagggaagaaagtgcacatgttcactcgcggaggtatcaaaaaccatcccgagcaagcgatgatactaatgatgttggagaaaacagatggattattaagagaagctggttatagtcctgattgcagccatgtcttacacgatgtagacgaggaagagaaagttgatagtttaagccgtcacagtgaaagactcgcggtagcttatggactcttaaagctacccgaaggagtacctattcgagtcatgaagaaccttagagtctgtggagattgtcatgccgccattaaactcatttctaaagtcacagaaagagagatcattctaagagatgcaaacagattccatcatttcaacaatggagagtgttcttgtagagactactggtgagaatggtctatttctattggtttatttcggttcaacttctattggtttagtttgagatgtctgtattattatattgttttataagaagagaatgtttcacacatatcaatgcaccactcaattatcatcttaacattattcgttttaataattgaatcattgatgatgatttgttgttattatctctttgagaagtgacctaccacttttgttatatggaataaaagaatacaaaacatatgtacctcttgtcttaatgtcttgttttgtgatttatcaaacttccgtccaaagtggaacatgattaaagttaggtttcaattgattggataaggacaaagactggttgttgtgtcacatttcctctctctctcagattttacaggcaaatcgatttcactcgaagactggttgttgtgtaattgtgttcgtcgtctcaggttttcaatatctgtctctttgaggtaaaagtttcgatttttacgtttcttgatcatcttattgaactgggtttgatctaaagttaggtttttttagaatttttaatttttgatctttttatcgtctgggttcgtacggaaatagaaaaaagctgcaaactttgttcttaatgttgataaagttattaactttatgttaaacttgttgagatctggattcgtttttgtcatttgagtatagagtgttgtctgattgttctaaatctggctggtgttttagattgttaataggatagagtcactgtgacactgtcagtgtcctgtaatctaatatatctgacagaaacagctttttgttttcagttgtattgatg

SEQ ID NO: 15954 - DNA, 3000 bp, Unknown; identical to SEQ ID NO: 4118
  misc_feature (1)..( 3000): 2750-1469P.txt file - cDNA_ID_1025683; gDNA_ID_2926149; Annot_ID_197929

SEQ ID NO: 15955 - DNA, 3000 bp, Unknown; identical to SEQ ID NO: 4118
  misc_feature (1)..( 3000): 2750-1469P.txt file - cDNA_ID_1025683; gDNA_ID_2926149; Annot_ID_139226

SEQ ID NO: 15956 - DNA, 3000 bp, Unknown; identical to SEQ ID NO: 4118
  misc_feature (1)..( 3000): 2750-1469P.txt file - cDNA_ID_1025683; gDNA_ID_1620685; Annot_ID_48435

SEQ ID NO: 15957 - DNA, 3000 bp, Unknown; identical to SEQ ID NO: 4118
  misc_feature (1)..( 3000): 2750-1469P.txt file - cDNA_ID_1025683; gDNA_ID_1620685; Annot_ID_164574

SEQ ID NO: 15958 - DNA, 3003 bp, Unknown
  misc_feature (1)..( 3003): 2750-1469P.txt file - cDNA_ID_1025879; gDNA_ID_2926227; Annot_ID_203547
tcttgttgcttctctggtgattccatttgctctattcatcttcaccatttacagatacgttttgaaaaagattcgtctcgcccgccagtctgatagggctcgacgatcagctcatcaggaggtttgttcttgtttttctttttttttcttattggaccaaatgaaattagttggtggtgttggattaagatgatgatgatgagtttggacctccctccccttcatgtttcagatggagctcatttctactgtccgcaatccatttgttgtcgagtacaaagattcatgggttgaaaaggtctctccttctcatctccttttgctcattcttcttctgcctccttactctactcaatagtcaatactcatcatctctcttgtttcccagggttgctatgtgtgcattgttattggatattgccaaggcggggacatgtaaattggtttttgcccattttcaactacagacaagttgtgtttagtttgaagaaattggctcttattttcattttgaatattgcaggacagataccatcaaaagagcatgtggtgttcattttcctgaggaggtttgtctcactctcacccatcccttcacttcttacaatctatcactggatctaatatttgaacaaataactactaaatgatgcagaaattatgccaatggcttgtccaactattaatggccctcgattatcttcactccaaccatattcttcaccgcgatgtcaaggtaaacatgtaacctcactatcaattttcagaattttgttcctttttatgttccaagcatctaaattaacatctaaatgtcttttcagtgttctaacatattcttgacaaaagagcaagacatacggcttggtatgttttgtagattcatgtatctttaagcctttttgtcagttactaacgcatccacaatttcggtctcaggtgactttggactcgctaagattctaacttctgatgaccttacatcctctgtaagttctgtacaatgaaactaatttaaattttgtgacactgttattataagtcagtgtgtttataggttgttggaactccaagctacatgtgtcctgagcttcttgctgacataccttacggatcaaagtcagacatttggtcgttgggtataacaacaatacattcttctttgatattttactcctacacttgttcaccttgtgactaccgtttcatggatcatcatggaaaacaggatgctgcatgtatgaaatggctgctcataaacctcctttcaaagcttccgtaagtatccttacagttggtttttgattttggcattaaaacacataatgtaaaatgtgaaatcttgattgcaggatgtgcagacactgatcaccaaaatacacaagttgataatggatcctattcccgccatgtattccggctcattgtaagcctgaaatcatttcctctgttaacaacattaaccggcgttgctgtaccaacctcttttcctcccttatctgcagccgaggccttattaaaagcatgttgaggaaaaatcctgaactcaggccaagcgtatggttcctataatgcttatttgcttttgatgataagtaatccgtttgtggttgaactaagcattgttgttaactcgctgcaggctaacgagctgcttaaccatcctcatcttcagccttacatcagtatggtttatatgaagctagagagccccagaagaagcacttttccactccaattttctgagagggacgctacattgaaggaaagaaggcgttcatcattcagcaacgacaggagattgaatccgagtgtctctgatacagaagcaggttctgtttcttcttcaggaaaagcatctcctacaccaatgtttaatggaagaaaagtgtcagaagtaactgtgggagtcgtcagagaagaaattgttcctcaacggcaagaggaagccaagaagcaatcaggtgcagccagaacaccaagagtggctgggacctcagctaaagcaagcacgcagcgtactgtttttaaacatgaactagtaaggaagaaaaacttaaagctttatgtatttgagatacaatcagggagtgatctgactatatatgttctgtgctgtgtacagatgaaggtatcgaatcctacagagaggagaaggagagtatctctgccgttggtcgtggaaaatccttacacttatgaatcagatattacagctctttgttccctaaattcaccggatgtttctgtaaacactccaagattcgacaagatcgctgaattccctgaagatatcttccaaaaccaaaacagagagacagcgtcaagaagagaagtagctaggcactctttttcttctcctccttgtccgcctcatggtgaggacaattccaacggttcgatcacaaaggacaagtgtactgtacagaaaaggtcagtttcggaggtaaaacagagaaggttcgacacgtcatcgtatcagcagcgtgcggaggctctggagggactgctggagttcagtgcaaagcttttgcagcaggaacggtacgatgagctcggggttctgcttaaaccctttggagccgagagggtgtcttcgagggagacggccatctggttgaccaagagcttcaaagaagcttccgtgtagatgaagcaaccataacaaacgctctatctcttcttctcttggcttgcttttgtcctgtgtggtttgtatataaataaaaacgacgacgcattcggttctcattgcttaaatgtttatccgaaagcttgcagtttgggccttgttgggccaattcgttagtggatttgtttggacattttgaatttggtggaaaatgtttgggtcgtttcgtagaggttgagaaaaaagcggggttcttcttatcaataaacaaactttgtgagagaatttagcgaagaacgaggaaatcgggagaaagtgatactatcactgtgatagtgaaaggagctttgcttgtgaagagagaagaaatg

SEQ ID NO: 15959 - DNA, 3003 bp, Unknown; identical to SEQ ID NO: 15958
  misc_feature (1)..( 3003): 2750-1469P.txt file - cDNA_ID_1025879; gDNA_ID_2926246; Annot_ID_204216

SEQ ID NO: 15960 - DNA, 3000 bp, Unknown; identical to SEQ ID NO: 5232
  misc_feature (1)..( 3000): 2750-1469P.txt file - cDNA_ID_1025895; gDNA_ID_1620774; Annot_ID_167635

SEQ ID NO: 15961 - DNA, 3003 bp, Unknown
  misc_feature (1)..( 3003): 2750-1469P.txt file - cDNA_ID_1025923; gDNA_ID_2213640; Annot_ID_132258
aaggggactcaaatatgtatcccaacggaatccaagaaagataggcatgcaatgcagagagtgtagcacgtataagctcttgtctttgggaagctgagaggacatataggcataactcgtgaatgagttgaaactcgctgcatataagaaagcagtataaatcagtaaagcagttcgtttttatgtattgattctaataaagtaaacttcttgaaaagtctaacttgcctgtttagagactgtttcagttcttttatcttttgctgagtcatctctccttttgagaaatcaaagacctcttcacttaggagctaaacaagaagaaatgttatttaagtacaccatgaacttaattaatgcaaaggcacttaagactgaacttactttcaaaatagccatgcaattctcacagatagtttcactagtcttagcagctataactaaatcaggaataaagcttttccactttgccggccactcctgtttcacgatctgtacacagataacattatatgttattcccaaaaactaaacaaacaatttcaataaattggcaggagcaaaatctttcaggcgaaattggctttagcaaagccttaccagagaaaacatcagaagtaagtagatagtgaacacaaaagaaggactcaatacaaatatgtattattagcaggaaaccccgaagatacctgaaccaggatgatatttaacttgttgacataaagcctttccgttctgaaagatgcttcatcccttgacagctacacagcaaattcagtatcaaaacgattcagttaacttaacatcttagttctaaccaaaaaacaacctaatggctctccaaataatatacctgcacaatgacatcagagatgtaatttttcattccatcacgttgttcaacgggtaatgcattccacctatattttataacaccttccagcacctgaaattatacgatggaagacaactaaatagaatgctaatgctgtcttctttggaatggatgtagtgggacattatatataacaacgggaatgctaaataaagagaagagcaggtataagagaacactaaaacactgacctgaagggcaaaaaatttggtatgcgtactactggtgttctgtagaatgtgaacaacttgaagccaagtatcaggattagctttcaaatcccgcaagatattatccgcagaagctctctgcaaggtgttttcaaacattcttatctcattgaaagcacacatatgcaaacatcgtttttacacacaaattacattgtttagtgtttttccagataacaagaacagccacaaacaatcgaaacctatctctaacccaggaaaaagaattaagcaaaactcatccaattcgtatcgcaaatactaaaccctcgcctaacccccaaatcgatagaacgcattaacagtgaataagagaccgcttaatgtggtggcgatactcgttcatcgttaaaattctcagagaaattatgataaacaacgggactcacttcttccttagatccggtagagtaaaaggcctcaacagtggcatcgagtaaaacgacgtcaatcggctgactcaagtctcttaacttctcggcagccatggcggagaggatgcgcaaattctagaagaagagactcgatacgagagtgaaatcaatggagggagacaaagttcgagagagagggagagagtttttttttgggtagagcggtacggaggagaggcagtttaaatattgagagaggtttttgaaagacagcttaagattgacgcaggcgacgctgagaaaaaggcctgacttctaattttgttttctcttctttttttttcgttgaccgcctcagggtttgaatttgtatactctacagtctacgctactcaaatatttactaggattgtttattttattcaaagatttactttaaggaaagattattataaaatgaaatgcaatcatatagattaatcaaatttccaacactttttgaggttttacaaaaaaaaacattattaagttttatttttaaataagctatattcaatcactaagttgtagaactttattatttttatttaatgatgttcattattagattttgtatgatattattatataaaataaaattgagtgttttttttttttttggatttatgtatttatgtcatattattatgtttgcattaattaattaatagcattttccccaaatattaactttactttctttctttttttgaacacggaactttactaagtagtagtattcatttgatcccatgaaatctaagctaaggagtaagcttggaaaaaccttaacaataggagatctatcattatattgaaatcgagtttaccattcgtgaagatatgattataatacgttgtgtactcttagcttgtaaaatggctaatgggatttactaagagaggaagagaagtgaactgttaatgttatgatcatcaaatgctttgaggaaagtgggaaaaacagatttagctatgaagctaatgcatagcaaattggaatgcgtagtgttaaaacttaaaaggcctttttttttttttttttgggttttataatgcgtagtgatttccttttttttgataacatatacaaaatgaatttcctttttttatttttgaacaactccttatgaataaatacacatcatctcttcttattcactgagaaatcaaaattacaaccctatgaatgtatgatctaatgctttgaggaaagtgggaaaagcagatttaaatcttgtatttcttgatataccaaatcatagtagaaaatgtatattcatatgcttctctgccacatcatcatggggaaggccatagcgagcaagtggcccaggtaaacacaaagcgtagcccaacaaatacaaaacgatgcgtttagcaatcgtcatcatgtcccttgttatttcgacaacgaaatcaaatcccgattccgagagagagagagcgatagcggaagacgatg

SEQ ID NO: 15962 - DNA, 3003 bp, Unknown; identical to SEQ ID NO: 15961
  misc_feature (1)..( 3003): 2750-1469P.txt file - cDNA_ID_1025923; gDNA_ID_2213640; Annot_ID_181206

SEQ ID NO: 15963 - DNA, 3000 bp, Unknown; identical to SEQ ID NO: 13101
  misc_feature (1)..( 3000): 2750-1469P.txt file - cDNA_ID_1025971; gDNA_ID_2214598; Annot_ID_135502

SEQ ID NO: 15964 - DNA, 209 bp, Unknown; identical to SEQ ID NO: 369
  misc_feature (1)..( 209): 2750-1469P.txt file - cDNA_ID_1025971; gDNA_ID_1564417; Annot_ID_149420

SEQ ID NO: 15965 - DNA, 3003 bp, Unknown
  misc_feature (1)..( 3003): 2750-1469P.txt file - cDNA_ID_1026104; gDNA_ID_1620621; Annot_ID_47037
aactactgcattttccttaacaccactctcaattcagctttgacgcagacaatttgtggcaatatgaaggttggtttcactttattagtatctcctgtacaaaagaaaaatgtgaaactaatctgccaaggagagactttgaacattatatcatcgttgcaggatctattcacggttggactaggctggatgctctttggaggactcccattcgacctggtaattttcttcaacattcctattattccattgaacctaaaatcggcatctacgtttgctacatctcactacctttcttttttggttcatttacacagatgaatgtgattggacagctttttggtttcttcgggtcaggtttatatgcatattataagatcatcgggaggtaacaagtccaaaacaaagaaaagccaaagaaaacatgagtggcctagtgatgataaaggctcattagtttaaggaaaagttgttgactagtagtgttcaagtggagatagagtgttgagcttttggttttggaggtgactttagagtagtattaataatgaaaggcctaattttttgaacttgcgtcttgttcttcttcagttttcaacaaggcgaaagattagactatggacaaaactgattttctatttttttgagatctactgactctaatttatacaactgcttcttttcattgtatatatgtagtattattatacacacttgagaaaaggatgactgtaattatacaactgcttcttttaaagcgttcaatgatgatttggtactaggcattcttgcaaagagctcggtgaaagcaaaaataattacttcaacggttaaaattgcaagtactagaaaagaaaaaaagagcacacccagtgggactcgaacccacaatcgcttgattagaagtcaagcgccttatccattaggccatgggtgcttgttgctacatccttctgagttgttttatatatcatataattgtatttgtaatcgtgttccataccttcttcaaaagcaaaacattctctcgccggtaaaaaagcagagatcccttaaccatgatttccttcaaagtatattccccttcctcatcctcttcccatgctcatggtatcaatcttccactctgacccaactcaagctctgatttctcctactccgtcgccaaaaatcttggaagtagatgtcttagcccgggaaaatcaaattttctcaataatcaatctatggacgttccaccacgccgctctttggctgcgtctctctcgcctctccggctaatcgatggactccctcgtcggaggagtttcaattataatcagatgcctgaagagcccatcaaactcactgttctcaagcttgatggatcttcctttggtacccattactcatctcctacttgcttttaccattaaattttatatgttaactaagaatgtttgctcaaaagaactaaaagttattgctttacaacgaattctagttttttctgtgttgtttcgtttgaggttgtccagagaaatttgactggtttctgaatttgtgatttagtacaattccctttaagcgtaatttggatttgtaggtattcaagtgttgaagacagcgacagtaggggagctcaagatggcagtagaagctgcgttttctcacttgcccatctcaggccctggcaagatctcatggtaccatctctgattctttgacttgagttattcttataatgattccgattttgtgtctatattaggataagtaactgctaaatgattcttgatgatcctatttttaccctgtgattataaaggccgcatgtttggggacaattctgcttatcttatgaagataaaagattgattaatgagtctgagtacctcactgaatttggcattaaagacggcgatcaggttacccttttactctttctttatcacttgaatacatcaaagagtctatgcttatgatattatttcatctttacatgtgatgtcgtagaacgatgcatttgggtagctagagtctctaacctggattatgtagattgttatagtccagtttagttttgacaacatagtgctttgttttgatgctctataatgtgttttatctgccatcattcagcttcggttcatccgccatatctcaaactactgcatgttaatggtgaagcataagagcaagacaccccgtgtttcttctttcaaacaactcaaactgtaagaacttttggtgttaaaatgtttttagcatttcattatccggaatctccatagtaatacatgtttttggaccaatcaggttctcaaccacaccggaaacccggaaaaagaacgtaataagggaagttgaagaagacggtgttgttgactccatccctcggagccaaccaagctttctagcaactgtattgggaggtttgctctcttacaagtcgacgccaagtcaacgaggtactaaatacagaaacgtgactgcaagtagagtttttaacaaactcattgcaaggtttcgtttcaagtgtaattccgagaaggatgtgtggaacagaaaaaaactcatatccgaaacctaaaaaaaagcactccttttctatcatttgattcttgtagagattttgatttcctaatcttggtgtttatatacaaacttggatgttgtgtgtgtgcaaaatgaataaggcattgtgtatttacgtttgtagtggatataattgcaaccttaccgtcttagccattttaaccttatctggtacagcgttcgcgtttgcgtttgcgtttgcgtttgtgtttgcgtttgtggccaaaacgcaatcatttactttttaattgattttccgctccattgattttaatctgacgaccacagcctttagcttatttgtgtggcgaagagaagagataacattcctaagcaaatctcttctctctcccattcgtctccaaagagattacagttttgagcatttctcatctctcgaagctcttctctgtgtgtgtggcgatg

SEQ ID NO: 15966 - DNA, 3003 bp, Unknown; identical to SEQ ID NO: 15965
  misc_feature (1)..( 3003): 2750-1469P.txt file - cDNA_ID_1026104; gDNA_ID_1620621; Annot_ID_162312

SEQ ID NO: 15967 - DNA, 3000 bp, Unknown
  misc_feature (1)..( 3000): 2750-1469P.txt file - cDNA_ID_1026104; gDNA_ID_2926201; Annot_ID_141536
tactgcattttccttaacaccactctcaattcagctttgacgcagacaatttgtggcaatatgaaggttggtttcactttattagtatctcctgtacaaaagaaaaatgtgaaactaatctgccaaggagagactttgaacattatatcatcgttgcaggatctattcacggttggactaggctggatgctctttggaggactcccattcgacctggtaattttcttcaacattcctattattccattgaacctaaaatcggcatctacgtttgctacatctcactacctttcttttttggttcatttacacagatgaatgtgattggacagctttttggtttcttcgggtcaggtttatatgcatattataagatcatcgggaggtaacaagtccaaaacaaagaaaagccaaagaaaacatgagtggcctagtgatgataaaggctcattagtttaaggaaaagttgttgactagtagtgttcaagtggagatagagtgttgagcttttggttttggaggtgactttagagtagtattaataatgaaaggcctaattttttgaacttgcgtcttgttcttcttcagttttcaacaaggcgaaagattagactatggacaaaactgattttctatttttttgagatctactgactctaatttatacaactgcttcttttcattgtatatatgtagtattattatacacacttgagaaaaggatgactgtaattatacaactgcttcttttaaagcgttcaatgatgatttggtactaggcattcttgcaaagagctcggtgaaagcaaaaataattacttcaacggttaaaattgcaagtactagaaaagaaaaaaagagcacacccagtgggactcgaacccacaatcgcttgattagaagtcaagcgccttatccattaggccatgggtgcttgttgctacatccttctgagttgttttatatatcatataattgtatttgtaatcgtgttccataccttcttcaaaagcaaaacattctctcgccggtaaaaaagcagagatcccttaaccatgatttccttcaaagtatattccccttcctcatcctcttcccatgctcatggtatcaatcttccactctgacccaactcaagctctgatttctcctactccgtcgccaaaaatcttggaagtagatgtcttagcccgggaaaatcaaattttctcaataatcaatctatggacgttccaccacgccgctctttggctgcgtctctctcgcctctccggctaatcgatggactccctcgtcggaggagtttcaattataatcagatgcctgaagagcccatcaaactcactgttctcaagcttgatggatcttcctttggtacccattactcatctcctacttgcttttaccattaaattttatatgttaactaagaatgtttgctcaaaagaactaaaagttattgctttacaacgaattctagttttttctgtgttgtttcgtttgaggttgtccagagaaatttgactggtttctgaatttgtgatttagtacaattccctttaagcgtaatttggatttgtaggtattcaagtgttgaagacagcgacagtaggggagctcaagatggcagtagaagctgcgttttctcacttgcccatctcaggccctggcaagatctcatggtaccatctctgattctttgacttgagttattcttataatgattccgattttgtgtctatattaggataagtaactgctaaatgattcttgatgatcctatttttaccctgtgattataaaggccgcatgtttggggacaattctgcttatcttatgaagataaaagattgattaatgagtctgagtacctcactgaatttggcattaaagacggcgatcaggttacccttttactctttctttatcacttgaatacatcaaagagtctatgcttatgatattatttcatctttacatgtgatgtcgtagaacgatgcatttgggtagctagagtctctaacctggattatgtagattgttatagtccagtttagttttgacaacatagtgctttgttttgatgctctataatgtgttttatctgccatcattcagcttcggttcatccgccatatctcaaactactgcatgttaatggtgaagcataagagcaagacaccccgtgtttcttctttcaaacaactcaaactgtaagaacttttggtgttaaaatgtttttagcatttcattatccggaatctccatagtaatacatgtttttggaccaatcaggttctcaaccacaccggaaacccggaaaaagaacgtaataagggaagttgaagaagacggtgttgttgactccatccctcggagccaaccaagctttctagcaactgtattgggaggtttgctctcttacaagtcgacgccaagtcaacgaggtactaaatacagaaacgtgactgcaagtagagtttttaacaaactcattgcaaggtttcgtttcaagtgtaattccgagaaggatgtgtggaacagaaaaaaactcatatccgaaacctaaaaaaaagcactccttttctatcatttgattcttgtagagattttgatttcctaatcttggtgtttatatacaaacttggatgttgtgtgtgtgcaaaatgaataaggcattgtgtatttacgtttgtagtggatataattgcaaccttaccgtcttagccattttaaccttatctggtacagcgttcgcgtttgcgtttgcgtttgcgtttgtgtttgcgtttgtggccaaaacgcaatcatttactttttaattgattttccgctccattgattttaatctgacgaccacagcctttagcttatttgtgtggcgaagagaagagataacattcctaagcaaatctcttctctctcccattcgtctccaaagagattacagttttgagcatttctcatctctcgaagctcttctctgtgtgtgtggcgatg

SEQ ID NO: 15968 - DNA, 3000 bp, Unknown; identical to SEQ ID NO: 15967
  misc_feature (1)..( 3000): 2750-1469P.txt file - cDNA_ID_1026104; gDNA_ID_2926201; Annot_ID_201881

SEQ ID NO: 15969 - DNA, 334 bp, Unknown; identical to SEQ ID NO: 389
  misc_feature (1)..( 334): 2750-1469P.txt file - cDNA_ID_1026239; gDNA_ID_1590641; Annot_ID_149882

SEQ ID NO: 15970 - DNA, 3000 bp, Unknown; identical to SEQ ID NO: 3799
  misc_feature (1)..( 3000): 2750-1469P.txt file - cDNA_ID_1026502; gDNA_ID_1620665; Annot_ID_163896

SEQ ID NO: 15971 - DNA, 3000 bp, Unknown; identical to SEQ ID NO: 3799
  misc_feature (1)..( 3000): 2750-1469P.txt file - cDNA_ID_1026502; gDNA_ID_2926196; Annot_ID_201481

SEQ ID NO: 15972 - DNA, 746 bp, Unknown; identical to SEQ ID NO: 116
  misc_feature (1)..( 746): 2750-1469P.txt file - cDNA_ID_1026618; gDNA_ID_2804; Annot_ID_145943

SEQ ID NO: 15973 - DNA, 3003 bp, Unknown
  misc_feature (1)..( 3003): 2750-1469P.txt file - cDNA_ID_1026625; gDNA_ID_2936583; Annot_ID_194993
tcacaatagcctggtctgtcgaatgaaaccatatatacacctagttcctctactaaatcctataaaatgtaaatgacacaatgttagaggtcacaataaaaaaaaaacgaaaacgtcattctcaaataactttctcactaaacttctctatagtacaaggaattctaacaacactacttgctagaaattaacataccactaattagataaaaggtttaaaacatagtgatcaaagtataattacataacaactatctatcaaatcaaccatagaagcatacatgcataatcttgagtgaataaaacttaccggagaaagcagcgtggcgaagacggcatcgtgtctacaacaatcggatccatggatgaagacgattttgcggttagctttctctcttggaagtccatgctctttgtaagccaaatacctcccatcttgaagctttatccgcggtgctgtaatcggtggaccacttgaggagccacatagcttcggctgaggaggtttcaacttcgactgataagtcaacgccacgattatcccaacaatgacaatcacaacagaaggaaaaagaaaactctttcgagaagatggctttagtgagctcttccttgatgaatcacttgccatttcacgaacggtaagatgatcggagaggcacggcggcaatggcgacgattcttgaaaaagagagccaactgttcaagaactacaacatatcgtgtgtttttttttgtgataagtcttctcagccacgtcaatatcagggatgcattaaattcaaatacgttacagtgatttgatacttcaattgtgtggttgccaaaaaaaggaaaagaaaaagatacatgttaagctatcaagttaaaatgctacactttggctaaaaactattccaaatgtcttagattccagctttcttggttatcttcaatgaccactttggtgattgccacttggttgtagcacaagcatgtgctgcctcacttagataatgtgattaggcctagtttagattgtaccaaaaactttaattaatgatgtattagacactaaggcaaatctagtagacactcaagtagatgaattcttcattctcttaattaaaagactaacatagaatataaaacaaaaagaccaaacacatgttgctaaaagatcaaattaaagaacatgataagcttgacaagacaattgatgaaggcttggtcgattaaattacacgtgtaaccaaataaaaataaactacgatgctgacaaatgtaactagtacataactctattgtatccgtgtatttttttgggattttttttcagagtttttggaagctacaaatgatcaaatacaaactctagatgctcttacatcggaggttaagagcgactttacaatgtcatcaactacacctttagtgtagtggaagaagtggccacttctcggaacctcatgatagtgaacccatggaagctgatgagcaaggtaacgctgcagcttcgcaggtactaacatgtcctcatctccttgccacaaatgcacagagccttccttattcaaaaacggattctcgaggtctaaaggaccaaattcccagttcccaaaaccaacgatcatgtcacggttaatactctcatgtattccttgctgccttacctctgcccaatgtggtttcctcgaagaaccaagcttcgaaatgatatctttatccggctgtgccaagagactgtgatctcggtttgcaatactcgaaccagggaaccatttttgtgtgttccaccaatagataagccaaggagtatagtgagcaacacgaactgccaattgatctctcttttgttgaaagttaaaaccttcagtggaaacgttcaaaggtaagttcttccaataatagttaaccactggagcaactagtgttactccggctaacctatgaggaatgtatttaagacatccccatgctgcttgtcctcccatcgagtacccgagcacataaaatttcgatcctagactcaactgatcagctagctcttcaatatccgaaaccaagcttcgcggtgtacgacttggatgcggatcactctcacaatagcccggtctgtcgaatgaaaccatatatacacctagttcctctactaaatcctataaaatgtattgacacactgttagaggtcccaataaaaaaccgaaaacgtcactctcaaataactttctcactaaacttctctatactacaaggatttttaacaacactacttgctacaaattaacatgccactaactaaataaatgattaaaacatagtgatcaaagtattattacataacaactatctatcaaatcaacgatagaagcatatagacatgcataatcttgattgtgtaaaacttaccggagaaagcagagtggcgaaaacggcatcgtgtctacaacaatcggatccatggatgaagacgattttgcggttagctttctctcttggaagtccatgctctttgtaagccaaatacctcccatcttgaagctttatccgcggcgctgtgatcggtggaccaccggaggagccacatagcttcggcggaggtggtttcaacttggactgataagtaaacgccacgattatcccaacaatgacaatcacaacagaaggaaaaagaaatttttttcgaggccatggctttaatgagctgttccttgatgaatctctcgtcatttaaaagaatgggaagttgatcggagaggcacggaggtcaacggcgacgattcttgaaaagagagccaactgttcaagaactacaacatagagatcgtttttttgttgttgttttgagataaaaatagagaagcccatttttatatgttattcattatagtaatggcccaagatgcttaatatactaatgccccaatagtgttaaggcccataagcccatattagggcttcttcttcgtttttctccctcgagtagcagcagcagcctttggatattcggcggaatcgaaaatg

SEQ ID NO: 15974 - DNA, 3003 bp, Unknown; identical to SEQ ID NO: 15973
  misc_feature (1)..( 3003): 2750-1469P.txt file - cDNA_ID_1026625; gDNA_ID_2936583; Annot_ID_143796

SEQ ID NO: 15975 - DNA, 3000 bp, Unknown; identical to SEQ ID NO: 11267
  misc_feature (1)..( 3000): 2750-1469P.txt file - cDNA_ID_1026667; gDNA_ID_2214486; Annot_ID_183509

SEQ ID NO: 15976 - DNA, 3003 bp, Unknown
  misc_feature (1)..( 3003): 2750-1469P.txt file - cDNA_ID_1026697; gDNA_ID_2214603; Annot_ID_187140
ttattgttgttaaagattagtatgaacaggacatgtctttaaaattctgttctgatcgggtttgtgagagatatgagtgattggtggttaggacatgagaacaaggaagcttatctcagtagcctaccataaaaaagacactcacttcaccttgttccactcattgtatatataataattacatgttgtgcctaatgtatgtcgatttcagggattcataccattgttcttttttttttggtgagtataccattgttctttttgtacaaagacaacaatatatgtaaatccttttttaaaatttgatttgattcattttaattaagactcaaaatataatgtgcaattgattaaagagaatataatacattatgtttttaaaatatagacaagatgtttttgacccaaaaaatagaagaaaaatcttaacaaatatagcatattttggtatttttatttttatccttaccaaaaaaaaattagtttggtatttttatgatatataaaaagaaatcctaattaaaaaatggtaattcaagaaatatttattccaacaaaaaaaaaacagataaatactttcttatagggcctaaaacggtttttgtgacccggcccatttaatgtgagtcacaaatggagttatcttatagtttacctgtaaaaaaaaaacttttgtcgtcacttaaccgagaaagcaaaagagaagaagaagaaggaatcgaaaaatgaagactccgatccacgcggtttcgacatgggtgaggaggcagcctccaaaggtgaaagctttccttgccgtcgtatctggcatggcggctcttgttctcctcaaactcatcgttcacgatcacgacaatctcttcgttgccgccgaagctgttcattctattggaatctctgttcttatctataaactcatgaaggagaagacttgtgctggtataacctcatttcctgctttgacttcgttatctgtagggttcttagctttaactagagaatttcgatctgtgttgagatataaaaatgtaaactttattcaacttttgagtacccaaatctcccaaaggagttgatttagttgaatcagcattcttcttacagattaaaagtctatttacataccttttttggggggtatttgcaggattgtcattgaaatctcaggagcttacggcgatatttctagctgtgaggctttattgcagttttgtaatggaatatgatatacataccattctggacttggctactttgggaacaactctctgggttatatatatgatccgttttaacctcaaaactacttacatggaggaaaaagacaacttcgctctctattatgtggtaagtgagtcattctcggttttgatctttttacttagattctgttcatgctaggcatgttggttatataagcagcttaaagtcttttgtttttagttaagcgtaccctttaaggtcagatgaagatggtgcttattaatgttattcatttgaagcttagttataagttataaccagtgttcctttgtatttgccatcagtatcaaatttattttatctgcatattacatgccttttagaacatggtggcatctaactactggtgcaatagtttaaggattcatgaatattaagttttagttcttttggttttttgcagctggcgccctgtgttgtgctagctgtatggattcatccatcaacgtcacacaatatattgaatagaatatcctggggattctgtgtttacctcgaagctgtttcagtactgccacagttgagagtgatgcagaacacaaaggtatgtgttttctaaggttgttgctttcggaaacttgagtactgaaaaacaagtgtaatccctgatatttttggtgtgttcagattgtcgaacccttcacggctcattatgtttttgcacttggagtagcaagattttttagctgtgcacactgggttttacaggtaggttcttatcttcaacagagagttgtgattacatggttaagttgttctttccatctcttgcataaaccaatggctttacaaatatgtctaacatcctatgcttatggcactggagcaaatggtcaactccacaatatccccattagatatgatattttcgcaagtttgtttgtgtgatttttccaaactgaacgcataaatttggtttggtcttctgtgttgaaacagatgatggacacgcacggacgactgcttgtagtgctgggttatggactatggccatcgatggttataatctcagaaatagtccaaacattcatattggcagatttctgttactactacgttaaaaggtacttttactttcttcccccacacaagctcttcggtcttttcgcttcacctctttgatctatctttcttgtgcagtgttttcggtggccagcttgttctaaggcttccatctggggttgtgtaagttataaaggaaaaaagataagacacattatgacgaaatttgttacacgaagatagatctcagcttggtgtaatctgagtagcctctggttactctcaagttactccctcaggccaagtcctaattctattaactgtgttgtatatttttgtgtgggtcatcatcatagacagtcccttggatattattgacatgattttttccactgcatttgtgctaaattatccttggttcccacggtaaagttgctgcaaatttcaccaagcagagtaaaatattacacttcccacacaagttcataaagacattgtaatcgggcaatcgttgcaagccgcataatttgcaaagaacctgtaactacaaagaccacaaagaatttggtttgctgctagtcttaagattttacccgaaacactactgttcactgattgggctaaatttatgtctgtatacgtaaataggccggttaattacgaataggcccaatgcttatataatctgaaccgttctcttattttttttgttatcgacactattacaccaaagagatg

SEQ ID NO: 15977 - DNA, 3000 bp, Unknown; identical to SEQ ID NO: 8854
  misc_feature (1)..( 3000): 2750-1469P.txt file - cDNA_ID_1026880; gDNA_ID_1971906; Annot_ID_176997

SEQ ID NO: 15978 - DNA, 3000 bp, Unknown
  misc_feature (1)..( 3000): 2750-1469P.txt file - cDNA_ID_1027013; gDNA_ID_2936557; Annot_ID_194280
aaaccaatgacgttattaaggtatcccaaacgcccatttatcctttttttttttgctttacaaaaaccaatcaagacccaaatgagaccataagaacctaggaaagcttgaagaagaccttacaaggatgttgagtttggcaccaaatagagaagaaacagtctgcatcaattgcactctctgaggtcgagaggaaacatcacagattgaaccactcacttcaaacccttttgcatgccatccacttaagcattcgtttagcagagtttcgtctatgtcacagatgtgaactcttgcaccaaagcctacaagttcctccactattgcatacctaaagtcaagctcaacctcaaatctctttgtttcaaactttgcttgaatattatattctcaccaaagagtggatatataaaaaacagagtagaaactaggaaacagagcatttgggaggaagaaaacgaacccaattccctttgatccaccggttacaagagcagtcataccttgaagactccacctgttaatatccattgttgtgttgtgtgtgtgacgacacttagtcactatagccacaagtataatcagttagaatgataagcttaatggttggcaatgaatccgacgtacgaaacagatagttgaacaaacatggacctctcgttttgacactggcttgaaactcgtggataatacgaatcagtaggtctttttaatttctttttaaaaataagttaggtgagatattatttttttcttagccaatgatagtatttcagtcagctagtgtgatgttggattcgattgttgggtgcacgtactaagcctgtgatcctagtcatttgcattataatgagtttaaagatctcaataatacccacatttagccggttgttgattatacacatttgttgttaattactttaagtgatgacatgtctcagatcaatgatttttttatgtaaccaaataggtatagattcttacttgcacgtatatttcccaaaaaccttgtctggttctattttattgtatgctagtttaggaagtttaaatccatctccacaagttagctctacgacttattatcacgatcagctaaactaatacttgaactgttcaacattataatttctttggaattgactgtcttaaagaagtttaacaaatggtcgagattttttctttcttttcatgaagcctatatatgagagaacaattcagacaagcaacttcacacagatcaacaaaacagacttttatttcttctttttagttgctcatcaatggcaattactttcatatcaatagctctattcatagtcacccaattatgcttcgtttcttgcgtgctaagtcaacaaaacgaaaccaaatttctctaccacggatttttcgaagccaatctactcaagtatggatcctccaagatcctccctagtggcatcttggagctaacaaacagctcacgaagacaaatgggtcaagccttctatggcttccccatagccttcaaaaacagtactaactcatcaaactcgttttctttctccacaagtttcgttttctcaatcgacgcaccaggtcatggcctaaccttcctcatctcgccgtccatggatttcacgcaagccatgccgagccagtatctcggtctcttcaacactacaaacaatggaaactccactaaccgaattctcgcggtagaatttgacacagtaaagtccaacgagtttcttgacatcgacgataaccatgtaggcatcgatgtgaacggtttggtctccgttgaatctgcaccagctgcatttttttccaacaagcaaagcaagaatataagcttgaagttatcgagcaaagacccaattcgggcttggatcgaatacaatggagtagaaaggcttctcaatgtcacattggctacccttgacacttctaagcctaactttcctcttttgtcaagacagatgaatctttctgagattttcatggagaaaatgtatgtaggattctcggcatccacaggaaacattacgagtaatcatgatgttcttggatggagctttagcagagaaggaaaaccacaagactttgatcttaaactacttccttcgctttcaaccccgtcgccatctgactttgatgaccttgatcccattccagatcctccttcagattcagcaaccgtaaagcctaatcacaccaagacgatgatcataatctgcacacttgcaataatgatctttatgatatgattgaaggaagaggcaaacacattggtcttatgataaagttggatgagtactctatttatgtagttacatatatcgcctctaaacctttggcaattacattgtttggtctgcttttttttccaaccacgcgtaaattggtttgttgttgttacacaagttaattaatttttgattgccaaagaaaaagttgtaatttcattctcaaactctttgcttgtcataagtttttagatgatttagtttttaacagaatggatcaggtgaagtcaacgaggtgtcatataaaaacgtaaataacaaattttttgtattcattaaattttttaaaatctattttccttttgtattttttgcatcttttttgtctgaaaaagagagaaaggaaataaaatctcaatcgtggagatgatagcacgtgtcaatgttgcgacacgatctgatccaaacctatttatattcttcgctgctttttctgtcttgaccgctcttcttctatcgatctctgatctcctcttctctctgtcttctgagttctgtctacgcttcgtcgccgatcccggccagactccgtcttaccggcacaaaccctaggtgagcctcaagagtttggattggtttattgtttttgttctgggggaaatttatttggcaaattcacctaaaatgttgtttctgatgaaatcagattcccggaggacgaaattcgttttttcgccggaactaaattaaggagatttgagaggctatg

SEQ ID NO: 15979 - DNA, 3000 bp, Unknown; identical to SEQ ID NO: 10988
  misc_feature (1)..( 3000): 2750-1469P.txt file - cDNA_ID_1027032; gDNA_ID_2214470; Annot_ID_182987

SEQ ID NO: 15980 - DNA, 3003 bp, Unknown
  misc_feature (1)..( 3003): 2750-1469P.txt file - cDNA_ID_1027047; gDNA_ID_1621100; Annot_ID_55878
gaattggcttttgggtttctctggctgctaagtattttctgttatgaaataatgacagttttgcctgcgggatggagcaatgataaccatggtgggagagggggaatgggacgtggtcgttggtcaaatgggagaggaggacctgggcttcttcctcggcctggaccttaccctggacgtggtggtaatcgtggtggttttggcgggagataccagaattatcagcgtgatgaacgttttgtttctgagcttaagctttcgaaaagcaaagaaacgttggctagaaaacaaaccaactttcaggaggtaatatatatcaaggaatgctgttttaactactacatttttatggttatggtaacgcgtttcgaattgcttgatattaacagccatgtgagcttacttgctacagtcgagtagaaggtggagaagtaatctacgatgaccaaggattggtgaggcgtttggtgttatagttcctttagattctctcttttcttcttttgtcatcccattgaactatttaattgatggggtatatgcagacctttaaacataccaactatcacagcttatatgtatccactttgttcttgtttcccagaggcttttcaaacgtcatattggtgaagagattggagcggatttaaatcaaggttatgatacttttattgagaaaaaaggtaatgcattagtggcactagtgaactattagcatgtgtaaaatgaagaattgtgatatattcagctgattagtcgttcttttgaggcagatctgggctctgagggctttggtgaccttcttggcagtattagagcaaaaaacatttcgctggacaacattcattttgtggtatgaagtgcggatgtatatatgtccatttcactgtcaatttattactttgaaagaggttatcttaatggtgtcttttatttttgcttttttggacagacttttcgtaataatctaaacaaggtaagtgagatccccaacagttatttgatctctatgatatcaaatgaatcactctgtgcacattgtttcattctttcagatattgggcgctgcttacaatcggcatgaaccgtgggaaatgggcgtccataagagaaatggaaccatatatctagatgtgcataaactgcctgaaaggccgcagagtgacttagatcgccgcaggtaatcttcgctttaattgtatttgcggattggagtgattctactagttttattataaatggtgctaaagaatgtctgtgtagaagacaatgctaatgttttgaaaaaaatgggtcataaagagtttataacactgctctgcatattttgctactaataaacttgatgttatgtttccatcagatgttactggggttattgttttgaaagccttgctacggaagatccaggaagagcttatggagaagaaatacatcatgtggatgcaaatgttgaattttgttctgttgtcaggactaaactaggagctcaccgagttatgatgggtgctgaaatggactgctgtgatgtatctgataagggaaaaaggttttacgtagagttgaaaacaactcgtgaggtatgactcttgctatagttttcctaataagctcgtttgttatttcagcttctctctttcatttcacacacatacatattggccagtaatgtccctactgtttactctccagttggatgatcgtaccgttgacagatttgaaagagagaaattgcttaaattctgggtaagtatgatctaacacgggttacatatatcttctttgtttctccattcttgtttagacttaaatggttttaacatgctgcagatacaatcattcgtagcaggagttccatacattgtcgttggatttaggtatgaatttgccaaccattctaaggataaactcaaaaagtctaaacctttcgccatttaagcaaatcagttcaagataacattaccatatcccttttcatcttgatgtagagatgatggaggaagactagtacgcacagagagactaacaacgagagatattgcgcatagagccagattgaaaaactattggcaggtaagtgttatcagttctcattacagacatgaatgataagaaacactaatgaatttgggaactagggaggagtgtgcttggcatttgccgatgaagttctttgctggctatacggcactgttaaagaaagtaagttcattttttgttacgtctacatagaacaatggaagaagatcttttaaatttacatttcccaacaatgtgttttgcagacgaagattacatacttcagttcgtgcaccctttcatgagactagagcttcttcaagctcaatcttgtcctgatgccatcactaatcatgttcaccttctacaaaatcctgcatcaccaccaccaccacctcagtaactttatgcttctttagtggagtcataaactgtaatacttagggttcaaaatcaaatttgaaatgaaggtttagattttggatttcttttgtaacattttattaaccaaaaacccaaacattgaaaaaggaaaaaaaattgtgattcaaagattttaaactgggtccaagcagaaagcgagtctaacatgggccgggtctgttttaaactgggtccaagccttctaatcttatcacgtgagcgtcacgtgctctctttttctctctctctctctctccctctggctgacgaatcaccggagaacccaatttgtttcattcctttcccgttttgcccttccctgttcttttattcttttcttatctacaaaaaaaacttcgagcaagaacaaaaaaaaaaaactgtccatgtaccacaccatgagattagttgtcagatagatattcgcgagacgagaagctccaattaaaaaccctagagctcatctctctctccaggtacggccttttcgtttttggctttcaccggcgtggatctccggtgacggggagattcggaatttcggagagattttagatcatg

SEQ ID NO: 15981 - DNA, 3003 bp, Unknown; identical to SEQ ID NO: 15980
  misc_feature (1)..( 3003): 2750-1469P.txt file - cDNA_ID_1027047; gDNA_ID_1621100; Annot_ID_171385

SEQ ID NO: 15982 - DNA, 3003 bp, Unknown; identical to SEQ ID NO: 15980
  misc_feature (1)..( 3003): 2750-1469P.txt file - cDNA_ID_1027047; gDNA_ID_2926168; Annot_ID_140014

SEQ ID NO: 15983 - DNA, 3003 bp, Unknown; identical to SEQ ID NO: 15980
  misc_feature (1)..( 3003): 2750-1469P.txt file - cDNA_ID_1027047; gDNA_ID_2926168; Annot_ID_199304

SEQ ID NO: 15984 - DNA, 3003 bp, Unknown
  misc_feature (1)..( 3003): 2750-1469P.txt file - cDNA_ID_1027071; gDNA_ID_1621151; Annot_ID_56884
tatgttatattatattattcacaaatatcaatttaatatatattttaaaaataatgtacttatagaaaaacttgtacttatagccaaaatagttaaaaattatattttttaggctgtgagaaaaaataagaaaagtacaacatgattgtagttttttagtgtctttataaatttcctacaccccaaccaatcaatcatactcggtgtcttgaagaaaacataaaaaatatttataggaagacatgtaactgaagatgcgtgttttaagtcataatttttttttttttgaaagacacccaacaattcactaatggaggttgtctaaaaagaataaccaagaaaatggtctctgaacccatctctaaaactattttataatgtgtatatgtaacagtaagaagtgaaaaaaaaaatccatatatcaattaaggtgttaaaaaaaaaagtccatatatcaatcacttttctaacatcgtcgatcattgtgacgaaaatcgcttacgtctgtaccgtattaacgtaatgccatcaaacgaaaaagtttgctcactcactccggtttagatctttgttaacataagcaaacttttcagagagtgaactaatagattcacgaaacgacaccgtaattagtatcgaaaacttgactgacatcagcctaagaaaaatatcgcaaattgttataaaatattaaacttaagaagaaaaatgaaaatataatagagtttacttaaaaaaaaataatgggttagctgattttatacccataaactaattgcattctcagctttttcccccacactttttggctcttaaatttctaccataaactttgataattctttaaattacaacatgtactttcggattcatccttaaacatacatttccaattgaaccggtcattaaaccaggattaaccacaaatccgcgtttactgtaccacgatgcgatttacccgattaatcacctctatccgttaagaaaagggttggctgattttatagccataaactaattgcattctctgctttccccctcacactttttgctcctgaaatttccaccataaacttcgataattcttaaaattgcaacatatactttcagattcatccttaaaaatatgtttccaattgatttagattgtcattggaacaatcttcaacctcttttgtctattttggatgatgtattttcggaagttgattctctttaagatgatattatttaggttgactaattgatttggagtcttatctatccttatgattaggagttttatctagttcgatttgtcattttccttaccaattaacacaacacataacatatatagatagattcacattataaaacaaagagaaaacgatgtcgttttcttaacgggtgtgggattagtcgggtaaatcacaatagcggtacactaaacgcggatttatggttaatctcggtttaacaatctaaatcaattggaaacatatttttaaggatgaatctgaaagtacatgttgcaattttaagaattatcgaagtttatggtggaaatttcaggagcaaaaagtatgggtgaaaagcagagaatgcaattagtttatggctataaaatcagccaacctttttcttaacggatataggtgattaatcgggtaaatcgcaatcgtggtacagtaaacgcggatttgtggttaattccggtttaaagaccggttcaattggaaatgtatgtttaaggatgaatccgaaagtacatgttgtaatttaaagaattatcaaagtttatggtgaaaaattaagagccaaaaagtgtggggaaaaagctgagaatgcaattagtttatgggtataaaatcagccaacccaaaaataatagaattaacaagaaagtaagagacttaaggaaagagtaatagataaaaataagcattatccatattttatagatagaaatgagcgatggattaccaccacgcttatacgattgcgataattacatctatacttatccagttttacagaaaaaataatagataaaaataagcattatccatattttatagatagaaatgagcgatggattaccagcacgcgtatacgattgcgataatcacatccatacttatcgagttttaaggaaaaagtaatagataaaaataagcattatccatattttatagatagaaatgagcgatggattaccaccacgcttatacgattgcgataatcacatccatacttatctagttttaaggaaaaaataatagataaagataagcattatccatatttaatagatagaaatgagcgatggattaccaccacgcttatacgattgcgataatcacatccatacttatctagttataaggaaaaaataatagataaagataagcattatccatattcaatagatagaaatgagcgatgaattaccaccacgtttatacgattgcgataatcacatccatatttatctagttttaaggaaaaaataatagataaagataaacattatccatattttatagatagaaatgagcgatggattaccaccacgcttatacgattgcgataattacatctatacttatccagttttacagaaaatataatagataaaaataagcattatccatattttatagatagaaatgagcgatgaattaccaccacgtttatacgattgcgataatcacatccatacttatcgaattttaaggagaaaataatagataaaaataaacattatccatattttatagataaaaatgagcgatggattaccaccacgcttatacgattgcgataattacatccatatttattcaattttaaagaaaatataatagataaacataagcattatccatttttataaatagaaatgagcgatggattaccaccacgcttatacgattgcgataatttcatctatacttatcgggtttataacaccgataatccgatttggtcaaaatccggcggagaaaaaccctaaaaatg

SEQ ID NO: 15985 - DNA, 3000 bp, Unknown; identical to SEQ ID NO: 3750
  misc_feature (1)..( 3000): 2750-1469P.txt file - cDNA_ID_1027071; gDNA_ID_1620662; Annot_ID_47989

SEQ ID NO: 15986 - DNA, 3003 bp, Unknown; identical to SEQ ID NO: 15984
  misc_feature (1)..( 3003): 2750-1469P.txt file - cDNA_ID_1027071; gDNA_ID_1621151; Annot_ID_173248

SEQ ID NO: 15987 - DNA, 3000 bp, Unknown; identical to SEQ ID NO: 3750
  misc_feature (1)..( 3000): 2750-1469P.txt file - cDNA_ID_1027071; gDNA_ID_1620662; Annot_ID_163834

SEQ ID NO: 15988 - DNA, 3000 bp, Unknown; identical to SEQ ID NO: 3750
  misc_feature (1)..( 3000): 2750-1469P.txt file - cDNA_ID_1027071; gDNA_ID_2926151; Annot_ID_139323

SEQ ID NO: 15989 - DNA, 3000 bp, Unknown; identical to SEQ ID NO: 3750
  misc_feature (1)..( 3000): 2750-1469P.txt file - cDNA_ID_1027071; gDNA_ID_2926151; Annot_ID_198095

SEQ ID NO: 15990 - DNA, 2650 bp, Unknown
  misc_feature (1)..( 2650): 2750-1469P.txt file - cDNA_ID_1027104; gDNA_ID_1620788; Annot_ID_50425
gaattcaggaagctgctatatagtatttttaaaatcctaaatcagcaatgaatttagcaacttttatatttttagatctgggttgttaacatagaatagaaactgcagagcaaaagctaaatataaattctaatcgttttctatattttgtttgtaaggaaacattttggtgtcaagaaagtactcgttactttggaacaaagaaaacaatacccataaatataagataaggtttgagaatgtgagaatcgaggtggaatacaacagaagaagcacaatctcacgtggaacttaggcgtgaagatcctcttcctagaaatagtaagccaccaatttagaatctttctcactttcttattgtttataaaaaaaatgtcttcaaaaagtctttttggttttagcttttttcagcacatttagtccctttttcttgaaatcttagtatgcattgattaatctatatatggttttaaaataacagtttcagtttcattgaactatattcaggtcaatatctagtgtagttacaattgattagaaaagtgcatgcataattttgttttaaaaacttataattcaatgaacacatataatgtacattcatttcgaccaaagtaataaactcactaaaccaactgaaatgttaatgagcttaggcttactactttgttcttaacttaaatatcgaaacccattagcattatgggccttaataagattcatggcccaatgatctttttgcttcatcttctgctttcttctacgacaacctaactcatccacttcttctcctttcacaactcttcttctcttctttacccctataaattttacatattagtttatttttaatgtaaatttgattgaatttgaaaaaatacttggttaaaattagggtttgacccctataaatttgttctaacttccaaatgacccctttagttgatataactttttaatttatcgtccatcataaatttttttgtttatttgaccgctataaaacttgtttgtagatccgccactggtatatacatacattttaatggagctgtgagaatacttttgaggttcaactctcgttacaataccttttgtgaccgatatggtatcaccacctgtatttgcgcataacataactataataactcattttctttaagtgaatcatggttgctattcttttctcaataccacatatgtcaaagcttttttcttgccagctaatttgtactcagtgcgaaaaaaatttagcattgttcaagacgtaccacgaggataacctaaagcgtagacagtttcaccgataaaaggtatgcctccgagctccaaaggatttatatcctcccaaaactcttcactatcaatacctaagatagctaagtcacatccatacctaaacgctttaacttcagctttgtatttagtgggtgaaccatgttttctcacttgcaggtataagtgatcacccacaacatgagcgtttgtaagaatcctcctcccggagattgcaaatcctaacatagatattccaaagccgaacaataccatacgattttttaaaatttggaagtctaataaagaaatcacacgagagagagagaaagagagatgtttatgaataccagagcttgagtattctttctcagttgtttgccaaggttgaacaacatttggctctctagaaaaggagaagatcttcaccaccgcgtctcgagccacatcaacatcgctcacagaagaacaacaacgagatatcaaagaagcattaaaagacgaacgacgacgaagaagggaaggagaatagaaaaatcgatgaatcggagtgctcgtggagttgctgaacctagccacaatatgatgaacagaccggaacaacatgttcttgttaagtactatgtttactcgtattaacgatacataaatatatcatttacttgatactcatattttcgatccataataattacactacaaatctttttaaagattttaatggaaattgttaacattttaatataaggcttttatataatcaaatgaaactatagattctggtagcacataattaatctgttaagctctctcttttttttttactatgggaaaaaggtccaatgggcttaggcccaattatttaaacagaaaagattctaactttctaatggaaaataaaatttgcgatcaagcaactactctctctctctctctttcttctgccatcgccaaaaacttgtcttttgcttcttatttggtaagcttgcatttttctctcacccaatttctaatttcatgcttattagatcgttaattgaatctgcatcccgcagtgatcattctttgatttacgaatttgtttttttgttgtgattgataatcttgttgtcgatttttgtcaattttatggtttaatttacaaagtgtatattgtgattgaatcgactgggagggtattgagagttgtttgtttgaatctaacaaattcaagtgcaaatctattttatagccacttatcttctgctagtagatctacttgagttttaagagatgtgacttctttaataccattgtgaatttcatggctaactgataaaaaggtctcagctctgatcttttgattcaacggctcccggagacgacggaagcaatg

SEQ ID NO: 15991 - DNA, 2650 bp, Unknown; identical to SEQ ID NO: 15990
  misc_feature (1)..( 2650): 2750-1469P.txt file - cDNA_ID_1027104; gDNA_ID_1620788; Annot_ID_168192

SEQ ID NO: 15992 - DNA, 3000 bp, Unknown; identical to SEQ ID NO: 5555
  misc_feature (1)..( 3000): 2750-1469P.txt file - cDNA_ID_1027367; gDNA_ID_1620801; Annot_ID_168658

SEQ ID NO: 15993 - DNA, 3000 bp, Unknown; identical to SEQ ID NO: 7592
  misc_feature (1)..( 3000): 2750-1469P.txt file - cDNA_ID_1027414; gDNA_ID_1621153; Annot_ID_173328

SEQ ID NO: 15994 - DNA, 3000 bp, Unknown; identical to SEQ ID NO: 6299
  misc_feature (1)..( 3000): 2750-1469P.txt file - cDNA_ID_1027467; gDNA_ID_1621088; Annot_ID_170572

SEQ ID NO: 15995 - DNA, 3003 bp, Unknown
  misc_feature (1)..( 3003): 2750-1469P.txt file - cDNA_ID_1027467; gDNA_ID_2926212; Annot_ID_202708
gaagctgtctgaagatttcttatgtcatctttgccttttgttctgctttctttctcggtgctatcaaaggtttcaatttttcttctttgttttggctctgttttcctctgtttctaactttctatgattgattcttcatgatgggttcttttgaacaaaacaaagtttgattttttatatatatttcctatgcaggtttgatcgtaggtccaattgctggattaacattaatagttgggaatgttggagtgattctttgtttgttccctgcacatgttacttggactatttacgctgttgcaaagtaagaaaacttcaacactgttttctcaaaagatttccctgcaatttctttcttaaaggagaatcaattttataaacatgtcttcttgtgtattttctaactttcaggacaaatagatttgacattcctctgaaggtagcaatcttagtggcacttcctgcattgtttgggatatggttaggtctaagtctagcaattagtgttcttgttggtgttggctatggattcttcactccttggatctctgcttttgaagcctttagacaagacactgaatccaacaagttcttccactgtcttgtggtacttacataacttcccccagaagtttctttctcttaagcacttgttagtgaatcatatcacttgactgctctgtatattaggatggaacttggggaaccatcaaagggagttgcattgtggttactgattttgcagatttttgttaccattcttatccactttacttaaaggagttacgcgaatccccggtttcagatgagcttcaaactcttaggtaaagtaaaaacttttgtcctaaactattccaaaagagtttttgctgattcttgtgtctcgtcttgcaggttgattcatgttccaggatgcatcattgttgggattctaggattagtcattgatatccctcttttcactgcaatcgcggttattaaaagcccttaccttcttctcaaaggctggtaccgactagctcaagacgcgattaatcgagaaggaccatttcttgaaatagcttgtataccagttgctggtttgacagtactgttatggcctatagttgtcattggttttattttggtgaccatcttctccagcatctttgtaggactatatggagcagttgttgtatttcaggtacaccatgatcatattgaccgaatgattcgagaaaaatatcgggtttcttactcattgttgaatctctaatctgcaggaaaggtcattcagaagaggagtctcttatgtgattgcagtagttggagaatttgatgagtacacaaatgattggctttaccttagagaaggaaccatcttcccaaagtatgtctctctttgatttccatctttttacattccctttctttgcctccattatcctaacaccgcgaaactgtaatccgtgacacataggccaagatatcggatgggaagaggatcgttttcaagtgaagtatctgtgatcgttcacccttcagatgtaacaagagtcaatagttctggttctgtcgatgctccagcgatgctagtaccgagcctagttcactctgtatctgttagagaagcaatacaagaagtgagaatggttcaggtatatatcaaaagttttcattgtcgataccaaatctctcacgtttctactgagttttaaatatttgaaaatgtatttaatagatttgggagcatatgatggggtggtttgagatgcaaggcaaagagctactagatgcagaagtgttaacaccaactgatctctatgagtctttaaagggcagacacggaaacgaatcatcgattatcaatgtcgggcttccttcttacgctttgttgcatacattgcttagctctataaaagctggtgttcatggtgtgcttttgcttgatggctcggaagtgacacatttgaatagaccacaagacaagttcttggactgggtctttaatccaataatggtattgaaagatcagattcgagctcttaaacttggagaaagtgaagttaaatacttagagaaagttgttctctttggaaaccatgaacaaaggatggaagcttgggataatcacagtaacccgcctcaagaaaaccttcgaactgctcaaatccaaggaatcagcagaaggtaaagattgaaaaaacttctcttacaaagaaaagttcaatctgtatggcttctttggttctgcctgaaacttgtttgtgttaattaatctcattaagacaatgatggttttatttatcttgaatgttctaggatgatgggaatggtacggagcgtatcgaagcttccgacttatagaagaaggttcagacaagtggttaaggctctaattacttattattcagagaaacaaggcttaaatcgaaccggttccatgagctctggagatttcattgaagagggttaacctaggactaggagcaattgttgtagtctttctataatttttagatgtgtttttcatttcttgtagtacaaggtgtaaaaaagaatgtacagaagttgctaagtttgggactcaagaaaacagagcatttaaaaaaaaaaatgatttcaaagattgtgacaaagaaatataaaacaatagtctaatcttgatacgcgggccaaacaactcagaactatctcatctggcaaagaagaaaattcagacgtagacggataagacgacatcttcaatttcttcgtacacggtggcccttcgtcggcgccggaattcgacatcgggttttgttttaactctgttttgtttgagagagcataacgaaggcagactcaaactctgttttgttttaactctgtttttatttaaagttacggctcaagtaaaaaagcccatgtttgtttaagttttggcccattaatagcccaatatcacaaacggaagcttgtgaaattgtgtgagacgaagacggcgaagcggataacgaaaagctcgccgagaaagcacaaatg

SEQ ID NO: 15996 - DNA, 12 bp, Unknown
  misc_feature (1)..( 12): 2750-1469P.txt file - cDNA_ID_1027574; gDNA_ID_798; Annot_ID_144524
gcttttgaaatg

SEQ ID NO: 15997 - DNA, 3003 bp, Unknown
  misc_feature (1)..( 3003): 2750-1469P.txt file - cDNA_ID_1027604; gDNA_ID_2214579; Annot_ID_135225
tctcattgcagactcagctgcagctgcactgatgaaagatggtcgtgttgatggtgtcatcgttggagctgatcgtgtggcttcaaatggtacactcaaacaccttagataaatccgttttctctcacaaatctgattccttatgactgaatcacttcttaaccaattcattgatatactccaggcgatactgctaacaagattgggacttacagtctcgccttgtgcgcaaaacatcacgggatcccattttatgttgctgcacctcttacctcagttgatctgtcactttcatccgggaaagaaatcgtgatagaggaaagatctccaaaggagttgatgcacacacacggaggacttggtgaacgcattgcagcaccagggatctcagtttggaacccagcttttgatatgactccagcagagctgattgcaggaatcataaccgagaaagttcgtttttccagccttgcttgttctggaagatatttatgctcatttatttgaatctctcaacgtgtttgtatatgcagggggtcataacaaagaatggcaatgatacatttgacataagcagctttgccaagaagataacaggaaactcatctcgttgaagttagagtcagcattgcgacttgcggatgttcccctctctctatatacttgcaacaaagcaaattactttgtaatgtttgagctactaagtacactgtggtaaaaattgtcaaaaataagaaataatcgatacgttttagccaattgtaggtagccaaaatgctggtcttgggtttaatgctaatgaagattgggaaacaacttgttttagtgtaaaacaacttgtccatgggcttgcccggtccatcttgacttggttcttatttctctatttttttaagtttaagaaaagaataccgtttctcctacccgtcaatattgaaataatttcagaggttttccttgttctgtgtcaacaaacaattcgaaatgcctcgactttatcaattttttgataattctgaactttagaccaaatgcatatggacgagctatattctggaccaaaaaacaaatggtctaattgggcatatgaccagttttgtccacggataatatgggcttgaccatatggacaacgggctgcccatgggcatgaattgagtcaatagacatgtcttcatttaattgtatttttataattttaattacaattacaactaaataatttttaaataatatattttacatttataagtttttacttttctgaaaattttaaattttaatgaattatttcttattaaattatttacgattttaaaggaaagatagtattccacaattttctggaatacgcaatttttaaattttacggttttgacgggaaaaatacaattctccgattttacgattttgacggaaaaacgtaattctgcaaattttccaccaaaatcgtgattttattatattggcgagaacacaattttacggttttgacgggaaaacgcaattctctgattttacggttttggcgggaaaacacaattttccagccaaaatcgtgattttattatattggcgaaaaacacaattttacagttttagtgagaaaacacaattctccgattttacggttttagcggttaaatcgttatttttttgtatcggtgaaaaaaataattttacgattttaccgttttggcgaaaaaagcaattccataattttttcgtcaaaatcgtgattttattgtattggtaagaaaaacacaattttaccattttgtcgaaaaaagacaagtcttcgatttctacaatttttacggaaaaatgcaatttctcaatttttctttaaatttatgatttttgatttatcaataataacaataataaaataggctaaccatgggcttgccatatggacatggtctttattgggcatggacatttttcggaccaaaccgtccaacttggcccataaaaaaactgtccgtacggacacgcccaatggtctttggacggaccatttgacacatctagaaacaaccgtcagcagtagccattcgttaagagtttcagaattccgatatatacattttgatacaacctacacaaaaacaaagacaaagagagaaaatccaactatgaggaggattatcttgttgatagtgccatcaaaaacaagagttagttattcacctgaaggtttggctaaacaaagtatattatctcttttcatatacctgtcaattacatcttgacgctgcattgtcaacaatagagacctcctatgtcctttgtattcactcttggctttcttaagtactctagtagattcatctacaaatgtaaacatggttgtcttcgccgcgaggtcgtttgcatgttcttcttttacttgtttcgtttcagttcgttcttgatcctgcaagatcgggcgtcttctcattgcggcgttagttaattaaagtattttgtgcaaaaaaaatttccgtccaattttgcaactttatactctatgtccaaaaaaaacaaaataattatatgaaatttaaaataatacgtaatatagtcaatttttacaattttacatattgtaaacgtaaaaacatttgtttttgaaattttttaaaaaataaatagttaaactactcatatcaagaattttgatttgatatattatttatcaaaatttaaaagtttaataatatcaaaaaaaattatattgtgtatttttttaattttatataattattctgcattcttttaacgtgaaatgtaaagttgcagccccagggagtattttagagttttttcgaagataattgtaatcttaacttattatttcaagggtattttgggagattgactatttttttttgggttctgtcttgaagacaaagaaagctttcttctataatacatctttctctacagatcacacagaagcaaaaattccatctccgatttcggaagagagttgttctcttctctgagaagaagaagatg

SEQ ID NO: 15998 - DNA, 3003 bp, Unknown; identical to SEQ ID NO: 15997
  misc_feature (1)..( 3003): 2750-1469P.txt file - cDNA_ID_1027604; gDNA_ID_2214579; Annot_ID_186417

SEQ ID NO: 15999 - DNA, 3003 bp, Unknown
  misc_feature (1)..( 3003): 2750-1469P.txt file - cDNA_ID_1027695; gDNA_ID_2214704; Annot_ID_189774
actctcttcacacaaaaaagatgagtaaaagaaagacactttacaagccatcccttaaacctttgactcctcctcctcttcttgtatctgcaagtttcaacaagagcaagatcaacgatcaagattcgtcttacagcttgttcccggctattgaaacctcccctgagtcttttgtgtatagtttctacgaagaggatgatgatgatgagttcgttgaattttccaacttcaagatcaacacaaagaacaaagctttcaccaagcagaaggtcaaagtgattgattcggtagagaaagcttgtactgcaagcaagccgattaagaaaccgcagaaaagccatctttctgtgaaaatttcaagagatgaagatgataatgaatataaagccgagaagaagtaccaaaggcaagtttctagtggaagaaaaccatctgctgggataaacctcaaaagagtgaattcacctagaattcaactctcaggtactcgtagaagcacttctagaagatcagagagcaaacaagatgttctagagagcttcgctgtgatgaagcggtccgttgatccaaagaaagatttcagggaatcaatgattgagatgatagaagagaacaacatcagagcttcgaaagacttggaagaccttcttgcttgctaccttactttgaatccaaaggagtatcatgatcttatcatccatgttttcgaacaaatctggcttcaacttacaaaaacaaagtaaagaaaaaaataattcttaatgtaatagtagttaacctaatggtgaaagtaattagtatcattctgcttgtgaaattgtagttgttgacttgttgttgatgttcataagaagttagatggaactgtggagattctctctttgaatcccactttttatgtattgttttctttatttatctttttggaaaatgtaagcaaataataaaagttgttatcatattgtcgttttaatacaaacatgatcactaagggcgtgaaaacactgttaattaagacagatttttttatcactaattaaacatattcttgtcttctctatgattatgaacatataaaactactcacaaaagatgatgcttcaagatttgattatttcttagaatatgaagatggattaattgcgccaatatcatttgaatattttgaaaatacaaagttgaaaatggcggtaaacagcaacaagaaaaagacaacagtgaagagacatgaacaatttgaaaacgcaacaagtacggagtttatatatatgcatgaagaacattggataatcgttgaaggtagagagaggaccactgacacataaaactgagatgtgattaaagaagaaagaaacagtgatgagatttaatccttaagggtttttttttttctgtgaagaagggaagaatgaactcatgaagaagaagaagaggaccactgttgcaaattccatcccctaccacagttggcttatgaagtttcagcaaaagacatgtgatatggtatggtttctgacttctgagtgaacataagcaacaaatattcaaatcaatgggcctaaatgatcttgcagttttggattataaagttaagaattaaaaagaataggtgatatatgtatcataattttaagttttaaacaagtatgtcagacaaaattctacattctaattttatacatagatatgagataacctcataaccataaactacaccaaattttcatgaacaaaatatgattcacacgaacttttttctatcttgatcacctagctaacttgacaaattagttgttcgtctaaaactacacaaacattcaaagttcgttttaaattcaatatatttaaaaataacagttaaagttttattaaatggcattccaaatattgattccttctagaaaatttgtgtggttttaaattgtgaaatttggatctagaaaaaatagcaagtgtggtttcttgtgacctatggttgttagtgtagttgtataccattttttaaagttacattgtaatttgtaaaccatttttgtgtggttgacaaaaaaaaaacctatgacaaaattgctccgtttttattttcaataacaaattataatgtaaattaatatgtatcatagtgtttttaataaaaatatttaaaattaggattgattgttctgaaaaaaataacgcaactaatactttgttagcaaatactaacgtttacgtaccaaaaaagcattatgtaaatccattcatccatcattgtatacttgactttctacattattcttttgttgtatcaaatttaaaattaatgaatgaacttgacataataaaacacaaaatatatacttaaattgtacgatataaaagtttgatttacatattttatatctataaaaaagggtaaataaatgaaataaaacttttttttttttttttgtcaaagaaatgaaataaaactcaaattacatttttatgtcgtaatgcgagcacacaagtgagtgcatatccagtattaagttttttttttaataattcagaattgaaagcaaaggaaaaagaagaaatcgaaatcggaaactgtatattgttgttcttcgattcctcctcgctctacgccgcgtcctctctctcaaattcatcggaagcaaccttcttctcccatcatcgcctggttcgtttctaaaccctacttcttctatttcacagtatatcttcctttaattttcaatcgaatctagctttgtgtcgatctcaatgtagatcggaatcaagtaaaagaaatcgatgaattccaaaatgttcccgatctattgcaatgcacgaatcgtagaattatcacctacattagtcttgatctaatcgccctatttcaatttcaaattcgacatcgaagtttaaaggagatcgcaaaacctagttatagaatcgttgcgtttgagttgtttcgctggtgatgtagaaaccctaattttggttgtcctgtgtttggtacttgctcagaatccaatg

SEQ ID NO: 16000 - DNA, 2571 bp, Unknown
  misc_feature (1)..( 2571): 2750-1469P.txt file - cDNA_ID_1027716; gDNA_ID_1591932; Annot_ID_151718
  misc_feature (141)..(141): n is a, c, g, or t
  misc_feature (190)..(190): n is a, c, g, or t
cgcatataatgtgagataattccagtgggaagaggtgccgcagcaagagcacgatatagtttcttcacttctttattcttgaaaataagattaaaaaaaaacaaaacgtattgaaaaaattaactaatcagcagagcttgntcctgtttccattcaaacagcattgtaaaggaaactcactcttattttngtgtggaagaccgagcagtactcttttgttctagcaaatacgacactgtagagaaagaaagcaatttaacctggtcacttaaaagatgttaacttaacaaacttcaaagcatgaaaaagcttttacaggacagtaccagccttctgtacagttatcaatctgatgcgttgttttcagtggttctggtaaatccaatgcacgtgaggcaaatgtagcacagctctcttcgatgttatccgtcgtgcccccaacctgataacattccaatgtaggtcaacacattcaatcgctaatttcagtacttaaaccacaatcagaagtttctaagaaattgatgaaaggaaatatctctgcatacccaagaaatggaacacaataaaacattttgatagtaagttacagtcacataatgtataaaactagtccaacaatatttacaaggtgaagtactttttttgcaagatatctaatgcaactacaatggtcaagaatattgaaaagaaagcctaatggatatattacacaccgtagtcccggcaggtttatccaaaatgacataagagtcagtcacagcaacaatccgtgacttccaatcaatttcataacacctgataaacaacacaccctcaagtcaattgacaatcaatcaccaaaccttccaaatttctaaacacattccttgaaacgtgtaaataccttggagaacgcttcgggtgaacgtgcacacgcaaatacgttccagcttcagcatactgattggtatgtgtcacacgaaacgttttctgagcttctctaacagtttttcctttaatagaagatctcttctttagtacagaaggagaggttacttcttcaaacagtctaacttcctcaggagtcgcagttggtggaggtttaggacatacaagagcgtaatgtacagctccaaatcgaataagatctgcaacatatcttcataaaatgaaattctttatacacactccattacaagccctaagcataagagtacttagaccacaaagagttagtgacttacaaaggaggaagatctaattgtttagagataaactcagaaacaagaacgtcgtcttctaaaacaaccatatgttcaattcttggtggaagattatatgcaggacatggcatcaatcgattgtattcatggtatctgaaaaaaacacatttcacagtaaagtatcgaaatttgaacgaattgaatcaaaagaatcagactttaagcatacccagaattggaagaagaagagagtgtggtttcattttgagaatcggttttgagtaaggataagcaagtgaatctctttggagaagaaatgaaacgtggagagtgtttgttggaacgaaaaaatggagtagtgatacgggtgaatgctaaagtgcgcagaagagatgccggcgcagtgaggttccggtaaccgccggttaacgccgcgaagccattgttgatgctgtggtaaatgccctaagaatcgttatcgttatagcgccaatctactatttgggccgaactgaatctttgtattgggcccatttgagaaacttggttcagtgataaatttggttggtttggtggtttattccggtttgttggccgttttactaaggttgataaaccgaatattaattactttttcttaaattatgatactaattaaaaatcatgcagtctctggtttgtttatgggtcgaaattattatgttccctgactttatggtaaaaggagaaacatactaatctaagtgaaaattaatctacggcatgatagaaggaaaagtagttgaattagcccatcatgatttaaatgttataatggctttaaataaaaagttgggtgtagccaaaaagaaaatgtaggttgttcgaatattgtagttaatttaaaaagagtttatgtaatttatcaaccggatcatattttgtcatttctctaacaaccttgtgtcattgtatagagcatcattgcgttgtttggctgttcattttagagcaacatctcgacttctatattcgcttaaaaaatcctcaatcttcgacatgtctttgttaaattttccaaaataatatacattttatagacatattacgtctaaaatgttgatggtccgatcctagtagtcttttttattagaaaaatataaaagttaacagtgagattatatttgaacataataatcttaaatacagtaaaaggaagaaaatagataaagaaatgggatgaccaaccaacaaaagccatcacctatcatataaaaagataatacattttctactactttagcttcaaggatcttaataacacttcgttaccacttgatcaagagaaacaaaaagaaaagctgttcataaaaactctctatcaatg

SEQ ID NO: 16001 - DNA, 3000 bp, Unknown; identical to SEQ ID NO: 8946
  misc_feature (1)..( 3000): 2750-1469P.txt file - cDNA_ID_1027928; gDNA_ID_1971948; Annot_ID_58610

SEQ ID NO: 16002 - DNA, 3000 bp, Unknown; identical to SEQ ID NO: 8946
  misc_feature (1)..( 3000): 2750-1469P.txt file - cDNA_ID_1027928; gDNA_ID_1971948; Annot_ID_177317

SEQ ID NO: 16003 - DNA, 3003 bp, Unknown
  misc_feature (1)..( 3003): 2750-1469P.txt file - cDNA_ID_1027932; gDNA_ID_2936554; Annot_ID_194152
gtatttcaaaatttgataatcagcttcatgttaaccatggacttacaagtatatgtgtatgttaaacccaaaaagaaaaaaaaagaaaaaggtgtatatgtggaagcaacaccaatgttaagttgtagttttttttgttaaaatcactaattgaatttggttatcattttggtccggattgaactaaaccaaactatatatgaaccaatctaaatcctcaacatctaaacaaaatttaattaaaccaaactcagaaaaaaaaaaaaagtgttttcagctttcacataccttaattaggacttgaacatcgtcatcaagagccaaagaatcctttgttattcctcagattctgtttagttttattcttttgtgattaatcatattaatatgttggtgcagaagaattacagggcaaatctcctttggcagataactcactaattaaaagcaatgcataaagagatgcaaagatctaagtaatggtttcctgccaatagagatcttaccctgtaatgcatttccacctttgatccatctcacatgttcacaattgtaacttgcaaatttgatgttatataaacttggaaagaagcatattccacggtacaatgctactgcattgtaaataagaccgatgttttattccgacaatgatctcttcttcgtataatttcttaggaataatcttccatgccacaagttttatggtcagaaatattcctaaatgaagagcagtctaccaccttcttctcttttaacaatttctaatccttcgcaacatcttccgcgtgcatcacaacaaaagtaaaagatcgtacatgtgtcatttaaattcacaaaatttaatctctagttttaacataaaaagtcaatactaatgtgtgtctattacatatagtatgttcttgacctcgtggataaagcaatattatagttcactttaatactatatgatataatgtcaagccctttcatatgtttaacccaattatttgtctgatttgaatttagtccaaaagttgagacggttgtgagtcttgtgacttgacaaaatgtgttttgagatcttttgtttgggatcggagtactatattaaaaaaaaaatcataagaaaataaaagaatctttaatactatggaataagataaaaaagagagtggtataatagtaaagtaataagtagaaagtgattcttgaaatggaagatccgtaagaatgttcttgtgattttaataagcttctacctgaagacgcataaaatgcaaaagctcgaaactgcaatatgctctagaaagttataaatatgtacatttatgccactcaataaagtcaatcaactatgaaaaagaacaaaattcgaattctacagtatactataaaaggtacattaccctaaagtaattgactttatatatattatgtcattactttggacattatagaagattaacatatatcttagtcctaatatatatgttaatcaggtctcattgtaacaggttaacatatacactagaacataagcaatctatctactattaccatcaatcacaattcgaaagataaccttgttcatatgtgaaactctcagtaacttacatttcttcttaagcaagatcccaactttattccaactacattcctttaacaaaaaccaaaccaattccacaacaaataaagatgaaactgttttgcaatcacaaacttacttatgaatcaactggctctaggatccatcccttgctgccaaacataaacaagctcatcccaaccagtactcgccattaaaccttcaacaagaacactcatatcgatcccaacagcaaactctgtatgatgatcatacctaccaaccaaagcatcttccaccatatagtcccaaagacaaacactcatatcataagagcaagaagctatcaaactcctcctatgcggcgagaatttcaccttcctcaccgcatatccatgaccattaagcacagccaaaggaactctataactcctaacatcccaaaccttaactgtcttatccactgaagaagtagctaaaatacaatcatcatacttattccaatcacaagacaaaatctcaaaatcatgagcagggatgatcatagttgatccaggttctctaacatcccaaatccttaaagtacaatctccagaagcagaagcaaacacatcaccatgtttaggattccaaactgcttgataaacgcaataagcatgttccttaaaagtccttacactcgccggacgatccatagcccaaagcttaaccgtatcatcccacgaagaagtgagaaacgaatcgcgccgcgtgggattgtaatccacagattgaacctcacgcgcgtgctcttggaatgatctaatcggattagaaggaggaggaagagctgtgtcgtaaatcttcactgagccgtcaccaattgcggcgatgagcacagagtcatgagattctgaccaacatacgtcgtatacagcgtcggctgtatcgtacgagacggattcagttacgcctggagctccaggagcgagctcgaggacatggattcggccgtttccgagaattccgaagttctgagctgtagcgacggcgaggcgtgactcgtagaatggactgaatttcacagagtagccattgaacggagctttgaacaccggcatagcttcttcttcttctccggtgagtgattgaatcaaaagaagagtcttctcgaagattcaattcaacgatctgatcggataacgccgattttgctcatcgcagaattaattttccccccaattgggcctattgggctggagcctagcccatttgtgtaggttgtgttaaaacgatgtcgtttggcatttcaagttagggttttttgggggtttggttcaagcttcatcgtcgtctctctgtctcttcaatttcattcgttttctgagataaaagtgagagagaaatctaaattcgagaggagaagttttaatttttctgagttagattcaatg

SEQ ID NO: 16004 - DNA, 3000 bp, Unknown; identical to SEQ ID NO: 14851
  misc_feature (1)..( 3000): 2750-1469P.txt file - cDNA_ID_1027959; gDNA_ID_2684229; Annot_ID_192173

SEQ ID NO: 16005 - DNA, 3003 bp, Unknown
  misc_feature (1)..( 3003): 2750-1469P.txt file - cDNA_ID_1027990; gDNA_ID_1971748; Annot_ID_175261
catcctcgagaactccttcttgaggatagacttgttaacagagagcttaggcttgttttgtctcttagtcttggtggttccgagtacaacaccttggtccttgccagccgcctgaatggtcactgtctttttgttggccaaacctataatcatataaaaaagactcaaacttcaatcacattatcagatactaatacaaatccaatcacccaatagcatgtaaccaacaaaaagatagtcatcaattcaacaagttgttaattttcccaattacatttagctagacatataaaggtaatgacttgtgttcatatcaacagattcaacaaaagaacaaacttgagataaatctagagtaagcaacagttgtgtattaccagagtgcttgtacgagttgatgttgacgaggttgttgctctctttgctgaactgaaccttggcattacctctaccgaattgcttcaccaagaaacagttgtttctcttcacgatctcccagatcaactgtcctggaactgtggccatttcgagctccttcactgattattgaagaagaaagcatttagtaacacaacatatatgaagcggtaaaacaagggctacacagattgaagaacaaagaacggcaaattggtttgtaaagagatgattcaagctcaccttgatattagcagacctagatgacggcggtaaagagaagagaacgagactcgtgccggagttaagttatgatttatgtcgatgcgttaatatatatacattctctgcaaaaccctagtttggttctcggaggcaatgtttataagtcaaatataagtaaaccagacttttatcaaaagggcgtttggtctagtggtatgattctcgctttgggtgcgagaggtcccgagttcgattctcggaacgccccttctaaaatcatttttttttctgccaactaaactttgtttttcttcacccttgctaaattttccaaacaactctgcatccattagactcaaattgaccacttaactggataaatgaaaatcatcatcagacataattttcacttcaatggagcaaatccaaatcttgttttatatggtgaagctatagatcttacatggtgaataactatctatatttgaatacaaactcttcatgaagcattataactccctgaaaagcatcagcacaacacaacaacatatgaaaacactcttgacacattctttgttaccatcatcatcatcatcacagaagattccaagtttcagacttgaatgttcggacttagacccacatatcttcacctccttcagcccacattccccatttccatctcactctcgggttactcatcatacatgtcgatatcagattgcttcttactctaggatctttgtcctggtgaatcatcagtctcatgtctgtcaaacctctgtacttattaacaatagacctgatgaaagaaactgtttgatgaacattggtatgatctgacatctgtacacgtgctgttatttgcttcaggctgtctgttcccttcatatcacctaggccgccttggctttggaaatgtgtttcgatatctgaccaagtcctgggactcaaactaagagaagtaatgccagggaatgctttgaggattgttgccagtccaagttctaacctctcagattgttctatagactttactgaatccactgcaagctttttgatcttgttgccaaaactgatgttgctgattaatctgtacatatcaggagatacgagctctaaagtcttcagatcttgaaactccccaaaactaacaccttcagcgtcctccacagaaagatggcattgcaccaacttgggcgtttcaactagaagagatttaggcttgttgcattttagcttcagttcaagcaggtttggcgccacgatagccaaggaaagtggagcattcgacacagtccaatgacaactctttaggtgaagaaaatggattcttggttccttaagtcctccaacaccaatcaaattcagctcttgaagaaaagggaaacaatcattgaccttctctagattctcatcatcaagtctgatgaattcaagtgtcaagtatctgagattaggcatctcagtcaggccaactacagagagccaagcattcttcacctctagtttcactaacttactacctgcaagatacaaatagacttaatctagttactatcatatatcatcatcatcatcatcatcatcatcatcgtcttccaataaaaaacttctatttcaaacgaatccgaaacgaaactagaggaaatgatgatggagaaaaaaaacttacagtttgaagaaatgagcgccaaaatatccgattttctccagcaagattgaatccagaaatccgaaattgacaaattctccaggtcttcacgaaccctaggcaaccactccttcacaaattcgacatcggtcaggtacaaatccttggaatcttcttcattgaagtcgtcaaacgacattcccttaagcgccttatcgactccgactgagattgagcgaattttgctagagttctcgattaggcttctgaagatcgtcttgaacggtgtgacaacgacgatggaccgcgattttaagtaccgagaccaggtacagatgagattcacggcgcgaacctctcgagaaagcgagttcaatgtcttggaagcgactctacatcgtgctagggattcggaatcgttgattcgactcagaattttgatccagagctctggtggtaactcgtccatggtgtttcttgatttgggaaattgaaggaaaggaagaagacgaaggagagaaggagttatagaaatttggaggtacgtgtggttaaaatcccgcacgtgttaaaattgtaaacgactaaactacccttatgaattctggaaaataacaaacgtgtcatagagtgaagaaaaacccttattgttttctagatttctccgatttgtgtagtatcgtcgggattttttgaccggagaaatg

SEQ ID NO: 16006 - DNA, 3003 bp, Unknown; identical to SEQ ID NO: 16005
  misc_feature (1)..( 3003): 2750-1469P.txt file - cDNA_ID_1027990; gDNA_ID_2926196; Annot_ID_141259

SEQ ID NO: 16007 - DNA, 3003 bp, Unknown; identical to SEQ ID NO: 16005
  misc_feature (1)..( 3003): 2750-1469P.txt file - cDNA_ID_1027990; gDNA_ID_2926196; Annot_ID_201438

SEQ ID NO: 16008 - DNA, 1157 bp, Unknown
  misc_feature (1)..( 1157): 2750-1469P.txt file - cDNA_ID_1028034; gDNA_ID_1591466; Annot_ID_151028
tataaaaaatattaaatgcatttgaacmccatacaaattctcctaaattataatattgctaaacatatggataaagtaaatggtatcttatgtgtaaaatataatccatttaatttagttaaaattgttaaaattcaaacaacattctcttatagttatatcatattctatggtcatccattcatttaaccaatataaattatctttcaaaataaataaaactaaaatagatacatttttggtaaaatgcttatagatatatatattcctctatctatttctttatatatatcatttatttatttatttatacaaaaatatgcttataaaaaatgtgtatatatataaatatttcattaagaagttattatactattgatctgcttttctttgtatttttaatcaaattactattgatctgctatggtaccaattcgattcggagatccagtgatatggaaaaaaccttcggtttgatgtttgcattgtggtgaaatacatattataaaatcatacmcaatcactaattcactatataatggtgaatgcaaggttccccctaaatactagctgcaatacgttaaatttaatagaataacaacaaatgcaaagccaagaacacttgtttaataataagatgctcattcttgccagtgtcttctatcaaagaaaaactcacaaaacatggtgtgtatgtggtttgtttttaagttttaaccaagacaaagatcgttggtcttacggtagacacatgaatacatatgagtgggatttggtacaagaacacttgtttaaaaataaacaagtttaagcatgttattattaaacaagtttaagcatgttattattaaacaagtttcctagatttggtttgttttagcgaagacaaagatcgttggttcttcttaggtgtattataaaaatgttgtaatacgtatttgttcctcagaatctttagtttgttatgaaagtgagtgaaaacgcaaacgtgggtttgtggggagcgtttgcgttctaaagtttcaagaatcgacgcaaaacgtgagatgtgtttttggtaagcgtcgtgtctctctctcttatcctctgttcacgccattcacaagcctgtgtgaccacaaaatacgacagaattagagagaaaagatagagagatg

SEQ ID NO: 16009 - DNA, 3000 bp, Unknown; identical to SEQ ID NO: 2711
  misc_feature (1)..( 3000): 2750-1469P.txt file - cDNA_ID_1028034; gDNA_ID_1620580; Annot_ID_161121

SEQ ID NO: 16010 - DNA, 3000 bp, Unknown; identical to SEQ ID NO: 12550
  misc_feature (1)..( 3000): 2750-1469P.txt file - cDNA_ID_1028073; gDNA_ID_2214558; Annot_ID_134841

SEQ ID NO: 16011 - DNA, 3000 bp, Unknown; identical to SEQ ID NO: 12550
  misc_feature (1)..( 3000): 2750-1469P.txt file - cDNA_ID_1028073; gDNA_ID_2214558; Annot_ID_185813

SEQ ID NO: 16012 - DNA, 3000 bp, Unknown; identical to SEQ ID NO: 7202
  misc_feature (1)..( 3000): 2750-1469P.txt file - cDNA_ID_1028131; gDNA_ID_1621133; Annot_ID_56487

SEQ ID NO: 16013 - DNA, 3000 bp, Unknown; identical to SEQ ID NO: 7236
  misc_feature (1)..( 3000): 2750-1469P.txt file - cDNA_ID_1028131; gDNA_ID_1621133; Annot_ID_172537

SEQ ID NO: 16014 - DNA, 3000 bp, Unknown
  misc_feature (1)..( 3000): 2750-1469P.txt file - cDNA_ID_1028352; gDNA_ID_2936573; Annot_ID_194815
ggaccaggtccaggtcgcaaatcagtgtaccatccggtttcacctgaaacatttacatagcaagtatgtaaaatgtcaagtcatatgtgcaactcagaaaccaagatggggactgagagctgcaagatgagctcacctttaaccaatacattgtagctacatacttaattccccacgcagggaatagctctttctcaacaaaacttagtaatttctctctatttgtcacccacaaagccacgagagctccttcagcatgagcaagctgcttgatcggaagagataagaagtattggttcggtaaagtaggatacctaaaacaaagaaccaagaaacattggtcatgaactttcagatacaaaaaatacttatccacatgcatacattaagtagataacgaactttgatttctgatgagcacttgcattttcccaaggcggatcaataactataagattgtagccttcttcagatttagctgcatatatgacatcaataagactattacatcgcctaccgatatgataatgactgatcttttctcacatgactcaggaccaatcaacaagaaccagaatactctaaaatctcagcttttagcaaattatctataatggacaatagcacaagacttaccaggaacgaggtttcggatgtgatgtaaatcagacttcaaggcaacatggtaaaaagaactgtaatatcagaagaaccatttcacacagcaactaaaagtttccatttttttatagaatcataaaatcagacaagtaaaaaacacaaaccatgtagaagcaactgtttctgggcattatatatctccggttggaaaactcagcttcaacttcttctccaatctcattcactactaggttattgaacacttgaaacactctctgttcattacaactctcacctatcaagtccacaaaacaccatcaaattcatgggtttcaaatacgatctagcaagtgacatagagaaaccaaaaaaccttcattgtcgcaatgtagattaaaactcagtgttatctcatagaaaggagcttgccacactcctccaagctcaataaaagagacttcatcgtcacaacacttgttcaacaaactagaatcatcatcatcattatcatcacttagacctttcgttaaactcaacaactcaatttcctttagaaaagattcatgggctttcgataagaacagcctcgcttcctgatgacgaagattcgaagcttgctctcctacactaggaaggtgaaagctagagtttttctgcttccgttttcgctttttcggattagactcgctagagtgttgattgagttgcttcgaattgaagaaacgagagtagtaagcagaaggtgaaaccttaaatcgggtatatgaacggttggtgatacgaactgtgtctaagaagaaccaattgaattcgtcggattcgtagataccagaatcaaggaattgagctagcttatcagttttcgccatttaacggctccaacactctctagtctctttgttcaaacaaaaccctcaaagacgacgatagagacagacgtgtaggattattctcattaacccctcgaattttcataattgaccacaattagtcacctaattttgaaatgtaacaagtaacccctaatttagtgcaaatcctctgaaaatttcccggtaattaatggattttgttccagcctctagatttcgtaggtttatgtttaaaaacaataaagaacaaaagaatgaaaattttgatttttatgggaggggaatggtagtaagggtaagcattaaaagttacgaataattgaagcaggcgtttggtgaggggtcgctttgacagtttccccaaatatggggacggttttatttttgggtgggctttgttaactgtgacaatgacaatgactcgataaaagttttggacaaataattgatccaaacatgtaactttcatatagtaagaaaatcatgtatgattgtatgtaacacaaaaaaagaaagataaaatattcatagatcatatcgatcatctacctttataaaacctttataaaaccttcttataatcggtcgaaaaaaggtttttgtatttgcgtctcttgagctcttttgatgataatatcgatgtgtgtttaatagtgttatcattaaagagacacaacattaaatcccttagattttctgtatctaatatacccaattatcccatcgaccaatttgattgctttttagccattatatgagtttaaagtttatgttcaatgtttatcttactgtatttgatccatttatttcacttactaagcagtacttgtttcgtttattttgctgttttgagaacctggttttcataaagtaaaacattgttctcaataataataaaaatctagtaatggagagagcaataattatgaaagaaagaaaattataagataaggacaaagaagatccaaaaaaattcaaactatggaaaaaagttacgtgactaagggtataaccgtcatttaaataaaaacgggtcccatctatctctgtctttattaaacaccagtcaaccattcaggtcaatcgcgtgttctgtaattaccaaaagtacccctccggttaaatccaaacaaaaaaaccggttctgtttttgcataacgcatatagtttcagtacaatgctgacatggcttcttctaattggtccccgtggtgaaaaacctgtctctatcatcctctctttccctcctcctctaccttctctttactctgcttcttcttctctcatctctcttcttctctctctgcttcttcttgtgggacaaaccctaattattttacttcgatatctctccacttttcccgctcaatcatctgatctttccctctctcagcaatgcatgatcttcgattttctatcagtgttcaaagctgaaaaaaatcgaactgggtctgttgatttcttcaggtctaaaatcagattagattagagaagaagaagaagaatg

SEQ ID NO: 16015 - DNA, 3000 bp, Unknown; identical to SEQ ID NO: 2409
  misc_feature (1)..( 3000): 2750-1469P.txt file - cDNA_ID_1028371; gDNA_ID_1620531; Annot_ID_159729

SEQ ID NO: 16016 - DNA, 2396 bp, Unknown; identical to SEQ ID NO: 865
  misc_feature (1)..( 2396): 2750-1469P.txt file - cDNA_ID_1028388; gDNA_ID_1620330; Annot_ID_153633

SEQ ID NO: 16017 - DNA, 3000 bp, Unknown; identical to SEQ ID NO: 7200
  misc_feature (1)..( 3000): 2750-1469P.txt file - cDNA_ID_1028612; gDNA_ID_1621133; Annot_ID_56484

SEQ ID NO: 16018 - DNA, 3000 bp, Unknown; identical to SEQ ID NO: 7200
  misc_feature (1)..( 3000): 2750-1469P.txt file - cDNA_ID_1028612; gDNA_ID_1621133; Annot_ID_172532

SEQ ID NO: 16019 - DNA, 3000 bp, Unknown; identical to SEQ ID NO: 12790
  misc_feature (1)..( 3000): 2750-1469P.txt file - cDNA_ID_1028623; gDNA_ID_2214572; Annot_ID_135089

SEQ ID NO: 16020 - DNA, 3000 bp, Unknown
  misc_feature (1)..( 3000): 2750-1469P.txt file - cDNA_ID_1028801; gDNA_ID_2926230; Annot_ID_142635
tgctagagccataaaaccaatagatcaaagtattgactactttttcgcagaaagatgataacaacatagaattattacagttctgataagtaaacagccagagctttcctgaattcaccttttttggagccactttcaaggtcttctttttgttttcactagcttgacgtgttttcttcctgtgatacaaatttcaaagaaaattaactaacaacaacatggttgattataaacagcccacaaaatgctaaacaaatttgatgaaagttaactgtaacactaacaaaagttatctcatctactatttcttactgacaagattctttcaaaagaacaggcatcaataaattagtcagcatgaactacattctatcctgattccatatgtacattagctactattagccatgccaaatcaattttcccatagcaaatatatgatcgaatgggtttcatacccagagcttgatgacaagtcgagacgaatgcgagctgctgcactagtagaggaagatgcgtctttacttcttttttgtccagaggccttccttcttaccgtgtaaacagaccaaggctcagtaaaatccttgtcactaacacctaagcataagacaattatttaacatcagtataagatagacacagaaaccaattttgcaaaaataccaattgaaaatcaacagagactgagaactagcttgatagcaattttcaatccactcaatattggtgccgttttggaaatttgaagtgacccaattagtgctcttccactataacagaaaacatgataaattcaagcatcaatctaaaccttcttccaataattcctaaaaatacccaaaacccgaaaactaaaaccctagagttgcgaacaatttcaattcagatgaaattccttaaaatttgatacagtataacaaaactggaacaaaatcatcgcagctaaatcaattacccatatcagatcgcgatgtttggggacgagaaggagctgaggccggagaagccagatcagcagacatacggcgagttacgggtctaacgtccgtggtaataggccgagaagcgatttcgggagcagtcgccgaagtattaacatctttgggtttctccttgagcgtagtttgttctactaatctctttagtgaagaagtgagactcggattcgcgaattttacagaagaagatgactgttgagaagatctggagacggtgttagtacaatccgcgagcggtttcctctgtattcttcctccgacggagcgaggagcttccatttgtttacccggcgtcggaatcttgggatgattcatctgaggttttgtgggagaagatttctactctctgttggcgggaatgtgaaaagcacgaaaagaagaagagttctgaagaaggctcgagagagcttgagacgataataattgaggatttaagagaagcccaaattgggaaagtatcgttgggcccatattttttattttatcaactgggcccatgattttgttttgacagcactgggcccatatcataatctattctactacctttttagaacttgatgaggtgtaggggatcaacaaaattattgcttttctttttgtaaggataatattaaatatattgtatagaggggaactgttttttagaagtgggagcaaagtattagagcattatgtatcaaagacttgcgagttgttgaccaattaataaaggaattgcaactttaggtgattgtgatgtgaggctgaaatctttgtaaccaccaagtagacaaagtatgattcagcattgtatgatatatacgtaatttcaataacgattggaatataaagattcttgcatttcgagttatgtgatgagatctttagagttgtgttgaaacacgtaaattgcgatcgtcattacacgagttcctcgaataggttcggtgagagggacagagaatgagtgccatatttcaaaactacacgcattattgatagatatatgctgatgtgtttctttgatggacgtcgcataggaaagccacaatggaaatattgataatgttaactacaaaaaaaagtttgggaatccatataagaaaccatattatacttgagtctctcattcctatgctcactcgagtaggattccaaaaaacggtacacatcgatttttagccactttttaaacaacaaaatatcaaagaatatattggtctcatgaccgattctgaaaattcagctacttactgtttagaattataaaattcaatatgaatagtgatagataagatattcgcaattttgaatgataacaatgtaaaaccgcaaattgtgaaacttttgtccatcattcaaaaaatttagtttttggcaaaacaatccgtgaaaaggacaacattatttatgtatcaatacaccccactacctagtcacctaaagataaaatgagttagttcggcttaccattcaaactccacatgtataatatgatatttttatagattgacatataatatttgtgttttattgttcatgatattctttagaaagcttgaaaataaaatattaggataaaaatagttttctctaagttcatagtcaaatactactatctaataaaagtaaactttgattgaccccatatatataaaaattaggtaattggtactgcaacaaaacatgtgtagtacaaggagacctcatagaattctttgtacttgtactttctgttagtggattttaaagttggtaagcttttttccacatcaggtataactaaccttcctaaacctttatactttattattggaaatatggtaaatgcactaattcataatgttctcgtttcctttacgctaacttctccgaatctttgcttttgcgttactataaatattcagaagacaccatttcttctcattcaacaaacaagcatctcattctctgattcggtccatcgatctcaaaggctcaaagcttaatcgtttcctttcttcttattctagccatg

SEQ ID NO: 16021 - DNA, 3000 bp, Unknown; identical to SEQ ID NO: 16020
  misc_feature (1)..( 3000): 2750-1469P.txt file - cDNA_ID_1028801; gDNA_ID_2926230; Annot_ID_203643

SEQ ID NO: 16022 - DNA, 2630 bp, Unknown; identical to SEQ ID NO: 553
  misc_feature (1)..( 2630): 2750-1469P.txt file - cDNA_ID_1028866; gDNA_ID_1591913; Annot_ID_151683

SEQ ID NO: 16023 - DNA, 3000 bp, Unknown; identical to SEQ ID NO: 12317
  misc_feature (1)..( 3000): 2750-1469P.txt file - cDNA_ID_1028885; gDNA_ID_2214543; Annot_ID_134510

SEQ ID NO: 16024 - DNA, 3000 bp, Unknown; identical to SEQ ID NO: 12317
  misc_feature (1)..( 3000): 2750-1469P.txt file - cDNA_ID_1028885; gDNA_ID_2214543; Annot_ID_185294

SEQ ID NO: 16025 - DNA, 3003 bp, Unknown
  misc_feature (1)..( 3003): 2750-1469P.txt file - cDNA_ID_1028905; gDNA_ID_2213663; Annot_ID_132603
tggttcctccaagtatatgcaccctatgaatcttagcacggccatgctattggattcttctaaaatctagtttaagtgatttctgtcaactaaatgtcaggtcattccttctgtactttgcattgttgttaatgtgttgattaataagttcaatggctacaattagtttaagcatgcaagagagtttttattgtcggtcgtctagtttgatgtctttgcttgttgtatcttgttattttttttattttataaaagaaccgttgtatcttggttagcttagtttagtcttttttggtttgtatgccaattatatcatgtaatatttgaaaacttgtagtgattgatatatgattttcttttctattcgagatgattgatacaactctatatggttaatatgaactacgagcgttaaacttgaataaaaacaaatctatctaattcaacccgaacccgtataagaagaaaacaagattcgataacaagaaagaaaaaagatttgttgattaaagtaaactttgttttcttttatatacgtatatagaattatgaaaaataatataaacctttttttgtctggaaattgaggatctactcgattgaaaccaaaattgagataaacctaatccacattaattgattcagtttaatcaaaaccaaccaaaatgcatgcatggtaactgaaaactcatggctataaacgatagtacttcactaacaaaaagcataacatacatacacaaagggtttcatctcaattaatacagtaatcatttaaagggtatatatgacttatgagccaataattattgttttccgtcaaccatgagccattaattatttgctctaaatgtactgtattctgtatttaggttcagaagagtaataaaccctcgcagctcttaagaaaattgattactaaaataattatcgatattatgatgatatggcgaaatcacgtgcgaaaaatgaatatatgtgagaaaatttaagagtggcagcagatgacttaactctccagttaaaacgcaaccgattttttttttttccctttaatttgaaaaaaaagaaaagaagaagaagtctattttaaaatatgaggagtcacagtttaactcttatttatttctttgccggactatattatatacacgaagaattaatactgttgcatgttattgtaatgatatgtgtctctgtacttttcggaaaaatccttgtcgctatacattactgtggcaacggatcattaacatgtgaaggatgggaagagtacagaagaaagtttgttgaggtattccgcagacattgaaatgtgaataataataaaggaattgagttctagttggtgaagtgggtgaaacttgtatgtacattgtatttaaaatttaatagagagacatagagaagtttaatattctttcactattaaaaatatagtatatatattctttcacaattgacattttttttttttttttttttcacaattgatggacccttattaatttatcatagcgtcaaaccataagccaattttaaattgtgacattcctcgtttatgaaaacacgaaacgaccttattattgataatttgaggtattgagcctttaatctatattcttgaagtttttggaaaaaagaaaagaaaagaaaaaactattttttgaagttttacctgtggataaatctctaaaatcaaagacatgtcagacaaggtaactaccaaaatttcatcactaaattaatgtaagacatttctttgttcccaaaaaaagaaaaaaagtaagacatttcagatattaatgggccagtgggtgtacttttagatttttttataaattaggcctcattcgtattgggcccaatgggctactaaaacagtttcacgattgtttttttttttttttttttttaatttttaatatgtatgtgggatatttggctataaattatgtaaaaaatttcacgatagattgttgaatttttgaatttcgagttaaaatatcttcaaattacctcacatttacaaaaaggtagaactgttgaaaaactaatgctctataaaacactagacaataacaaaatacgtaatgcgtaaagaacctaaattatgattttatttatctttcttcctttttccgtgagtataagccatttttcatagtaaagcattacgaatacgacattgaacactactgacatataaagtagtagattttgatgggttaacttgtatgcttaatttgcttaagcatgaacttcaatgcttttataaaagtacttcatgagaatattcctcgttctatactagcagatgggttcgatagtgattttacaaccgttcaacaaaacctttaaacccaaaaaaccaaagaatgaaagtatctaaacttgattatacatttcttgtctaaattatcaaataacatactctcttttgtttacttataaacgatatgaaagaaataaataaaaagaacatagaatcttattatgatctagaagaattaattaaagaaatatatatatattttttttcatttctactcatgtttcttatacattctttaaatttgttcaccattttgatttacttgttctcatattagtttgttatacaactcacttagaataatgtagattacatttcagccaaattcatgtaaaagatgcttttctttgtgatgtttttaaaatgctttcttttcactttttttctttcttaactataaatcttgatgcaatgcctaccttcttagaacataagatcttctttaaaatccaaaatcgtaggccactatttcattatacttatgtaatatatgtgatacagatacatctatatacaaattaaacacgaaaccatacatgcacggtgtgatcacacacgcacacacatagaaacataaacacgcaataatttctatacagtttaatttcatttttaacttacttctttttttttggtgaagattcttgagagaaaagaaatcgaagatg

SEQ ID NO: 16026 - DNA, 3003 bp, Unknown
  misc_feature (1)..( 3003): 2750-1469P.txt file - cDNA_ID_1028908; gDNA_ID_1620627; Annot_ID_47166
attcttaaaacgatgtcgtttttaagttatagcatcaaatacgtgttattttgactcagcaaccgtaacagttgactattacccattatttacgattttgaattgtgcagtaactgtaaagtccagatataaaattcaaattttttgaagtttgaatatgaattaatcctataatttattcgcgtatgaaaatatacttaacagattttaaggatatgaaaatactttttacttcatatgcatatgtatatacttgtttgaactttaaagtcaatggagaaaatacactagaggttacaggtgctgccgctgcaatgcaacatgtcgtttatatagtaactgatagaaactatcaactaaagtctcatcactaaattttccttaaaacttattacattactcactactacacaatgcattaaaaataacatatttgaaagtatattgtgtatgctaatttttgatgtgtacttaaatctcattattggtatataagtaaagaactttaaaaactaaagataggcagtaaaacaaatcatacataaaatttacgttgaaattagtttgaatcaaatttgcgatctacagttttcgtgtaaaactaatcaaagaaaaacgattcaaaataaccaatatattttgaaatgatgattaaaacttggcgacaaatgaaataaaaataaacaatgggaaaaagttttgtgttgttgaccaattagagaccaaaagactggtttttgtagtaaaaagcagattacgtacaaaacaatttagcgggtgggtatatggaatttaggttcagaatattttcttccttttaggattagggtttgtcttgcaatttaggatgttattggacatctgttcaattatggataggtgggaatagggtttgagtctcacatataaatccttgaattttccactaccatgtacatctatatatgaaacttcataaagtccgatttaacaagtttgcagtatggcgagatctgttttggcatcttagaaacaaagcttaacactaatacaaaaataaatattcgtcaagaacaagagtagatgacaaacaagctaaaggaggaggaaaacaactaagataactagcaaaagatagcatttcatactacaagtataaggtaaaaataataaaggcacaaaaatacccggagaaggcatttcttttgggtctcttcaggtgtctcactcttaaacttcttgatcatcttctcattctcaaaggaggtgtcgctctagtctttacctcatacattcttttgttcattttctctttcttatttttttttttttttcaactttcgtttaatgtggagatttaatatgtaattcttatctaaaagataattaactttttgcttatgttttgcttatttttagtctttttttttgttaatatagtttctttgtttttgtttatttatttttaataattgtagacaaaaataattattaggtttttaaattagtttgatgtttttaagcaatatagttgttggcggcggaggaatacatgtactgaagataaacacagttaaacctttttagtaaccgaaccgacccatttggattgagataaaatacaatcgaatagtttgagtcttagattgggtttggtttgggtcggtttgagttcggttgggttgggtcggttcggttaaaatgcccacccctactttcccatcatccccttgacaaattaataaccaaattagtcataatccaatctttcaacatgaaaaccggaatatgagggtcaaagcggacccattaagagaaaaggtgggtcagttgacacaccttaaatctacaaataaagtttaatgcatgaaatttgttaaagagataatagctaagttggtttatcatgtgtcattgacacccccattatccaagttcaatccttccctatgtactttttcgtaaaaaatttctttttatatattaaacgaaaaaactattgactcaggtaaaaatctttcctgggtccgccggtcaacgaggaggaaacacgacggaatgagagagagaagttggtggcctaatttttgtaggagaaaaaacacacagaaagaaaagtaaaatgttgacaaaatggggttgggaaattgagaataaaaattcaaagaaggcatgcatattgcaataataatgtgcgatttgtcaaacaagtggggctgtgagagagagcgcgtggtcagcacgaagaagaagcaggtacagagttttatcaccagctatctatctttggtttgttcttaaataataatcaaacgccatctctctctattctctatctatcttctccacgttactaccacctaacctctcatccaccttttctcctttaagcatatttcatttcatctccgaaaggaattgtatcgttcctcacacacgcctctcatctcttatccgtaagttttgtttctcttttctctattgatgtacccttttgcccatatttgtgcttgtgaactcgcatttgatcgtttatgctagatctggtttgggtttagtcgtttagatgctcgtcaagctccctttgaatcactagtgctcttagactcttatatttactgatttggaattttgtaattcaaaagtccgagtcttttgatgaacccccgtgccgaccacacgattgctttcaatttgggcttcttcttaattttggtgaactattgaggatttttgcaagtttctgtgtgaatcctagagtagaatgactcaaaaatgatttcttttgattcaattatatgcgattgttaatgtctttgaggttctatgatctggaattagattttggtattatcttagtatatcaaagcttagatgatgtttctttagcatgtaactactattgtccatataaattgcataactcatttaactttcgagcattctctgcgtctcgattacttatatggttcctttgtttgtttttgttcagattcttgtccttttttcagctcaacaagaatg

SEQ ID NO: 16027 - DNA, 3003 bp, Unknown; identical to SEQ ID NO: 16026
  misc_feature (1)..( 3003): 2750-1469P.txt file - cDNA_ID_1028908; gDNA_ID_1620627; Annot_ID_162522

SEQ ID NO: 16028 - DNA, 3003 bp, Unknown; identical to SEQ ID NO: 16026
  misc_feature (1)..( 3003): 2750-1469P.txt file - cDNA_ID_1028908; gDNA_ID_2926186; Annot_ID_140810

SEQ ID NO: 16029 - DNA, 3003 bp, Unknown; identical to SEQ ID NO: 16026
  misc_feature (1)..( 3003): 2750-1469P.txt file - cDNA_ID_1028908; gDNA_ID_2926186; Annot_ID_200652

SEQ ID NO: 16030 - DNA, 3000 bp, Unknown; identical to SEQ ID NO: 11942
  misc_feature (1)..( 3000): 2750-1469P.txt file - cDNA_ID_1028949; gDNA_ID_2214523; Annot_ID_184683

SEQ ID NO: 16031 - DNA, 849 bp, Unknown
  misc_feature (1)..( 849): 2750-1469P.txt file - cDNA_ID_1028984; gDNA_ID_1591471; Annot_ID_151034
ggaaacaaaaaaaaaactaagcagcaaaacacattccacatcaattaatcccttgtgccattcgaatccagaatcgctatacctacaaagacatcaattccagatctctaacctaaccagaataggtgagctgaattacccaatcgaaactcctcactctttacgaattcgaaatcggagtgaaaaatagagttacgcagaatcttacgttgttctcggaagtaatttttgccttgaaggcgacaaccgaggcgatcaagagcttgaccagtctcacggatccaaaaaccgacmgagtaaaatgctctgcctagggttcccattgatcgtcactttcttcgagctcacaggtaaacgaggactcaacactgaatgaagaagacgaaaatggtcgaagctgaagaagagacggaagaaaaaaaatcagcgaaaatggatttcaacaggaacattccgggacggcgaaacaataaattacagttacagtggtttaatatggtttaatcgaaccaaaacaatacgaaatatgaaccaaatctaattcgatatttcaggtagtagtttcattaaaccgattatattattcggtacgaatttattactatattttcactaaattgaacggtccaaaacctgccgaccaaaaatcaaatggccctatcagtaacaatgtcgtttcgtatcgtcgtcacttgcaacgcataacacgtgagaaaagataaacatcgggtaaaaatggcccactggtgggtggagaatggtaataattcagtttaaaagctaagccttctcactgattaactcaatcattcatccgtctctgcaaacaaaggaagaagaatcaagatg

SEQ ID NO: 16032 - DNA, 3003 bp, Unknown
  misc_feature (1)..( 3003): 2750-1469P.txt file - cDNA_ID_1029444; gDNA_ID_1621105; Annot_ID_171547
taagggtgcctttaatgtgtgaacatgagagattttgtgttttcccaaagaaattatagaccatttgatttctattgttcacatattaaagacaccctcatttttaaagacatctcttattttgatgaccaataaggatggttctgtcattttattcgaggaaaaagacacatataccaatattgaagttggtgtagaaccataaaaaaactgtattgcattatgttttacttttaatactcttgtattttactttgaatacttttattcaattatttgtggtttagatgttacacaatctccttagcaagtaaaactttaccctcattgatcccatccagctcgatcatgaatacaacaaccatttgccaacataacaaacatgtgaatcattgcttcttaaagcaactgcggtaacttccctcgtagaaggtatgccatcattattattaaataagattatgcaacttgagcatgaaggttgttttcgagatacatagaaaccaaattcttggatattctggacacataatgtgcgagtgaaatgcttggagcttaatttaaaacataccatcaaaatgcttacacttacattatggttttacaaacttatgaggtgtaaaggcaatgccaagactctatagacacaaaaagtttttcacttgcaccatagcgtatagctctaatggaatcgtcatggaaacccatcaaattcatccaccaaaataactggatatttttctctgtgaataaaacatttaaataaattaaagtaacaatcatattgaatactagatagatatataaacactcatctattctagcaagtttttttttaaagctagaaaatcaatctttgtgcaacaagataaaaaaaattacaatatcaatcttttaggaacatatggagtacaagttactaactacaacgatgaacaatgttgagtaattgtatgataaaaaaatcaataagccggtagggagaaaagagagaacaaaaaaaagtaaacaacttcttaaacacatgacaaaactaggtaaacctatttaaaaaaacacatgacaaaatttatgtgagttagacacggattgaatattataaaatatcaaaatatatgaatatgaatccgaatatgttggataaaaaaaaagaaattatatgttccgccagcgaatatatcaattcagatatataaaaagagttgaaaataataatataagagtatgaaaaactaaaaaaaaaaattattattaatatatatatatatatatatatatcatagaaaagttttcaaaatgattttataaacaagttagaacatcttataaataaaagtaagatttcacactatccttattaatccacttggcaatttatttacaaaaaaaatattttcaattaaaccacaaataaaacacatttaatgagagtcaaatacaatttagctgggttcaaagagagtcaaatatggtagctgattctttagcgaagcaaccgatacaaggaaatgtttcatctgtgtttcatttctatgttccttttaatatttctgatgcatttgcatcgtgactatgtagtatcatgttcttgattaataaagctgatgttcaaaaaaaaaaaaacacatttaatgatatataattaagtcacactattttttggtgcttacatttaactcacactttaatataaaactaaagtcatataaattatatatttactatatttctctacaaaattttattcacacacaatcaattagaattttcaactctcatatttatttttaaattgtaactctatcacttcccatcctacaaatattcattctctcattgactcatcctcttccactatatctcaaatctatttttattttttgtggttgttgttgtatgagttaaaaaaaatcaatttaaataccattgtaaaagcttaattttttcaaaaaaatttctaatgccaatacgttatacttatcccttctttatttttatttattttttatttattttgaattaacatatgtaaaataaaagtttttttttaattgacatatttttatttctgaattgacatatataaaataaaaaattgatggctataacaaaactttcaggtttattctcaaacattaccaatgtgtaattgtaggcttgtagctatgttcctggcttttagctttttggttccaatatgttttgttttgtttttaacatttgtgtattttttgttttttaatttttaataaaatagaaataaaagatttatgaaagacatattcaaaaatataccatacttttctatgtactcgatatttattttagttgatgttttagaataaattgtttttttaatttagatgatatttcaaatttcaatgcaaaattaattagatttcatattgattttggctatttatattttgcatattgttttatcatttgttaaatcatgtttagatagacaataaatattattttcgtttagaactaaacaaaagttaaataaattttttaattgatgtgcaaaaacctccaacatcaacaaaaaaaaaaacacggagagggtaatagacaaatgtggatccatatcgaaatccggaacaataatctgataatcccatgaacttcaggtatcgtatttttcatagcatatcgtatagatctgggattgagggtagaatttcagacattgtgcaccccttgatgtgaacaaatgtggggacaattctaagccacatgtcactatttccttggttgtcttccgaccattaataccccatctcccaaactaacactcttctttaacacacacacacacacacacacaacaacaacaacaacaacaacaaagaggctttaatgttttagtctcttgttcacgtgaaaaaacaaactgcaattggataaccacaaccagaatcgattttgaatcatcatttctataaatatatacgactcatacatacatatacatacctcttaaacaaaactgagatg

SEQ ID NO: 16033 - DNA, 3003 bp, Unknown
  misc_feature (1)..( 3003): 2750-1469P.txt file - cDNA_ID_1029469; gDNA_ID_2684126; Annot_ID_191105
aataggccatttaatatgcaaatatacgagtagatattttagtagtatctctaaccataaattaatagacacgtgaatttccccattaaccgccaagaaaagacaaaagaaattgtagaaaatcaataaattagctcaagaaatctgtaatcatttttaaaattgacaataaaaataaataaatataccgtttatttttcaagtaacggagttagattgatttctataaatagttaaaaatgaccaattcatcttcttcttcttcacaaactttctttctccaacaaatattattcagtgccgagtcaaaattagtgttgagaatttgctgcttctgatcaggtctgttttatttaatctctgtgaattttattacttcttcttgttggatctcataatgcgatttatcagctgcgattaaatctgtttgattgaaatttatgcctgattaggaaaaattatctctaatagtggatcaatttcgtttttttaattcgggttttcttgggttatgcagtgagtgaagaaagtttgaagctttgagtaactttgaaacaatggaggtatttggaaaatctcatgtggttgttggctctgctaatgttatttacttatctgctatattgggtcacgaaggacccaatcacaaatgtgattggaaatgcgagaatgagaatgtgtgtgggaatatgtaccgttgcaaactaactgggttgactcatgtttgtgacaagaactgcaaccaaaggattttgtatgataatcataactctttgtgtcgagctagtggtcggattttcccgctttctttggttgaggaacaggcggttaaaggagtgaggaggaagcttgatgatgagagtcaacaacaaccttctgaaagttgtgttaagcgtcgtcgacgtgatgctcagtttcattcttctccttttgagaggtcttttgctgctgtgagtcctttttgcagccaagctggtggagatggaatggagattaactagttcttttctatctcacctagaataacttgcttttctttttcgttttggacaagtatgcaataagagatatttactcatgtgctcttacagagagtctaggcttagctctctgtctgaagaagcacttttatcttagtattgttgaactctatgtagtatttaacgtaggagagactttatgattctgctactttgttctggacgttcttgttttcgctattattaggtgaagtagaataacacccttgtttcagctttctttctagtgctgtctgatattctcctctcgcaccttttcttagctttgtatcttgtttttgcttgcctcttgtaccattggtcattcttttaagtttattgcgacaggtttttgtcacattgctgaaaattgcagtgtaggtttccaccaagtttttcaagaccaatttctttctggtttgtcatcttgtagaatattcctcttcatcctctcaatggagacattgttgtatcctatactttgttcaaatttaacttacttccttgcagtgattgatgagcactagaagttctgaaagttttttctgtttgtgcaggtttcacaatcttgccatgcaagagagtttagttaccattatttgactgttatgtttcttaattctcagtgtttgaggagtaagtctaacaattggaagcttgaatttttctttgtaggtaggtctatgtttgtgctcagcaggcagcagaggaaggacggttgtcgaaagaaatgatacccgacgtaagattgcggatgaagacacaagtaatctaatatcttacatcaatggaactgcgtgaaagaaaggaaagggttggtgctcttctttgcattcaaaaatggatgattctggtacgtagtagcttatttacaactacttgttctttacttaatatatccagacagtgtaataggggctaaaagaaacatcaaataatatatgcatttcccatgtaatggtaattgttggaatggaaaatgttattttgtcagtgaggaaaattctgaggtggatttatattgaactatatcatataagacagaaaggcgaaggtgtggtggttgatgtgacaactatcttactgggacacagagaattttgcccaaaaaagttggcaaagtatcaattgttggctcgtcctctgctataaggtacaatgctggaacatttctccttagctattgattattatgatggaggttatattcaacttagagcaaaatatgtgaagtagatcttttgttgtttgaagaaatcaatgtaatatctaaattatgacatattcttacagtcttctgtgcctttcaatctgctacaatgctttcttcaactttgcagaaatctgtacacattctgattaatctttgacgttttcttaatcgaatatgaattaagtgttgtttcttctgtatcaaatccaggttagaggatgaaccgagcagccaaatcttcagaagttcagaaccacctagtccgaatcataatcagaatcaaaacagcaaggtgtggcagtggctccctaaggttagcatcaagatccaaacctaataccttgagcatcatcaatctacagagttctccctccacattcagcggcattttcgtttgtttttatagtaaccactaagctcaatctactgaaacaaaatatctcgttgttgatgatattatacaaacaagtaaaatgtctatttgagcttctttcatgcttcaaacatcatctaaattcagacacaaaacaagcttctctatacacacccaacttttttacctaaaaagaatggagaaattgagcaattttcagaaatcagaactgagtaaaatgtggcaaagacgataaatgggcttttttcaggcccagcatatcatatataacccaatgggagatgagaaggagggagagataagactgagaagcagagaaccgaaagaagaaaacaaaactctcgaagtcgcaacagaaaagaaacgagagagatatg

SEQ ID NO: 16034 - DNA, 3003 bp, Unknown; identical to SEQ ID NO: 16033
  misc_feature (1)..( 3003): 2750-1469P.txt file - cDNA_ID_1029469; gDNA_ID_2684126; Annot_ID_137196

SEQ ID NO: 16035 - DNA, 2707 bp, Unknown; identical to SEQ ID NO: 2529
  misc_feature (1)..( 2707): 2750-1469P.txt file - cDNA_ID_1029535; gDNA_ID_1620552; Annot_ID_160338

SEQ ID NO: 16036 - DNA, 3000 bp, Unknown; identical to SEQ ID NO: 9117
  misc_feature (1)..( 3000): 2750-1469P.txt file - cDNA_ID_1029576; gDNA_ID_1971986; Annot_ID_177720

SEQ ID NO: 16037 - DNA, 3003 bp, Unknown
  misc_feature (1)..( 3003): 2750-1469P.txt file - cDNA_ID_1029586; gDNA_ID_2214595; Annot_ID_135473
aatttcgacatcaaacaaacttaatatatatatttgatatttgttaattcaaatcagatcagtgcaacgaatcagaaggcaagaaactaaacatgaccatatctctaacatttcctttaagatacataaatttcctcatcacaccttctttcacaaacccaactttttcaagaaccttttgagatccaacattgtcaacgtcaacaagtgcctcaagcctctgcatctctggcttctccttgaatatctcccccgccacaagcctcaccgcttcagtggcgatccctttcccccaatacttgcttccgaggacataaccaatctctcctctgatctcatcgactggcgttacggagatcgagccaatcggacggtcgttatctaagcatatagctctaagccaagggtgtggcaaaagagcgtcgtttaagtacgcgatcgcggcttctcggctagtgtaaggctcccacgtgcaaaagcgtgtgacgtttgagtcagtggcccaaaccatgaaatcgtcgacgtcggaaagagtcattggccggagatggattttctccggaggtgaggaactcacggtggatagggtctccggtttgatcgtagtagttgagtccatctccattgactttttcttggttactttcctttttgagtctttgaagcttctttgggattctttaaaataaattatctctctcaattcttacagatttgtgtagaggcattatgataatacttcttctacaaatcacgatttaaatactgatttttttttaacaaaaaagaaaataaacagaacgttccttcttgcttcgatcggtcaaatacgcaacaattagttcttgttgaatggaaggtgtgaaaaagacggtttataatgggtatgggtgaaccgtatatttaccatccattcatcgtttttgatttaaaagaggtatattcaatctagtatttaaagtgactttcgtaaattttacaagtatatgttatttaattatggattttgaaaattctaatgaaatctagtgttattaaaataataatttaaaaatctacctttaaattcactgttattaaaaataatttatggatttgatttttataagaatgtattcaatctaatattttaagtgatttgtgtaaaatttataaattctatgttgttcgattatggatttgaaaaactttaatgaaatctagtattattgaactaaagatttaaaattctatcttaaaatctattgttattgaaaataattggtagatttgattcttattaattttgaaggatttgagaaagttctttagttaaaaataacaaaatcgaaattcatggtcttatatagaattttaaaatattttataataaatcacatcaattttcctaaaatcatcaaactcatataaaaactagctaaaactcaaattgtaaggtccaaattaatgagtcaactcaactcaactcaactcaatccatgaaccctaatgagttgaaaattttgactcaaatgagttgatgagtcaaatgagttgatgagtcaattggtttgatgagtaaaatgagttgggttgtaatggttaatggtttcaatggtttatccaattaacccatcaaattttgtaaaattgaattaaaccaactaaaatctctaaaccaatgccaatttaagtctaaccaacacatctaaaccaatttaataaaattaatatttttccaaatttcttaaatatacaagcgatgaaattgagaaaaagtaaacccgtaatttttccgccaaaaacgtaaatccgtgattttcccgccaaaaacgtaaatccatgattttcccgccaaaaacgtaaacccgagattttcccgccaaaaacgtaaacccgtaaaaagtggaatccgtaaatatattaagttttgatgataatgaattaataatgataattatttattattattttataataataattaattaaattattacttaaatgggttaacccatttaacaactcaacccattaaattaaatgagttatgggttgacttaacccatttaacaaaatgagttggatcaacccataactcatttaaccctaaactcatttgattatgagttgagttgagttgtgttacccattttgacacacttagatctaatacacctctttattaattttaaaggatttgagaaaatttaaaaagatttatttagttacatatataaaaattcaaatctcatatttttactggaatttgattttttttttttacaataaatcacataaaaagacattaaaactcaaaattatttaaaatataaggttcaatacatattttgtcaataaaaatttaataagctgctaatatagttcatgagaaaaatcaaaaattaatttatcaatcgaaaaaaaagacgaagaaaaattaatttatctacgtagcgcaagagacggagtgttgtttatttaaagaaaagaaagaaaaaaaaaagaacgaatattaaaatggcgagtcgctctcttttctctatctcaatctcaccttctcaatttacagttttgccatccatcaacaacgagagacgacgccttgctatcgccgctcgatctcaccgactatcacgccggaagattcgtaagagacctcctgatagagatatgtcctccatagtttcaatcccggagcttcctcgccggcgggattctgaggaaagcctgcttttagattctcgaatcagtaagttcttaaagcaacagaatcctcagaaattggcatttgggattaggttttgcaagtatcgaagctccattaactgaatcctcagaaatgtgtgtatatgaataggtgtagctgaaggagatacatcgaatacagatgtagaaggagacagagatactacttctagtattagaacacagcctccccctcgtaaaggaagaaatcttagtagcagcagaatcaaattctacggtgttgaattatcaccagataatgttgctgtagcaatg

SEQ ID NO: 16038 - DNA, 3003 bp, Unknown
  misc_feature (1)..( 3003): 2750-1469P.txt file - cDNA_ID_1029586; gDNA_ID_2214595; Annot_ID_186886
aatggattaaatattttaatactgttaatatttgtggtgcaaatgatcgtaatcgtttgttatatactgtcaaaatcaactcaagaatcaagtcactcaacatgttgtatgattaagtaatttagctaaagattaattaatcgaatgttatcagaattccattcatctatcgctgtaaaactagctatcacactatctttttattgtataaaatatttcatgtttagattcaaaaagaaaatatatatatatatatcatgtttcattttgtacttttaattttcaatataaacttacattttttctgagatagtgaagctttgttttatttggtgaagtgaacatggtaaatagtaaatacattactctcaaattataaaaaataacttttgtatgaaatagttaatatataaggttacaactaacaattacataagaagaagaaagatagagcatcacatcaaattatacatgtgatttttacaaactaagcaaaatataaatttcgacatcaaacaaacttaatatatatatttgatatttgttaattcaaatcagatcagtgcaacgaatcagaaggcaagaaactaaacatgaccatatctctaacatttcctttaagatacataaatttcctcatcacaccttctttcacaaacccaactttttcaagaaccttttgagatccaacattgtcaacgtcaacaagtgcctcaagcctctgcatctctggcttctccttgaatatctcccccgccacaagcctcaccgcttcagtggcgatccctttcccccaatacttgcttccgaggacataaccaatctctcctctgatctcatcgactggcgttacggagatcgagccaatcggacggtcgttatctaagcatatagctctaagccaagggtgtggcaaaagagcgtcgtttaagtacgcgatcgcggcttctcggctagtgtaaggctcccacgtgcaaaagcgtgtgacgtttgagtcagtggcccaaaccatgaaatcgtcgacgtcggaaagagtcattggccggagatggattttctccggaggtgaggaactcacggtggatagggtctccggtttgatcgtagtagttgagtccatctccattgactttttcttggttactttcctttttgagtctttgaagcttctttgggattctttaaaataaattatctctctcaattcttacagatttgtgtagaggcattatgataatacttcttctacaaatcacgatttaaatactgatttttttttaacaaaaaagaaaataaacagaacgttccttcttgcttcgatcggtcaaatacgcaacaattagttcttgttgaatggaaggtgtgaaaaagacggtttataatgggtatgggtgaaccgtatatttaccatccattcatcgtttttgatttaaaagaggtatattcaatctagtatttaaagtgactttcgtaaattttacaagtatatgttatttaattatggattttgaaaattctaatgaaatctagtgttattaaaataataatttaaaaatctacctttaaattcactgttattaaaaataatttatggatttgatttttataagaatgtattcaatctaatattttaagtgatttgtgtaaaatttataaattctatgttgttcgattatggatttgaaaaactttaatgaaatctagtattattgaactaaagatttaaaattctatcttaaaatctattgttattgaaaataattggtagatttgattcttattaattttgaaggatttgagaaagttctttagttaaaaataacaaaatcgaaattcatggtcttatatagaattttaaaatattttataataaatcacatcaattttcctaaaatcatcaaactcatataaaaactagctaaaactcaaattgtaaggtccaaattaatgagtcaactcaactcaactcaactcaatccatgaaccctaatgagttgaaaattttgactcaaatgagttgatgagtcaaatgagttgatgagtcaattggtttgatgagtaaaatgagttgggttgtaatggttaatggtttcaatggtttatccaattaacccatcaaattttgtaaaattgaattaaaccaactaaaatctctaaaccaatgccaatttaagtctaaccaacacatctaaaccaatttaataaaattaatatttttccaaatttcttaaatatacaagcgatgaaattgagaaaaagtaaacccgtaatttttccgccaaaaacgtaaatccgtgattttcccgccaaaaacgtaaatccatgattttcccgccaaaaacgtaaacccgagattttcccgccaaaaacgtaaacccgtaaaaagtggaatccgtaaatatattaagttttgatgataatgaattaataatgataattatttattattattttataataataattaattaaattattacttaaatgggttaacccatttaacaactcaacccattaaattaaatgagttatgggttgacttaacccatttaacaaaatgagttggatcaacccataactcatttaaccctaaactcatttgattatgagttgagttgagttgtgttacccattttgacacacttagatctaatacacctctttattaattttaaaggatttgagaaaatttaaaaagatttatttagttacatatataaaaattcaaatctcatatttttactggaatttgattttttttttttacaataaatcacataaaaagacattaaaactcaaaattatttaaaatataaggttcaatacatattttgtcaataaaaatttaataagctgctaatatagttcatgagaaaaatcaaaaattaatttatcaatcgaaaaaaaagacgaagaaaaattaatttatctacgtagcgcaagagacggagtgttgtttatttaaagaaaagaaagaaaaaaaaaagaacgaatattaaaatg

SEQ ID NO: 16039 - DNA, 3003 bp, Unknown
  misc_feature (1)..( 3003): 2750-1469P.txt file - cDNA_ID_1029685; gDNA_ID_1621146; Annot_ID_56761
gtagcgagttcatagaaaactggatccagatctgtgcaccggccaagaacaggatcaagcaggattgtaaagacctaagctttgaagatcagtgcaccaactgtgagaaggtacgtaagtcgtaacaagacaagacaagacacaatctttgctctgttttttctaacttttaaagtagaaaactgagattgtctctcatgtgtgagcaggaagccgtgaacgtgtccttggggaatcttttgtcttacccattcgtgagagaaagagtggtgaagaacaagcttgccataagaggagctcactatgatttcgtaaaaggaacgtttgatctttgggaacttgacttcaagactacccctgcctttgccttgtcttaaaagattcctcctactcaaatattttctctatgttgtttctaattatgttcttataatcttcttctgttgcttctgtaatgtcatctttgctacttctattccaatagaaatgaataaagctttaaagagcatttacttttatttccaccctcattaatacaaagagaagataacacttgctatgcttatacacatagatagataaaggctactacactcaagccagccccttaaggaatgggataaacaacgaccttccctgtggcatggttcgtttctaagtatgaaaaagcatcagcaacgcgtgagaatgggaacggtcctttgggatcaaccacaggcttcaccttcccactctcaatatatgggttaagtttcttcaaaacatcgccattagatgtaacaacgaatcgaaaaccaggaggcgtgacagctccagtcaatgccacaactttccctccttccttaatcaccttcactgccttatcacacatcccttttaacaacacaaaagatgctctaatcagaacgttttgttgcaacaaattagatatgtgttaatggtgttgtgttttgtttgtttaccaatggcgtcaaagacaacatcgtacttgtcaggcaagtcttctatattctcctttgtgtaatcaatagctaaatcagcacctaagcttctcactagctctagcttttctgtactcgcagttgcagctacttttgaagctccatacacgtgcttcgccaactatatcgaacacacatatgagtaatcaatcaacaacaattaatctctgattcttagattacaaggaaccaactattacctgaatcacaagactccctactcctccggcaccattaagaacaagaattgactttccggctgagaattcagtcctaactaaaccttcatcagcggtttctatcgccaacggaagccctgcagcttgcgcaaaatcgatgtttttaggttttaaagctaataacttctcttccacggccgtgtactccgctaaagaaccaaactgctttggaccttccaatgctttctcgctcacgttagcataaacttcatctccttctttcaaatccttcaccgcacttcccactttcaccactactccggcaacgtcgtatcccggaacagtctactccgacgaaagattcaaaatgttaaagaatccgaaaccttcaaaaagagtgagagagagagatttgaatttgcatttaccgggagaggcgaatcagtggctttaaatttcccttgccgtctcttagcatcgacgggattaagagccgccgcaacaactttaatcaaaacctgatcttctttaatctccggcacaacaatgttactctccagcttcagaacatcaactccgccgtagtcactatacacccacgccttcatctctttcggaatcgaagcatccgccgtgacattgaccgccgctgaagcgctctgagagctcgccgagattttcaagaatttcttgctgactgtttgcacgcaagatccgaatctaactctgttgatttggtaaaccggcgattttgttgtgagagaacaataatgaagaagaggcgtctcacggcggagtacgggagttgtggcggtggttgttgcaagcgctgcgttcatttttcagtctgccactagttttgtctaaaaggcttatctctttcgctttcctctgtttttaaaatactctgtttcgtggctttctttgattggttgatattttcttgtggttgtcattttaatgtttatatcacaaaaattgtggcccataatcgtttttgatctggtgctgattttgtgattcatctttgtttcatttcttttagaactacagaagtctagaacaatcacaaaacacttcggtttttgaacattacaatgtacaatttttacgtaagaagatacaatcgacattaatgggcctaaactttaaattgggctttatgaataagcccaacagttgagaaaacgcagtactaaaagtcgatcatctaggcacgatgagattaaccatagaaaccgcgcacaacgaagcacgatcagtacacgtgttaaattatgattgggtccttggtagagattaaagatccaccgtccatttccccagaactagaaaaaagagaagggagaaaactttctccgagctcgattgtttttggaaatcgtcaatcagatatttctcgttcgtctccgccttcgatttatccaaaggtaagctattgataaaaaaaactaaatccctgatatttgattttgaatctcttatactcatacattgctgttcatgtgttgttgtcttgatttcaaatctgcccagctttttgtaataatgatgcatgcactatgtttaatgcttgagttcgatttccctttgtttcgggttttgcctcattgttataactcggtcgaaagtcatctcctttacatgaaatttctgttgttaagattatatggaatgtccttcattgttctgctttctaattcttgtgtcaatcttatctaaatcttataaatcagcatttgcattagaagatttgatctattttaaattggttaagaagtgaaatgattgattgtcaatgcaggctcttgttattgaaaatg

SEQ ID NO: 16040 - DNA, 3003 bp, Unknown; identical to SEQ ID NO: 16039
  misc_feature (1)..( 3003): 2750-1469P.txt file - cDNA_ID_1029685; gDNA_ID_1621146; Annot_ID_173049

SEQ ID NO: 16041 - DNA, 3003 bp, Unknown
  misc_feature (1)..( 3003): 2750-1469P.txt file - cDNA_ID_1029952; gDNA_ID_2214654; Annot_ID_188720
cagaacctttcaagaaaatttctggccggcaatgaacaatcttctgatcaaaaactgtattagtatatgtttgatatataaagtcgtcgagtagaagttttgagcaaatctttattgcttattactattagcctgcaagaaacacacaacaacaccatctgcattagtataactgtatatcatattatatcttccccaagttatagtgatagtgaaagaaacctttttcaggaatttttcatggatcttcaacgcttctttacatgcttttttggcgtcaagattacccgcaatgtctcctagtatctgcataccaactttaactttgaagttccagagtttgatttttccttgtttggctttgagagaaacgagtgaaaagatacagagacagacctgaacaacatcgtctaagcctttggcctccttcaagagacgtttgttctttgtctgtagaacgcttgcgaccacaaaaacagcaagcgtgttgcgatgttgctcgttctgcccactgtttatgtatttcctttcaaacttgccataccgttttagtaacttgggatcggatgctgcgttgtttcggttttctagttcctcgtacgttgcaaacatggttggattgtactccatcgcccacatcagctgcaaccataatccatctcacattattctcattacccaaacagcagataacgcaaaaaagaagaagataataaacacacagcaagatcttacggcttcataaacaatcacggcaagtaaaaccaggaaccaagaaaagaaatgcagaaagtttgtcattacctcccaaaggtacaaagcgtcaaggaaagagaattctctcctgaaaagtaccatcagcatccgaatagcaaatagatactccccaccatcgagatcctctgtcacattaacacgttttagcccaccacaagaagagtttttatgataggaaaacactcttacctagatgttgatggagacgaggatccactgtcttaatgacctgtgagagcacacccagttgagtctggacacccattgatgttgctgttgccctgaaattttctctctgaaattcaaagaaaacaataaaccgtgaatacaatggtctggtaatgacatgaaacatgagaagttatgtcataggctattagttattactagtctccgcattgcccgctcaaagcaccagaaagcgtcgccttcatcatcaaagaggattatcattggggaacatatatcattcattcctacatgaatagacaaagtggatcagttctgtttcttatatagtttcaaaagattaatcgttaacagcaagtacacttaccctgaacataaccaatatcaagattcaaccacgtatatatggcaagaacgtcccatagttttgattgattacgatcattctcataaaaacagagataccgatctgttctagcaacatcaaggcctgaaacaaaatatacaagaatatgtaaaaagaggttataagaagataatcagatagaactaaacttatttatatgtaaaggcataccgatctggtgtagtgagagcatccattgtagcactctctcatctgtaacagtgtttttcacgatccatccttggttttctacagaagattcgtctattgggttcccattttcttgaacgactgccattgtgacgtacttgccactaccaatgacaggaaccattttcttacattcttctttccatgcaccgtactgctcccttagatgatcaataacatttaaagttagccatgacgtgcatctacaaaactagtaaatgatcaaccaattctatagtaccttctgcgattcctcagtatgttcctttcctcaaaagtgctgtctggatcgtagcatcctaacaaaaactcccaaacagcgcctttgatggaaggatgaattccctagcaaagaaaccaagtgaacaacaacaaaaagagcatatagatagaaacaagatcaggaaaagaaagtagactcactccgcgctgtatacgtctaagcactttttccatatccaaatggccatcttcagtaaaggcagcgtgccatcttctagcacttagagtctttccagcctgacaaattacatatcaagatgaatcatttcatcagctacaaacaaacaaacaagaacctaatgtatcatcaattcatcaagacatgaaacaggtgattgagaagaagaatggtacccttgatttaaaacgggtcctgggaacatctggttgacattcaggtctaactggatagaaaccttgcaaatcttctcctccggatttccacataaatccgcagcaaaacattcaaccttccttcttcttgttcaaaccaaacttatagtttcatccatctcccacataaatcattcatggattcatcagaccactgttcaagaaataaaacccaggatcagaatggagaaaaaatgaaaactttacaaatatgtaaacgaaaacacaaggaagatatattctttttgcaacgacgaagctcccattgctcaataatatatataaccttaaaatcagtatcagaacaccatcatcattatcatttggataatccagaaaccgattagacccaacaatttgaaattgtctacagagagaatacgaacaaaagaaaaatacatacagattgagatcctaaacagccggaatcttcagagacatgcccgtcttcttcttccatctttcatctttcatctttctatttctagcagagtactttcctttttaaccgaaccaagccgattttattagctccgatttcaaacattaaaccgatcggtttcggtattcttaaacgacgtcatgtaatctctccacatttaatgggcctttaaaattgttagtgggcttctatatgcttatgtgcctaattcttttatatcaaaaaccctaataatctcttgggcacataaaaatctcttcgccgcacaattgctccaatctgtttcttctagccggccaaaatg

SEQ ID NO: 16042 - DNA, 3003 bp, Unknown; identical to SEQ ID NO: 16041
  misc_feature (1)..( 3003): 2750-1469P.txt file - cDNA_ID_1029952; gDNA_ID_2214654; Annot_ID_136474

SEQ ID NO: 16043 - DNA, 3003 bp, Unknown
  misc_feature (1)..( 3003): 2750-1469P.txt file - cDNA_ID_1030309; gDNA_ID_1620396; Annot_ID_155780
ttgtcttcgaataaaacgtctcgcttttgttttgttgttccttttccatgttataatatctcttttgggatgcagtaccgagataaccgttgtgcaagaatcaaggaaccgtactctttgtcaaaaatcatgtttcatgagtttgaccattggacctacttcatgtattcatctaaaatagctaaatattctatctctcttttctttccaacaacacccaaagatgaatttagaattttataatgattttttgccaatttagagggatcgtattcacttatagatttgtatatttttataaataaactaaattttataagaaattagatttgaactcgtccgatgtaccgactttaaaacttttaaataaaataaatttaacaagaaaatatattaaaattttattgtaaagaaaaactatatttcggaaataaataaaaacatttggagtaaaaaaagagttatttaatggacttggctagtttttaactagcaactcaaaagtgatttagttgaacgaattttgtttaaaccgactttgacaaaaggctatcaaagatgaatgatttgtgttgattatgtgactacaatgccaagcaatggaggtacttattgcttttgagactattgaatagatttataagtttttgtaatgaggttgaaaaatatttgcaagtacaaaatcctcctcaaataataatgcaagccttagattctcttcatgccttaatttcaatcaatcagcatggaattttaacagaaactggagccatgctttctaaattgccagtggagcaaaaattgggtaagatggtaattttctcaaaacgatatggatgttttgaggaagtaataatcgtggcgatacgaatgttctgaggaagtaataatcgtggcaatggtttgaggtacaattatagagaaagggcttgtgattcagatcgtctttcaatgttatttgcctatgagtcatggacagaatctaattattctgaaaattggtgcaagagaaacaatatgaagtattatcaaatgaaacttgtgagggatatgaagagaagattgaaggaaaccctcgagaaacttcaaataaaaatatatttcaagaggaatgatatggatgttgttaagaaatcgattatatcatggttttttctcaactctacaacacttgaaagagatggtttttataaaacacgaaagcatgtgaggatagaagttgatccaacttctgtgcttaacgaggtaagttcttaaatactaacaaagtttgtgaactaaatcaacagtttagttgattaaatttttttcttttgttttacctggttcaaaagcctaagagcatttcaatggagagagttctcattttgttataaattaaaagaatatttatgactctagacatttatggagagaggtttagtttttggtcataatggtcataatgtgttctcgtccctccactttttcctcataccttatggttcaaggccatatttgttttgataataaatgtttagtatgttaaaacgtttttatgactaacattttattaaacactattttctcttaattgaatttattagtagtttcctcacactttatgaatttattattagttttaattttaaattgtcttttaaaattcaatatcgtatatttacgttttttggtggagtagatcaaattagcatggatatacaagcaactctatgagatcacatttacaagcaactctctcaagatgtaattgaagtttgaaggacaatttaatgtatcaaaaactattaaataaaattagtttttactttaaaatagaccaaaaaattgtttggtgataagatttatattaagaaacttttattaataccatcattataaacaaaaattgatatgataataataataataataatcaaaactgctgaaaataggttgcaaaacgtggcttatatataaaacagttcccaaattgaatcgaatttaatagtttattattttttaaaagtgtgtataccctacaagatttggtatcaataaacattgttattatatgtttcaaaaaaattcttaatgtttcaaaaatttgtttaaccttctctaaggccgaagtaagttaacgatttgcaaccaggcccatttatgtcacatataatggcccataaattcacttcaatcctaaaaataaaaatctaaccttcataatgggcaaaataaattacgatcgtattcaggcccacaaatacaaacaaaggcccatgcttttaagtacaaccctagaattagaaaacgttgatataaataagctgtcataaaattgagcttcttcttctctgaagccgtatcctagggttttctttgcacactactcgctccaatggtgatctctcctcttcctctttcgtcgattgaccatgaaaaccatctctgatattattattgtggaactttttgagtattgcagggaaagggaacagggagtttcggtaagaggaggaacaagagtcacacactctgtgtgagatgtggtcgtcgtagtttccacatccagaagagtcgttgctcggcttgtgcttacccagctgctcgcaagaggacttgtaagaactctcttcattgttttaaaaaaacattctctgaagatgcgtttcattttctcgatctagatttgcttttgtgtgttaatattcattctccatgatcgtgcttgagtctgatatgcatttggaccaatttgtatattcgttctctaacagaagaagcttatctatgtagctcgattgacatgtctattagttttgtttattatagcttgaaatgtttaaactttatcagttctttaatgtctttgcttcaattgattggttggaatttgagggattatctatgttcatttctgtctctgagctcaattcttgtctctttggttaacagacaactggagtgtgaaggccatcaggaggaagactactggtaccggaaggatgaggtatctccgtaatg

SEQ ID NO: 16044 - DNA, 3003 bp, Unknown
  misc_feature (1)..( 3003): 2750-1469P.txt file - cDNA_ID_1030333; gDNA_ID_2926130; Annot_ID_196882
aaatttctgttaggagggattataatcgtggttgctcttgttgctcaattctacaacaagaagtttcctgagaacagagactttttgatctgctgcatcggattatatccttttgattcccatttgatttgctagggttaagatgaaattgaattgaatttgataattgtttccttgtgtatggcttgattggtttgtgttgtgtgcattagattttgagatactataatgtctattaggtatgaatgttatgtataatcagagaaatttctcaaagtctttatcttttggatataatttttgaataagatgtgggatttgtttgcttcttgactttggcaagtatgtggtgttgactgcggtaatgcagctgattctgtacattaaggagaagaacgctatcttgttcacctatcctcttgaggtttgttctcttgactgcttagaaaatgtggttaggttgtgtgcttttgggctacattcttgtttttgcttgtatcataaccagggactgttgtttctgtgattcggtgcatattttctcttcataactagaactatattttgatgtccttctgttttgtaaccacttagaattgttcttctgctagcttcacatgtgttgtagagttctcatatcttaggtgatcttggtgtttggcatttgagctatagcaggtgctacatctccctttcactccactcattctaaaccaactttttctcaatgtgttacttgattcgtcgatatcttgattattcggggtgtggaagttcgtgtaactcttggtatttgtgattctggcgatgtcttgttatatgagacacacttgttcaaaatgattctggaatttaatgttggtgtttgtggcttttgttatttgtctcatcagctggaaaaagtttcccatctcaattaatttgtatacgaaaaaatgcgatctttcaaaacatttgattagttctcattatggttaaggtcagaataggcaacaaagctagagaactccatttgttttgccatttcagtttctatgataatttggtttgcagattattcatatattttgctactgttaggacatgtatatttggttgttttgctgacttgaaattcggatggttaataatatgcagggatcattcaccagcactggtttggtggtatcttccaagttacctagattctctgatcagtacactctaaccatcgacagtgctgatccgcaatcaatctcagctgggaagtcggttcagttcaccaaaagtgtcactcaatggtctctttctttctgcatttttcatacacgtgctcacaccatatcctttgcattgcgtaagctgttgattttgtttttgtatgtgtattctaggctcacaaaagatggagttcttgtcgagggtttattctggaaagatgttgaagccctagtcaaagagtacacagaagcaggagaaccaaagaagaagagatgatcatctataatgggaaaagtatgttgctccttattagttctaaatgttacattttttttatgactaaaatcgatggtgacttggtttaaaagacgacagagtttttgcctcctaacagaagattcattcttataaattggaaccaaattttcaaatcattccgagatttttacaaccatcgatcttatcatgttctcttatttggaaatgttgccgtaagctagacttgttcggtcttgtctggcctaattcagttattttgttgttattgatcacttaagaaaatgttatgttgggctggtctggtccaacccaatcagtaataaacaacttaaaatattagttttcaaaaaatccgatctgaactgaatttgtgtctgtccgacattagcttttaaccagagtaacacttctactctaactaggtatgaccaaaatttaaccataaacatattttgaaccataattgtattgtttttaaactggaaccgaatcgtaacctgtcaattatgattaaaaccgaatcgtaacctgtcaatcgtaatcgtaaaatggttaaaaaccataatcgttaaccgtaaaaaatagaataattaccgttaaaatatatattaattgtaactgtcaattaaccataatcgtattaaaaccatagttaaccgtacggttaaccgcatagttaaaaccttaaaaatacaattttaactatttataatgcaaagataaatatcaaatgttcgaataaagattttcaaaaagtaactaaagttgcttataaaaaaatctacaacatacttttcattttcttaaaagcaattaaaaaaaagtcggatgatacgtaagattttgccttcagtattaaatgtatcgtaaccatcaaataaccataagcatatttaaccataattgtattcattcgtaattttatataatcgtaaccgttttaaccgtatatataataattaaagttatgtttacaaaaaatttgtaactataattattagttaataaatcgtaaccgtaataaccgtaaccttagtgatgcctaaattctctcattaaagcgtagataaaccggtgttaaaccatgaaaccatgagattttttccccctctcatttgtgaagttgattctaaaatttaatgaaaaaataatactacagtaaggtattaatgggggtggaatatgaagatattataagcttaggaatattaaaatagaacaagaacaaaacgtcactccacaaggaaagttactaaaattgacaaaaccacaagtaccaacaaatctaagttttgtattcctcctttttaagttacataattccccaattcctccaccatatcacgcgcccacgtgaattaaccagacaccacaaaccacacacattagttataacctccacgcgcttaatcagcgcgtataacaaatgaacgtctctctagcgttgttcgttttgatatcttctcgacttctccacttctttagatttgattcttcttctctgatctctgaaaaaacacaatg

SEQ ID NO: 16045 - DNA, 3000 bp, Unknown; identical to SEQ ID NO: 7996
  misc_feature (1)..( 3000): 2750-1469P.txt file - cDNA_ID_1030333; gDNA_ID_1621181; Annot_ID_174293

SEQ ID NO: 16046 - DNA, 3003 bp, Unknown
  misc_feature (1)..( 3003): 2750-1469P.txt file - cDNA_ID_1030432; gDNA_ID_2214528; Annot_ID_134215
ttcttttctttttttatgtgaatgtaacaacgattttatgtgaattaatctaaccctctcttaattgtgtttctgcaagtatcttgaggacgtcagtttcaagaaggcattgttgagtaggactccacttggtcgtgttggagagccaaatgaagttgcatcactagtggccttcttgtgtctacctgcagcttcttatattactggtcagactatttgtgttgatggaggtctcaccgttaatggcttctcctatcagccagaggtttgagtatggtcatgtctcgttctttttgtttgtctagaattttcagtgttctctcaaataaaatatttcaaactatgagtatatgaataaaaaaataaatatatcataattacattatggatatacttacaatgtatctctcatacatgaaaatgttctattccatcttgtgtttactactaacttactaagtgaaaagaagactctgtttttatgctctgttttgttgtaaaccggtagacttagaaaagttgggacctcatagttgaacccaaaataacaaaagtgaatttcaaaactagcatatatataatagagactcaaaataaagcaatcacagagagataaacccaaaattcaatggatggcaacgagaaaaccttttgtgaccaactacatgatacattgatataccattttatgacatactattaattaataaatgctgtggtgtgcccataccggattcatataaatgtttatacgactgcatagcatttccactacagtttaaactctaccacccaaataccaatttttttttttttttgacattggtttcaaggaggcattgttgagtagaacttcacttcgtcgcgttggagagccgaatgaagtttcatcactagtggtcttcttgtgtctccctgcagcttcatatattactggtcaaatggtcaaaccatttgtattgatggaggtctaactgttaatggcttcacctatcagccacaggcttgagaatggtcatgtcgcgttctgtttgtttgtcatgaattctcagtgttctcttaaatcaaatctctcacactatgagtatatgaacaaaatcatatacaatatcacaattccattatggatattctcccaatctatctctcatacatgaaaatgttctatttcgatcttgtatttaaataatgttaatactctgttttaatttgtgtatcctgatttttttttctttttgaagttcaacaaatatatcaaaataactcagaaccattactattttttcttagttcatcaattctttactacacatagaaacgtatttatcttgtttgatctactttgactctatatatgtcatgtggcatctctggtcattgctagtcacaggtaaaagtaaaaattgatcaaagataaagagtctttcatggtaaaaattctcttgtaactggtggagatagtagatgtcaattcgtttgcaataacttacatttgcaataacatgtcagccatatttatttaaatttccatgcatttgatattattttctctctaatacatatatgatgtgttacggtcattctaaaaatccagttgacagcataatgaagctggtacaccatacatgcacttgattatatatggatgttactgccatgattgatgttttgatggaattagtgttaaaggatggaccctcactaacgcggttggaaattatgatcaaactcttcaatgtcacttatcaagagagctaatgactagcacgtttagttgttctgttgtttcttatggctgcttaatgtctccatcaaatatttagacattgtggctagtaaaatgccatctaccttaatcctatatataagtataactagataataatccatatttttgctgggtttagtagctgatacgacgtttatggttgttattgagtttgaatacaaaatatagagtattgttggagttatattgatttttgttcatattagttaacaaataataaaaaaattaagaaaggtttttgaaaatgcatcttctagaatatatgtatattcgaaaaagtcacatctttaattgacatatgttttgtttgtttgttttttttactggccacacaaattgacaacaatggtcatgcatgaaatgaaatgtttgttgtcaattttttttactaacttgtaatatcattatgaaatgaaatagaaggtatatattacaaaatattacctaaaagtagagcaatcttagaaaaaaaaaaaaaaaaaaaaaaaaaagaaaaagaaaaagaaacaagattacaatgcatttaaaaagagatggaaagaatccgagctatcgaatccaaagaagcatcagcttcctccatctgttcttgtatcgtctaccagagatggtgttccggatctctcgatcaatattcttaaagatggttgttggagggatcctttggctattatggagaacattattcgtttatctccagatgtgatagacaaagggctgtgtggcctgtgagaccgatggccacttaattattggttttttgtcaatggttgtgtatgcatagaaattcccacaaccgtttgtggcttaacacaatttaccaggggtttaagtggttaaattgatacatgtagatctaaagttttatgctaatataaattagttttaattatataaattttaactacgctcatgacacgtaaatggtagaccaatatgtggtgctctattaactaaggggtcttcattattaattcataaagactttctttactatacaagacttgtcaaaaggaaaagtagtattttcgtactacgtctacccctctcacggatatgtgtggtcgagcagtcattatcataatgtggaattttgaattgagcgaggtttcaaagttcaaaactatcacaactagtcttgatcaattctatataagatctgtgatcttggttgaagaaaagaatcgtcgtaggttgatatttaacaaggaatg

SEQ ID NO: 16047 - DNA, 3000 bp, Unknown; identical to SEQ ID NO: 6516
  misc_feature (1)..( 3000): 2750-1469P.txt file - cDNA_ID_1030500; gDNA_ID_1621096; Annot_ID_55689

SEQ ID NO: 16048 - DNA, 3000 bp, Unknown; identical to SEQ ID NO: 6516
  misc_feature (1)..( 3000): 2750-1469P.txt file - cDNA_ID_1030500; gDNA_ID_1621096; Annot_ID_171036

SEQ ID NO: 16049 - DNA, 3000 bp, Unknown; identical to SEQ ID NO: 6516
  misc_feature (1)..( 3000): 2750-1469P.txt file - cDNA_ID_1030500; gDNA_ID_2926164; Annot_ID_139831

SEQ ID NO: 16050 - DNA, 3000 bp, Unknown; identical to SEQ ID NO: 6516
  misc_feature (1)..( 3000): 2750-1469P.txt file - cDNA_ID_1030500; gDNA_ID_2926164; Annot_ID_198976

SEQ ID NO: 16051 - DNA, 2614 bp, Unknown; identical to SEQ ID NO: 2218
  misc_feature (1)..( 2614): 2750-1469P.txt file - cDNA_ID_1030508; gDNA_ID_1620505; Annot_ID_159007

SEQ ID NO: 16052 - DNA, 3003 bp, Unknown
  misc_feature (1)..( 3003): 2750-1469P.txt file - cDNA_ID_1030553; gDNA_ID_2214460; Annot_ID_132971
aggaaaaagaatcataagagtcagaattaattaattacctgatggtaaattcctgcccagaagagaatcagagcagtataggttgtgaagaaagcaagactaggaatatcaagcaagatatgttgcataatctacaagataataatccaagttttgcaaatttagaaaggctgacatagaaatgtttcaagtgtttaaatttgtttttggatcatagagtttttttttaagtttataccaattttcaatgaaaaagtagaaaccatcctacatatatgggattctccttaaactttctgttattatccatgaatgttttactttaattaaacatcaacatttttgctatatgagagtaaagttttgtgtgggaaaaaaaaaagagagcaaagtttggtaaaatattattttttcatccctagctattacttcttttgtattacatatcaatgttttgtattatttgtaaaaactctgttagttattctttttcagatcttattgatacaatttaggtattcattttagtaatataaacacacataaaaaaaaaatcacatcaatcaatttttcatttaaagcaagtataaatgtattaactaaaagcagaactaaaaaagttacgaatcaaatttagtaaaaaagaaaagaaatcatactcaagcgcaaaaaaaaaacagaaataaaatcataattccaaatctaaatttttttagttttcgacgaaattgagagatttgtttttaataactggataaataatcttaaatattcaaaagttaagatcaaaatcagtttaaactttaaagactacaaactttcaagagagccttaaactaaaaatgatgatgaagacccttgaacctgtgaatgcatgttaagcacattccgcctgaagacaaatacaacagccctatagcatatatctatagatcatcttaaaaacattacttcttcttcttcttcttcttcttcttcttcttcttcttcttcttgatgaatgattcctctctttttagggttattatttaaagccaaggactaattgtgatttgtgaatccaaatgtttagttctgaaacctcacctaatgtctcgaattcagagtgcatatgatacttattggtttcaactgttttccctatcctccatgtctgttttaaatgtggccttcttaaattgtaggtgatggaaaagaatattgaacctattagtgagaagaaagacatgcacacaggagatgtggcttctccaagtctgaaggaaaattcttcgcagcttgagagtaccagggacctaattatggttgccgcaaatactaatttatggagggagagcttgtttggttctgctaaggtgacacctagttatttcttttggttggtgctctaattattcccatcatcatgcagaagattgaatagttttatcaagctgttacgttccagtccagcaagaaccatagtttatgcaaacaagatttataaaagaaccttaatcattgattttagggtttatgtaccagaaaactgaaaacaaaacaaaagccagaatcgtgaaatagaaaaagggcttttggatttgagaaataacaaatttgttgaagctctgaacttgaaaaattatggcttttgatatgcggaaacaataaaattgaaaccctgatttaaaacgtataatcataaaagagaatctttgaaattagaaaagattgattttgctcacaaccaaaaaccaacaataaagtatttacaggtttcaaatgcatgacattattggactagaaacaacaaccaccctgtcatgtaattttacaaacttgcaaacaaatcatcttccaaagatgaagtattatcacacacacaaggttcactggccaagtatatccgctactgatttcttgacaattttcgaaagctcctgtctgaaaaaataaacaaagacttaggttaaacaaaaacaccagcattcgatttcataaccgcatttaaagaaaaaaaaattacctgtccggtttgaacaagagatatcgatatgtgaaccactgcagaaatggagatatcaaatgctagaagaatcaaggatcataacatttatacttattgagatgataccaagccttattacttaccgtggagaacaagataccaactagttcgaatccgctcgagataacgggcaatttgtcgattgcctaacgaagaaaaagaacaagtctttgtcatcaagtctcacaaaattaagcacaacaaaagataaaagttttgagtcttttcattactataccgtgatgagattcaatgatgcccaaagagctacaataccagcaaaacccaaaccaataagacctaacctatcttcagacttatcccactgcaataatttacaaatttaaaaaatgtccaaatcaaaactaaggcatatatgtaactgagaacagagtctaatgtagggtttatagagatttagggactcacaacattctgaatcgtactaacaacgtcgagatcagtcgatgaatctgagctttctccactagctttcaccatcagactgatgctgctagggtttcgagtaagagataatggagaaagatcattcgtacctcgagttagagaaaatgggagtttttgaatcgatgtgagattggattttctctgtgtgagtaacaatggcgaaggcaaagttgcagaaattgaagccattctttaaaaaaataaaaagaacagaacaaaaaaattgaaactttagagattttgattcgattttggagacagagacgaagaaatttttggttatggattagagatagccttatctttttataatccacgtggcatttcctaagtggcatatcaaatctcaaagatgacaacccaattcgccacgtggcagaacaagatctatcaaatgagtgaagaagattctccactatacaaattacatcaatccactcacttactttggcaacaaacaaacaacaacaaagagagaaattaacatg

SEQ ID NO: 16053 - DNA, 3003 bp, Unknown; identical to SEQ ID NO: 16052
  misc_feature (1)..( 3003): 2750-1469P.txt file - cDNA_ID_1030553; gDNA_ID_2214460; Annot_ID_182730

SEQ ID NO: 16054 - DNA, 3000 bp, Unknown; identical to SEQ ID NO: 3645
  misc_feature (1)..( 3000): 2750-1469P.txt file - cDNA_ID_1030715; gDNA_ID_1620654; Annot_ID_47826

SEQ ID NO: 16055 - DNA, 3003 bp, Unknown
  misc_feature (1)..( 3003): 2750-1469P.txt file - cDNA_ID_1030715; gDNA_ID_1972176; Annot_ID_180025
agatggttcggttaagttcggtcatggtgatggttcggcttatttgttcgatcctgatatttataccgatggacggatttcggttcaagggattgacggtgttttgttcccggaggaaaaaactccggtcgagaagaaaaccggcgttccagttgtcaagaaagcacctaaaccaagaagaggtaatcaaattttgatcaatctttagtctattaatttttgtccttacctatttgatcgtgacattttaaccccaaattatagaaattaaaaaaatacataccactactacaaaaatacaaaagttttggtatagacaccattacaaagttataaagtcactcgcttagggaattttttatgttctatgattttgtcatattaaatggataactaaatcattgttatagaaagataatggtgattagtccatatacaattagtctttcaacgagagagtactaagtaaacaagtgagatttggaaaaagtacaaacgtgtgagaatggagacaaagtctctctaacaaactttgatataatatataaaatttcaacaatattatacaaaattttggagataattaggatttataactacttaatgatccaccgacgaaagtatcccatgttaaagtgaatgaaaatcacaaagtgttcctttttctttgttttttgttctaaagccaagtatgagtcatataatcatattgtaataaagagagaaaattttctttatttatttctaaatatattatttttgcattagttagaaacaatcattttaatagtccttcgttgttattgttaataaaacaaaaaccaaaccgtttgaaaaaattaataatttgtatgatttatattatattgcaggtaaattgatggaagtagcatgtacaatgctgggatcacaatttccaacatgtcaatgagatcaaattaaatccgggacatgagaattttataattctgtaaacatgtgataaaaatgtgaacagaaaaaagaaataatgtaaatgattatttttttgggctcgttgcaatatgattgttaaattgtaattttcagttgttttgagctgacgtaaccaaaccagattgggtgggtcttttcttttctgttggatgctactgtattggatcgaatctgtccatttagagatcttctaatggactactagattaagcagccctaggtggtaggttatgcattggaaatactgtaaactgtaaaggcaacaatgtccataactctaagaaaataatccatctaattcagaacatcaatatacccaaatccagttttagaaacaaagtaaaaacagtataaaaaaaaagccaaaatgtgatgagaagtcacatgtcatctcgagttgatattccaacaagttgctaacattaaacaacatgggatagcatatttgatattccaattcacaacatgagcatgcccggtccacaactcaagctacccaaacaatggctaagatcatcaaaagagatgagtaaaaatacaaaatattataggtatttgttattaattcattttttgttggtcttttttttaccatatcacatgagttttaagctttaaagttaataaatactaattaagcggattggtaatgaatttttagtaaaattttggttagaaaaaaaaaaacgaaaacaaattttttcttcttctttttgtatgaatataaaactatattcaaaaagacgtttgcacaaaattttaatttcgattgattccattgttatttatttttatgttggcttggattccattggtattaaggtaagtgattttagtgacaaaatggaagaagttgctttgaagaaaaataattgaaaacaaaaaaaaaaaattgactattgtttttattttcttacaaactatttatggatttaaaagttgttttatcaagttttagtatgattttttttatattatattattagtaaatttgcgagaaaaatataaagagcatggtttttttctttacgtaaacgttcaaaattatcagtccggctctaaacatgagatagtagattctaattctcgtcatgagatcgtagattctgattgacaacaagagataggagattcctgtttacagtatgagattgtagatttcattcacaacatgacatcatagatttcaattcacaacatgaagcaaatcattaattattttcaaatgtcataccaatctcgtcttctcgaatgtttggagcttcatgaccaacctttgagtaaagagcattacaaagtcgtaatcgttttaaaaacaagttaaagatttcgtttctttggatgattttatgaatagtataatacaaatttacacaactcaccacataatatcctttgtatgatccaaccaatttcagatggagaaaatatagttgcatgagtatctacaatctaagacacaaagacatagatggatctaagggagactgaactcttgtataatggattcacaatcacaagaaacaaggagagaaacacaaattgaacgttattatttccagcttaatggacttgaagaatgaccatcatgtttgtgcctaatctgattttctccaaattctttagaattctctctttgctaatcctgaccaatatgagaaattcaccatttttttgctcataggtgctatcaataacagtttcaagtttcaacaattcaccatttatataacattaccaacagtccaacactagtaacataatcaccaaaatatattagtaataaattttcatcacagctttatatttttgtgattagaaattaggatcttacagaaatctttcaaaaaaaaattcataacagttccattttttttggtaagattcataaaaaaattcaagttaaatgcattttataaaaatgtaggaaaaactttcatcaaaaatcgttgagaagaacatacagtatatcttatccactctcttcctcatccacgcggcaaaggcacaaacctctttagaaaaatg

SEQ ID NO: 16056 - DNA, 3000 bp, Unknown; identical to SEQ ID NO: 3645
  misc_feature (1)..( 3000): 2750-1469P.txt file - cDNA_ID_1030715; gDNA_ID_1620654; Annot_ID_163601

SEQ ID NO: 16057 - DNA, 3003 bp, Unknown
  misc_feature (1)..( 3003): 2750-1469P.txt file - cDNA_ID_1030924; gDNA_ID_2214566; Annot_ID_134964
caccgtgtacttctgttttcacagactcagcaaatgcttgacatcctcgagagcttcttggttgcaaatgagtatagttaccggaggatggatggtcttactccagtgaaacagagaatggctttaattgatgagtttaataattcagaagacatgtttgttttcgttctgacgacgaaggttggtggtttgggaacaaatttgactggtgcgaacagggtcattatctttgacccggattggaacccctcaaatgatatgcaggtacgttttactttgaatgtcacagattcagtgtgcaaaaaacccgtcgtggccataaataacaatcaattttctgcttttttgggcaggcaagggaacgtgcatggcgtattgggcagaagaaggatgttaccgtttacagattgatcactcgtggcacaattgaggagaaggtatatcatagacagatttataaacattttctcaccaataagatcttgaagaatccacaacagagaagattcttcaaagctcgggatatgaaagatcttttcatcctgaaagatgatggcgatagcaacgcctccacggaaacctctaacatcttcagtcagctggcggaagagataaacatcgtaggagttcaatcagataaaaaacctgaatccgatacacaacttgctcttcacaaaactgcagagggatcctcagagcaaacagatgtggaaatgactgataaaactggtgaagccatggatgaagagacaaatatcttaaagagtctctttgatgcgcatggaatacatgtaagtacattaataagtgctcattgaaggttcttctccgacttactttcccataatttccaattcccttcactctcttacaatttttaacacagagtgctgtgaatcacgacgccataatgaatgcaaacgacgaggaagagaagatgagacttgaacaccaagcatctcaagtggcacaaagagctgcggaagcattgcgccaatcacgaatgctgcgtagccgcgaaagcatctcagtgcctacatggacgggaagatctggttgtgcaggtgcaccatcatctgtacggaggagatttggatcaactgtcaattcccggttaacccagactggagacaaaccatcagcgattaagaatggaatcagtgcgggtctatcttcaggcaaagcaccatcttccgcagagcttctcaacagaatccgcggaagcagagaacaagccattggcgttgggcttgagcagccacagtcttcattcccttcttcttcgggttcaagcagcagagtaggttcgttgcagcccgaggtcctgatccgaaagatatgcagctttgtacagcaaaaaggtggaagtgcagacacgaccagcatcgtcaaccatttcagggacatagtttcttttaatgacaagcagttgtttaagaatctcttgaaagagattgccacgcttgagaaggatcaaaatagatcgttttgggtcctcaaatcagagtataaagactaaaaaggagatgttttggctgcctctactgttcaagtctgaagacggagaaggcaacattggctccacacatatttgccaagtattctctttttctttataagctcacgcacttcttaacctttttttttaccagcaaagtcacttacacttcaaagtctacttttttgttttgtttaacatgatgttaaataaaaaagtaggaaaatcttagtaaagagagcacaactatgaatcttttattgaccaactcgaaaggcagacaccagttaagtaacagtaaaacaaactctcaagtgtaaagactaaagataggttttcttgtgtttgaatgttggtgcaggcaggtcgagagaggttgggatcgacctaccgagtaacttatgaagaacttgaatcaaacggctgatgtagattactcttatttggaagccgtattgagacgaagtggttgaaggtagagttttcatcagctacaatctctcaattcttttactcctggtggacggtgaaccaaattaacactcagactcagtcattgtgggttttcagcgaccagagtgtcagtctcagcttgcttggaaaacacttggtttcgctccgcaagaccagctaattagcaattttcatgagtcatgactccacaaagcatgatcaaaatagcaattgtggtgtgattcacaattgctaacatccctaggtgtgaatattgattcagcctgctcctgagattttaactcttgtaatgattgctcaaacacaagcaacagaggaagttatgagagctagaaagtaactcttgtaatcttgttttaaaacttctaaaaaatgtatatttgtcaatatattaatgtttggacccaaaaaaaaagtcaatattgttgtttttgttaactttgatattactgaaatttcttgtacgaattaaatcgaattagtgtgattacaagtaatcaatcgaattactgtaaatctgaaccaatcgatttcggttcaagttggtaggtataaattaccaatttagaaccgtactcaattcaatgcgttgttgactcatcataacttattaacttgtgcatatctgacgaaaatacccttgtctaattccaaaatatacaagaaacccttatcagtcccaattctcacaaataacaacaacaatttcgccggcgtcgtcgtcgtcgtctctccatcaccgtctctgctgcattgattcgcagcactgagtcctaaatttccagtattcttctctaattctttcgctgtttcattgatctcaattttaaaattttctctttttttttttttttttgcattcgcattcgttttatgatcggtgactaatttcacttataggcatcaattctattcaattcctcttcttcgttttatgattgatggtttgatctccaatttgattgtatattgtctgatcttaatagtggtaaattgttatgttctcaaggtgtaaaaaaaatcagaaaatg

SEQ ID NO: 16058 - DNA, 3003 bp, Unknown; identical to SEQ ID NO: 16057
  misc_feature (1)..( 3003): 2750-1469P.txt file - cDNA_ID_1030924; gDNA_ID_2214566; Annot_ID_186017

SEQ ID NO: 16059 - DNA, 3003 bp, Unknown
  misc_feature (1)..( 3003): 2750-1469P.txt file - cDNA_ID_1030940; gDNA_ID_1620717; Annot_ID_49130
atagctgcactttttggtctggaatgctttgcgtggtactgtgcaggagagattgtaggaaggggcttcactttcaccggctactacccttgaagaaagaaagcaaccccctcataaacaaacatgcgtttcagatccattgaataccgaaaagcctttttatatcataattagcggcttattatctatctcactgctgacattagaagcaaagttaatttctgtttctctggataatttatacacaaaagttttgaaggtgaggcatcatcactcgtgctagctctaataatatcagtcgactaatgttggccatttggttttttctttgtcattttcatttatgtgaataaccatttttcttgggtttagagtctataaaccgtttggtaagatgtatcattcgtgaaacctcagcacataccaaccttaccagagaagagtaagacggcattatattataaaccgtttggtaatatgtatcattcttcttctatcacaaaaaaggaagaaaatcctatatttttgacaattgtctgaaaatacgattaggttcagagtatttcaacgttgtctctgtcatttgtctatcgcaatttcgcataaaagcaagccttgtaggtgtagaagccatcacaccagattgtagtggatgatcggaaactaagacttcagtcatctggtattctcctctctctctctcgaccggtcctcactataagtcttctctttgtaacatttttgtgatcattttggatcgttagttttgtagttgttctttttttttatgagtgttttgatagtgaacataaacttgattcataagtcaactgtatgctcaatcaattggtttttgaagaagttagttctaagaatcaagcaattggataagataaaatcagataaaatctacacgccttttatcaaggcaaagcttatagtgtttaaagctgttttccttgaaaacttgaaagatctacactttcagaaaaaagttgtaaactgcagcaacccataatcaataaagaaccagtagtagttttcttcagttatgcaagcaaagattatatgaattagcatggctatttaatatatgcttttttccttgagcagagactttacagtgtttgaggaacgaagattgtgagacacaatggctaaggatgaagccaagggattgctgaaaagtgaagagctctataaagtttgtccttacatactcatctctacgttagttcacttctccatttctctgatacatttctgtgaaaaatgttgtagtatatactggagactagtgtgtacccacgcgagccagaggttctcagggagcttaggaacattactcataaccaccctcaagctggtatggctactgcaccagacgctggccagttgatggggatgctgctgaatctggtaaatgcaagaaagactatcgaggttggggttttcactggatactctcttctcctcactgctcttacgctaccagaagatggcaaggtatttgcatagatatgaccaaaccaaaagaaaaagtgtcatgatgtttttcgttgttttgcttctgtatcatttctgcaactgatttggtacacgagctctgcaggttatcgccattgacatgaatagagactcgtatgaaataggattgccggttataaagaaagctggtgttgaacacaaaattgatttcaaagagtctgaagctcttccagccctcgacgagcttttaaacaatgtacaacttcatacttctttgtctttcaaaaaaagaattagtatgtatcctgagatggtctttttgttttgatgtttgtgatgcagaaagtgaatgagggtggattcgacttcgcatttgtggatgcagacaagctgaattattggaactatcatgagaggcttattagattgatcaaggttggtgggatcatagtgtatgataacactctctggggaggatcagttgctgaaccggactcgtccacgcccgagtggaggatagaagtcaagaaagcaaccctcgagctgaacaagaaactctcggctgatcagcgtgtgcagatctcgcaagctgcgcttggcgatggtatcactatttgcaggaggttatattgagcgagtattgttgttctttgtgatctttagggtcatatgattgtgagccctttatattgagctattgtgatgcaagagtgttattgttctatgtgatattttggttcctgtgtgaatgtgaaccttttctatcaagtttgtggatttcttcaaatttcaagattataacagacagttacgaagaaacacaactcattttatgttttgtgtcttttggcaaaactccaaattctgaacattgctctaaaatctaatataaaaagtaaaaaaatgaatggggcgttccgagaatcgaactcgggacctctcgcacccaaagcgagaatcataccactagaccaaacgcccacattgatatatagtttgctagcttttaatacaatgtatattaaataatttagttttgtgatataaacagtaaacagaacaagatattttcacccaaagttaaaaaatccaacgtttgttcaaaaataagaaaaaaactatccaaagttaaattatcaaatgttaaaaatcgttagacgttaatcacaatataaaggaactcttttttttttttttgagttaagaaacacttagttgggccataaaaatataggtctagtagatgaaaggcccataaaatcaactagggttagttcttcttcttatagagcgccgcatataagcttcatccttctccgtcaccaccggctctgtatttcggcatttgtggagagaagaaggtactctcatccctttctctttcttatcttaatctccttttttaaaatttgtgacaaagtaaaatgagctaatctcgtctttaagatcatatgtcaaaactgaatttgagttttgatatattcaggtaaagagagaagatagaaacataaaatg

SEQ ID NO: 16060 - DNA, 3003 bp, Unknown; identical to SEQ ID NO: 16059
  misc_feature (1)..( 3003): 2750-1469P.txt file - cDNA_ID_1030940; gDNA_ID_1620717; Annot_ID_165678

SEQ ID NO: 16061 - DNA, 3003 bp, Unknown; identical to SEQ ID NO: 16059
  misc_feature (1)..( 3003): 2750-1469P.txt file - cDNA_ID_1030940; gDNA_ID_2926188; Annot_ID_140908

SEQ ID NO: 16062 - DNA, 3003 bp, Unknown; identical to SEQ ID NO: 16059
  misc_feature (1)..( 3003): 2750-1469P.txt file - cDNA_ID_1030940; gDNA_ID_2926188; Annot_ID_200822

SEQ ID NO: 16063 - DNA, 3000 bp, Unknown; identical to SEQ ID NO: 11275
  misc_feature (1)..( 3000): 2750-1469P.txt file - cDNA_ID_1030987; gDNA_ID_2214487; Annot_ID_183536

SEQ ID NO: 16064 - DNA, 3000 bp, Unknown; identical to SEQ ID NO: 13073
  misc_feature (1)..( 3000): 2750-1469P.txt file - cDNA_ID_1031052; gDNA_ID_2214595; Annot_ID_135475

SEQ ID NO: 16065 - DNA, 3000 bp, Unknown; identical to SEQ ID NO: 13073
  misc_feature (1)..( 3000): 2750-1469P.txt file - cDNA_ID_1031052; gDNA_ID_2214595; Annot_ID_186888

SEQ ID NO: 16066 - DNA, 363 bp, Unknown; identical to SEQ ID NO: 386
  misc_feature (1)..( 363): 2750-1469P.txt file - cDNA_ID_1031100; gDNA_ID_1564626; Annot_ID_149775
  misc_feature (52)..(52): n is a, c, g, or t

SEQ ID NO: 16067 - DNA, 3000 bp, Unknown; identical to SEQ ID NO: 3898
  misc_feature (1)..( 3000): 2750-1469P.txt file - cDNA_ID_1031118; gDNA_ID_1620673; Annot_ID_48183

SEQ ID NO: 16068 - DNA, 3000 bp, Unknown; identical to SEQ ID NO: 3898
  misc_feature (1)..( 3000): 2750-1469P.txt file - cDNA_ID_1031118; gDNA_ID_1620673; Annot_ID_164160

SEQ ID NO: 16069 - DNA, 3000 bp, Unknown; identical to SEQ ID NO: 3898
  misc_feature (1)..( 3000): 2750-1469P.txt file - cDNA_ID_1031118; gDNA_ID_2926200; Annot_ID_141461

SEQ ID NO: 16070 - DNA, 3000 bp, Unknown; identical to SEQ ID NO: 3898
  misc_feature (1)..( 3000): 2750-1469P.txt file - cDNA_ID_1031118; gDNA_ID_2926200; Annot_ID_201775

SEQ ID NO: 16071 - DNA, 3003 bp, Unknown
  misc_feature (1)..( 3003): 2750-1469P.txt file - cDNA_ID_1031198; gDNA_ID_2926195; Annot_ID_141250
cacgtattcaagacggtgaattaacacgacgtggcaaggtatgattggataacttacgcagctgcctaacaaaaacaagtgatttgagttttcagatgattagaaggaaaaaaaattctggaactttcgagcttctgttttgcggtgctctcaaagcttatatcggatctcgaatcttgaatcggactcagaacctcggatcttcgaaaatcgacgaacatgtcttctcctggcgagtgagttccgttcccctctattgaaactttgcttcgattcgattttgatcgagagattcttagcttggtcttcgtacccaggattttgagtccttaggttaataattttcatgattcgtttagcttgtataggggtttttgaagcattcaactgttgattcttctcaattcgagcgtaattttgcaacaccaagcgagttctgtgaacttgagctaacgctatttttagtatatagttatcaatttgcattgtcatcatttgatattttggtgatttgagatgtaaagaaacatcttttatgccatggaagttagtacaagtcaactggtagttagttcttgaaatatggaatctcatagtgtcttgaagcaaaactgttctcgtttgctgtatcatagttacaaggctactttgattctcctagctacgatagtctaaaatatctctgcgtaggcttgtctcttgtggtaaagttttatgctttagctgatcttgatgacatttcctgattagaaatttatagatggatggaatatgtatgattttgattgtttatctgtcaaattgtttcttagatcgcttgttattgattgcagattctataactcacttccacctataaccaaggcttatggtacgttgtgctttttcactacagtagccacgcagcttggcttagttgctcccgttcacattgctttaattcctgaacttgtacttaagcagttccaggtatatgatttattcttttttatgattttcctttctttctcacaaatctctgtcatcctaagttcctaattcattctgcaatttttgatctatttggtgtttgtagatctggaggctgataacaaacttgtttttcctcggtggtttctctatcaattttggaatacgtcttttgatgatgtgagcatactattttcacatatatagatgaacaaagctaatttcgatttttattatcttaacatactcttttaaatgattgtgcagagcaagatatggagttcaactcgagaaagggccatttgaaaggcggacagcagactttttgtggatgatgatctttggatccttcactctattggtatgtaaagcctcccctgtattctattcttactgatcattgttattggttctttgagaaccccagtactagtatgtggtatgccacaaagtagataatcgctggtacataatatcccaaagctgagaagatcagaagctctcaaagaattgaatcagggttgcattttattaaagcgagacaaaattttggaaggtattcatactagtaaatccgtgtgttaaaacagttaccttgttcaaatttcaggtattatcagtcataccatttttctggacaccgtttcttggtgtttcacttgtgttcatgcttctttatctctggagccgagaatttccaaatgccaacatcagcctatacggtcttgtcactcttaaggtattgaaagtgtttcttttgtaatcaaatccactccttggtatatataatgttaatggtgaaagttggaattactccacaggctttctacctcccatgggcaatgctagcacttgatgttatcttcggttctccgatcatgccagatcttcttggcatcatagctggacatctatactacttcctaacagtccttcatcctcttgctaccggaaaaaactacctgaaaaccccaaaatgggtgtatcctttattcaaattctcgattatttccagatgattgtttctctcgcttctcagtttttgttttgctgttgtaccttgacattctcaacagtaataaaatcgtagcaagatggcgaattggagctccagttgcaagtgttcgacaagcaggtggtgtaggagcagcaggacccggagctggaggaggagtaggaggaggaggagcttattcaagcgctcgtgccccacccgagagttcaaacacagcattcagaggtcgatcatatcgtctcaccgactgaaatagaaatcttctcgagtttctttgttttcatcatatcaaatctttttcaaacaatgccactaactaatcccaggtagctttgtgttttcgaacagtacagtttttgaatatatgactctgtaggaagaatctttgaggttttaatacaatgttcttttcaaaatgtggttcatgtttctatgtttttgtttttgtctagcaatcatctccttactaaattgaattcgataaactatagccactatgaatataatcaaatgaaatttgtgacataagaatttggacgtaacgagtttgaatatctatctagataagttattaaattcgtgaccaaagagtttggtcgtaacaagtttgaattttttaggacataatattattattggctaacaagattacgactaacgagtaaataatcattccttcggtccttcctctaaaatgccgttggtgatcgtttataaataggggaaataggaaaagggaagaaagtagacgtggcaaatagcgaaacaatgattgagctataacaaaggcgaaacttgagcggcactaattgaaaatcactccttgtttttttgaagaaaaagtaagatgtagggctgagaattcgtctatgtgatccaacggttttaaaatgatccttgttccttcctctcctatttatctgaaggacgaagtccccacgctgcacataaccggggcacttaacgtatagatcataaacaaagaagaagaaaaaaaataagaaaagaagaagaagatg

SEQ ID NO: 16072 - DNA, 3000 bp, Unknown
  misc_feature (1)..( 3000): 2750-1469P.txt file - cDNA_ID_1031299; gDNA_ID_1620314; Annot_ID_153103
atgtaaatgtaattcgtatttagtatgaaattttgatttttaatgaattaactctaaagacgaatttcctaccatgttttatattttaaaactaccataaacaatcaaggccccaaaattattggaaaagattcaatcaaggccccaaaattattttttttcggtaaggtagtcaattcgtgttgtcgttatagaacatgtggttttgtcaaaaaaaaaaaagtttaaaatcaaatttaatgtgtttataaataatatagttcttcgagacggatcggtctctccgaaatgaatccacgtgattgtgaatgaacaaaggcggtaggtaaggtagtaaataattgacattaaacactaatattataaccttctcgtgtacaaaaacgtggggtttaatatatatggatatatataatttatgcaggccctggtccagagcatcatatgctagttatgatcctatctacttattctgtagattataaaatagcagacttgcatagaaacataacatgtattacaaacttgtttagtcaaacttgaagaagaaaaaaaatctttttaaagagctttgaagatccatggcgatgtctcatgtccagcctatgctactcctcctcgtatcactcttcttcttaccggctttgcgtggcgccatagatttcgaatactgcgccagtaagtatctatttgttaagtcttcagttacttttctatatgatttttgtgtgtttattagtttataaatgaattataaattcagatagaccttgatttcatagattctggcttgctcatggctctgttttttgtttcttttagtaaaccaatatttgaactctttgacatttgaattggattccaattttttttaacctaccggggactcgtaagttatagcttccacaattaatatatgcgactgttgcagaaaatggaaacgattacggaaccgtcactagcattgtggtctctccatctgttgggcctcacgaaaacccaaccatcactataaatttattcggttctgcaagtaagtaacaattaattttatgatctagtttcaactctctctttttttctctagttttgaatattttcttgataaaatcctttatatatataggcaaaaacatccccgcgggaacccttgtgtacgtagcctttagagatggggaatttaccggccttttaaaaacttacaacctttgtgatgtgagtgcatgtaacaatgaagctgagattgaagctggcaccaactttgagttaactctttccgacgttctttatgttggttatgatgaggtaactacatttctactcttagcataggaaaataaaaagcatgaatgaatgtgaattttccttaatcctaggaccaatgtttcaaacccaaggttggactaattaaataaccgtaattgaccggcaaaacccctaaaactagtacaaccggttcacattggtttatttatttttcattttcatttttatttttattttttcaagacttggctttatgctttaacatcacatcttctattagaaattttttatacttcctttttctcaacacgtttaattttattttatatttcttataagttatttagggtatactataataattctgttgatatttaagatttcactttgatattgttattttgagtttaactacaattccatgcttacaaagttaacttcaaaagtaatgtttttggtttcatgatgttatatatttctcattaactctacttcttttccattttatcatgtgttgtatatcttagtgataaatataaaaacattttatgtatattatactattagtgaaattaaatataaataatcaaaccggtctgacttgattcacattacttggcaggaaatcaagtactcggtatctttgcgccgaaagaccttagaggaggaggatccaataataaaaatgtgtgtcgacttcaaagtacctgccccagctcctgcatttgtctctatttagtcaagttggctgatgaaaagatgtttccaagtctcttttgattatatgagtctctctcgcaactttgcttttccttttccctttttgtgttgtccaacaaataaattaaaatcttggaccgatatcgatagcgatatgaacaagcaatcgagcatgtcttttcttcgatttactggttgatattaatcaaaaataaagttttttacataggaaatgttttactagtagcccatgagcataataaaagcagagagaacagagaaatatgaggagactttcaaataattacaacaaagttggatgattatcctattttatatgattttaccaatcataaagctctacaaattaacaattaatctaggtgactaaaacaaaatgaatgctatcattctgcatggttatttcacttagccgttttttttttcatttttggtgagaacagagaaatatctcattttgttgcttccgaaactatcataaagtatacactgcaaggtataaagaaccggtccacaaatacagtgaaattgaaggtgtgctaaacattagataactggttatgcacccttacgctaacactttttcttgctaagatacaacatcaagagtcaagacatttccttgagatatataggccgactttgctagccgttaaaatgttaactttacgttcttttcaaatctgcagattttataataatacagttcttctagacggatcggtctctcccagataaaatccacgtgattgtgaatgagaaaaattggtaggtaaggtaataaaaaattgatgatgatcatactaatattttaagattctcgcttattatgtgggagattaaaatatatggatataatttttgcacttacgatcccatctacttattatgtagattataaaatagcaggcttgcataaaagcataacatgatgtaccaaacttgttagtcaaacaaaaaaaaaaaatatccaagaagctttgaagaaccatg

SEQ ID NO: 16073 - DNA, 3003 bp, Unknown
  misc_feature (1)..( 3003): 2750-1469P.txt file - cDNA_ID_1031360; gDNA_ID_2214555; Annot_ID_185696
actccaccgaaaaacccgagcttttgaaccaaattgtttgagttcacgtcaatgtaaagttttatctggaagggttcatgcttattatacaacaaatgaaagaacattttgccaaatgaatttggagtttaggaagaaaacaaaaaactagttgggcctctttgaaaccgtttcatacacacagatataagtgaggcttcctataattatttttgtaatcaaattataataatgaatgggctttacttaaaggtacgtgaagccctaaccataaatggaccgtcatataatttcaattttgggataatcatcagaaccttcaacgagtcattgtcgttgaagaattgaagatgacaagtccgagaatcgttatccatgcggacttgaaaaattatccttaggagatttttcctgacctatcctcgcgtcgcgccttcttgtcttctctctcaatccagcatattcctacgcaaatcccttatcgttttcatgtttgtcctggtttaaatcttcaatctcctacccggtcttttcatcctccgatggcattccttgttcgttcgccggagatacccaccgtctcggcgagaatcttctccgatgcgaattcgagtgttattagtcatgtgtttatgaggaggaaggctacggtttcggcgattgacgccagagatttgcctggtgttaagaatccgaaatcgagattgtactggcaattctcagctccggtgaaagaagactacaagattagcagagaggaggaagaagaagaagaagaagataagcagagttactacgtgaatatgggtcacgccgttcgtagtatcagagaagagtttcctttgttgttctacaaagagcttaattttgacatttacaggtttgatgaagattctcgatttaaattgaactgctctttgattagctttctcaaagaatctttttgcttcagagtcatgcttatatcccaaatttgatctgttcttggttaggtttcttagagaatgatctgttttatcagttggtgattagctctttctcttgtctaatttcgcagggatgatattgttttcaaagaccctatgaacactttcatgggaattgataactacaaatccatatttggggccttacgtttccatggaaggatcttcttcagagcactatgtgtggacattgttagtgtttggcaacccacagagaacactctgatgatacgatggactgttcatggaattcctcgtggtccgtgggagactcgtggtcgattcgatggtacttctgagtataaattcgataagaatggcaagatttatgagcataaagtcgataacatagccattaattcgcctccaaagtttcaaatgctcactgttcaagagcttgttgaagccattagctgcccttcgactcccaagccgacctactttgagttcggagattgattcatcatcatcgtctgaaacatcatgctggtgttatgtatactagtagtcttttgtgtggttataaatagagtggtactgtaatatagatgaagaaggaacgatttaaaataaacccaatagcatgaatacattacacgctttttttgcgtataataatcaataaaacgcctatatgtacataaatttgtaaaataacagtatagcatcatgatacataaatatgttgactttgattactattatattttgattcaaaaatattgacaagtcactgcaactccatgaggcaccgaaactagtaagcctggttgtggaacttggtccacgaagtcgtgttgacggtagatgtcaaaaagagttgacaaggcagttaagcaaggtgtgaagaagttgaatttcaagactaaatgtaagtacaaccatagctactttgaacatttcttgcctttaccgcaatctcctcaagcgactgagctacaggcttgaaattaaattcgagcaactcgtacatttgtgtatatccatactttgacaaaagctttttatttatagaatatgatttatacagcctacatttgtgtatatccataatttaatcttaaaaaaaacgcatatttttctaaatagaaattcgaattatataacatgaagacaacattggcacaaaccaaagaaaaaaacttgtttggtcatttacggctgtcttttaattcacctgaacagaatcattgaaagcaaatggcaaaaatgatttgtaagactaaagttggggccaatgatttttgcccagtaaaaccatgatggacccatgggcctttgcacgtgcaggtccgttttgacagctagtccacacgtgtggatctcatgtgaatgaagctggcttaatgctgacgtgtccgccagcgttactttttcatgcaacttgccggagtcaattataaaatccagttgaccggtccttttggcaaggctagttccgtcatttcaaatcctatagatccacctccgtttactttaaatgcttgcatagaatctaaccacaaacacataaataatttaatgtgttatcaacaaccgcaattaaagcagcatatacaaagacatgtgattttttttacgggagtatttttaatgtatactcgacaaaaatattaagttaatgtcctttcaaattatgctgtattaattttgtaattcagaggtatcttatagtatgatcaaattattaattaatcttgtttttttatgtgttcataataacttatttaagagaattatattcaaaaaaaaaaaaaacatagtgcgtctttcccaaagtcgttttcttctatacaccttttttaataactctggaagcaaaaatggcataagagtcctttggatttggaatcgcttctacttcactctcaccttcctcctattctctctctctttctatgtcaagttagcttagccgtctcaccagaaagctaaccttacctcacaaacattgattgtgttacactaatctcttaaatagagagccgtaatttctacacactctgatcgctagatg

SEQ ID NO: 16074 - DNA, 3000 bp, Unknown; identical to SEQ ID NO: 5601
  misc_feature (1)..( 3000): 2750-1469P.txt file - cDNA_ID_1031484; gDNA_ID_1620806; Annot_ID_50550

SEQ ID NO: 16075 - DNA, 3000 bp, Unknown; identical to SEQ ID NO: 5601
  misc_feature (1)..( 3000): 2750-1469P.txt file - cDNA_ID_1031484; gDNA_ID_1620806; Annot_ID_168865

SEQ ID NO: 16076 - DNA, 3000 bp, Unknown; identical to SEQ ID NO: 5601
  misc_feature (1)..( 3000): 2750-1469P.txt file - cDNA_ID_1031484; gDNA_ID_2926172; Annot_ID_140164

SEQ ID NO: 16077 - DNA, 3000 bp, Unknown; identical to SEQ ID NO: 5601
  misc_feature (1)..( 3000): 2750-1469P.txt file - cDNA_ID_1031484; gDNA_ID_2926172; Annot_ID_199578

SEQ ID NO: 16078 - DNA, 3003 bp, Unknown
  misc_feature (1)..( 3003): 2750-1469P.txt file - cDNA_ID_1031488; gDNA_ID_2213663; Annot_ID_132602
gataaagaatggcagataggttcagaatgaaaaaaaaaaaaaaaaaaaaaaaaactccatgtgaacacccttgtgaatttgagaacagggtcttgctttggtttggtctggtcatatttccacacatcgaaaacctttactctcagatctcgaagaaagtttgtacacaaaagcttggtgttttactgagttcctaattttccacttacatttccaaggaagttgacaattttctacatcggacatgtttgggatcagtggtaaattaaatcctaatgatcttaaaatcaacagcttttgttttgggaataagttaaaatttcagggtaataatctattcatctgtatgatcttataagcttgattttatttatcatttataactagagctacactcttgtttatctaatcaaatacaaatctcaaaggtatggtgtatataggaaatattcgaactcaatcctttatttttaggttcaagcacccaaacattgccgtatcaaaccaatacacatgaaaagccaactaaaaatttggtttgtctaaacataacaaatttgaactttcactaattagatgctttgaaaagtgaagtatagatataaacaactcaaaagtgtaggatatataattccactctaaacacttgcatgaccaaaagtttttaagatctagggtcacgaattttggctgcaaaaggaattgaggattttgacaccaaaacaaaggaattaaggatacttcatagaacaaaaagaaaagatactcactagttacgaatgcacagaaaagtaaatataagtaattattattaattcaggtttacttctggttcggtttaaggtttataaagagtagaagtagatgatctctggcgaggtatcatttggaaaaggaaagaaacgaattcgattcagttttagactaatctagttgggttgattaaccagtgctggatcacaatgcaaaggagcttggaatcgatcttctctccagaattccattgtgttagaatgctccaattctgtttggtttaaccaaaccaaagtcgaattgattcggaaactttgttgaattttaatgagcttttcaaattcattctcatgggtcaagtttgttgatcatttgggcttgtgagatgtttgtggagtcctaacgcaagcagagagcccaaaacaaaaccatgattttccatagtggtacagtgaagtttttattttgggccattctgtttctttgatataattttatatttaaaaagtctattttcttctacagaaaaactttgtgttggttggtttttgtttacggatagacatcatttaattttactgtataactttacgaataaagacactgatatattttcacctttatggtaacgaattttatcaaaaaaaagaagaaaaaaaagtaactaattaaatagccggaaaaggttggtatgatttggagatgatattttacgttttttttttaatgtatttttcaaaaaatcaaaattcataaatcatgatgcagtcggacagggtagcttcatcatgttaatttatgacgtgagttggttgagttggtagatctcttaatttcacttctatctctctctctccaataattttatttatacagaaaattacttagtagtataaaaatcaagacaaatgaaaagtcttcttttgatcattcttgagtaattagtggaatgtattctgaattatccatttatgcatcgtaatttgttaagtcaacattttcaagtctcatgtattaacaaacataaggtgtatatgattaattaacaagtagtataattgctcttttaccaatttcatgaaaacatcaaatggtttgtgtaattttatcctagaaaatatcaagcataacccgcatttcaagaaaacaaattaaaatacattttataattacacaccaaccaaattgaacaacactcctactataaaatacatcaagattttcaaaaagtatggtattgaacacgacccattacattgacatcaatggctctaattgttatatacaccttctttttttttttgaatgcttttctctttctttctggatgctttatttatgtaatattccagctttgaaaattcgtaggtagtacgcgttaatgtgataacgttcaaaggggaggcatagttggacagaaaaagtttatccaaaaatatatatttaaccaattgaacttctcgtaattgaacatttagatggcatgagtttgacattgtataaatcttagtgaagtctagtttaaatttatccatccatcagctgatggaaacatttttagttttcaatattaaatattatgtcatgtaaaacccatgacaaaaaaaggagaggatatgattgatgagccgcctaaattcacgtatgttacgttaactatatagcatatagatatttcacatattaaccaagtagttcgaaatggatgggttatacaatatggtttctttggggaccgtccggtcactgcatctcgatttgtgacattggatataaacacaaaactacacaaaaatggagatgaagaacggtaaagattagtttctttggatcgatatacatatacctaatcacttcaaaatttacacgtagattgcagacattgagatcagtaaccgtcaatcaaaaaaattatgtcacatcgaatttcaatggttgaaagataattccattttaggagaacaagcagtagtacaatttctaacatttattacatccaaacaacaaacaagaccaatttttatggtgtatcagttggcagcctctattaatgtctctattttcttaaaatcacaccaacaacgaaaaaaaaaaaaaaaaaaaaacagatacacattacttattgaaccctaaacctattgtcagtgtatatatataacacacactctccatatgctctcatatcatacgtcaatttataaacgtttcttctcattcgtcatctagtcccattctctgtccataacaatg

SEQ ID NO: 16079 - DNA, 3003 bp, Unknown; identical to SEQ ID NO: 16078
  misc_feature (1)..( 3003): 2750-1469P.txt file - cDNA_ID_1031488; gDNA_ID_2213663; Annot_ID_181891

SEQ ID NO: 16080 - DNA, 3003 bp, Unknown
  misc_feature (1)..( 3003): 2750-1469P.txt file - cDNA_ID_1031563; gDNA_ID_1621125; Annot_ID_172263
cacgaaggcgagaagcagagcaaactctgtttatcgagatttggtgggcaccactttattaagtcaaaccagaagaaaacactcttccttttccttatttccattatttttattttataggttacacaaaaacctattttcacttgtttacacgaaactctcaaaagcctgttactaatagaacttagaagtctaagctagaaatatactatattggcattattttgggcagtggatcagcttttcattgtgctgatataggagagagatatatatctatatatataagggacgaaacaagatttgggaattatgagaaggttcgattgccttttctatgactcgaagcgaatcttgtgttatgcacttttgattaagtttattctacggtgaatgaatttaccggaaaaaaggtgtaggaaaaagtatatactcaaaagttatacttgatgcaatcacacattacattgatttctttaattattgtgttgttgataaaattttggtacgaagacgttgacataagccatttaaatcaaattatcattattcattttccgtcaacttatgtcaacatgaatcgatttaattatttcaatttaagaaaagccttatacacttttcggtatatcacatacggataatacctacatagtattgtactacatacggtatatctagccgttatttgttgtatcattattttcacgtattacaaattcattagaatatgcatattaattgataatcttggcttggcagaattggaattcgtctttatatatataaaaaacgtacggtaattcatatatgatctcataatttagacaaatctatagggacgtgacttaattttgaatttctcaatccatatattattaccctaaatctatttattccgtttttaatattttctttggagtttacaaagatacatataaatattagacattaaaagtttggtgctcgatgctttggctatagttagaaagtccactcacttttgtgtctttgacgtacatctccataacctataattttctacctagtcatttaaatatttcaaggtactttcataacttgaaggcggaaaacatgtaaaaaaggttaccttccagaagaaataatatatactatttattgaagaaataacatattcgctgtctatagattttagttttacatgttattttctttcgaaatcacctgctccctttgaccaattaaaccgagtgactaatataacaactatatgaaatgttgcagttacaaattagtttcgttaaaacaaattttgattagttttgtagaacatcaaaaaaatgattgtttggaaatatagataagactttttctaaataaatttggtactgggagtggcgtttttctaactaggcaggtttgcaaaatgcaacatgtttgactttagttattttgcaagcttttcttctttctcaaattaaatagagaaataaattagaattcgatgaatacaatcatcccgtaacgatgcaatttatctgtaaagacaaaatgttatattgatttaaaagatgttggcaagatagacccatgagccaaaagcataattgataaaaagtttgatcataaaactggtagagttcttatacaagattagacaaaaacacagattagttggttttgaattatacgttgatactcaatgtgaaaataatgaaaaacatcttagggttgggatcaatgggacaatgaacttttaagttagatctcccacgatcttgtaacaactaatttgtcagtacatgtttttttctttttttcttaactaataattccaacctaaaatttgaatctaagagattagtcaattgtttgaaatattctccattcgacaccttttctcacgaatcattattaaaacgtaacaatacaacacatttaggagatatataaaatgaaaaactggaccttataaagaggaaaaagaatcccccatgtgcatgtgctatacagataacatttattgctttgccaataaatttcagacccttgcttaactgtccatctaaataaaatctataaaatatcattagaatggcctcctcctaagcaaaaccatcccaaaaacttaatagccttcaaatgaagactgaaattgttagaactattagatacttaagaactacgaattgttaagaactactttgttaagaactacgaattgttagaactattagatacttaagacacatattcacctaggctatgttatgccttaagagatttccactaaaaatcacttaaatagtcctaacgactcatttaacaggttttatgcacaatttaaacaacatcgattttattgacaactgtgtatactcgtgctgcagtggtacgtagtcatctcaaaactgaagaaaatctataaatataaacattctctagtatctctgtagatcaactcattttggtgcgtttagactgacacaatagtcttaaacttctgtatgccgctcgaacaatatttatgttgtcatcatcaattcgacggtattaagaaactaaactaaacatattcaagcccgcgtatccagattggtgggcttgagagtgtagttttaaagcattttaacactcaacaaaattcgatggctttcaatttaacttcggcccatcgttagggagccccgttcactgaaagacaaacatgttatcacaatctctaattggtaggatcgaaacttcgaaagatttagcgatttttacaaacgccgcgttacgcgtttattacacaaacgcgaaaaaagcgtcaggaaagattggccccttgcgcactcttgcttttttctggaaacgtctctgaacgaccaactatagatcgtggaaaattcagattccattgcgacgaaaagaaggcggcggattcaaagaacacccaaatacaaatcgaagacggagccttttcagcaatttcgttttattcaacctctggaacaccaatcatctcaaactgattgaatg

SEQ ID NO: 16081 - DNA, 3000 bp, Unknown
  misc_feature (1)..( 3000): 2750-1469P.txt file - cDNA_ID_1031563; gDNA_ID_2926198; Annot_ID_141353
gaaggcgagaagcagagcaaactctgtttatcgagatttggtgggcaccactttattaagtcaaaccagaagaaaacactcttccttttccttatttccattatttttattttataggttacacaaaaacctattttcacttgtttacacgaaactctcaaaagcctgttactaatagaacttagaagtctaagctagaaatatactatattggcattattttgggcagtggatcagcttttcattgtgctgatataggagagagatatatatctatatatataagggacgaaacaagatttgggaattatgagaaggttcgattgccttttctatgactcgaagcgaatcttgtgttatgcacttttgattaagtttattctacggtgaatgaatttaccggaaaaaaggtgtaggaaaaagtatatactcaaaagttatacttgatgcaatcacacattacattgatttctttaattattgtgttgttgataaaattttggtacgaagacgttgacataagccatttaaatcaaattatcattattcattttccgtcaacttatgtcaacatgaatcgatttaattatttcaatttaagaaaagccttatacacttttcggtatatcacatacggataatacctacatagtattgtactacatacggtatatctagccgttatttgttgtatcattattttcacgtattacaaattcattagaatatgcatattaattgataatcttggcttggcagaattggaattcgtctttatatatataaaaaacgtacggtaattcatatatgatctcataatttagacaaatctatagggacgtgacttaattttgaatttctcaatccatatattattaccctaaatctatttattccgtttttaatattttctttggagtttacaaagatacatataaatattagacattaaaagtttggtgctcgatgctttggctatagttagaaagtccactcacttttgtgtctttgacgtacatctccataacctataattttctacctagtcatttaaatatttcaaggtactttcataacttgaaggcggaaaacatgtaaaaaaggttaccttccagaagaaataatatatactatttattgaagaaataacatattcgctgtctatagattttagttttacatgttattttctttcgaaatcacctgctccctttgaccaattaaaccgagtgactaatataacaactatatgaaatgttgcagttacaaattagtttcgttaaaacaaattttgattagttttgtagaacatcaaaaaaatgattgtttggaaatatagataagactttttctaaataaatttggtactgggagtggcgtttttctaactaggcaggtttgcaaaatgcaacatgtttgactttagttattttgcaagcttttcttctttctcaaattaaatagagaaataaattagaattcgatgaatacaatcatcccgtaacgatgcaatttatctgtaaagacaaaatgttatattgatttaaaagatgttggcaagatagacccatgagccaaaagcataattgataaaaagtttgatcataaaactggtagagttcttatacaagattagacaaaaacacagattagttggttttgaattatacgttgatactcaatgtgaaaataatgaaaaacatcttagggttgggatcaatgggacaatgaacttttaagttagatctcccacgatcttgtaacaactaatttgtcagtacatgtttttttctttttttcttaactaataattccaacctaaaatttgaatctaagagattagtcaattgtttgaaatattctccattcgacaccttttctcacgaatcattattaaaacgtaacaatacaacacatttaggagatatataaaatgaaaaactggaccttataaagaggaaaaagaatcccccatgtgcatgtgctatacagataacatttattgctttgccaataaatttcagacccttgcttaactgtccatctaaataaaatctataaaatatcattagaatggcctcctcctaagcaaaaccatcccaaaaacttaatagccttcaaatgaagactgaaattgttagaactattagatacttaagaactacgaattgttaagaactactttgttaagaactacgaattgttagaactattagatacttaagacacatattcacctaggctatgttatgccttaagagatttccactaaaaatcacttaaatagtcctaacgactcatttaacaggttttatgcacaatttaaacaacatcgattttattgacaactgtgtatactcgtgctgcagtggtacgtagtcatctcaaaactgaagaaaatctataaatataaacattctctagtatctctgtagatcaactcattttggtgcgtttagactgacacaatagtcttaaacttctgtatgccgctcgaacaatatttatgttgtcatcatcaattcgacggtattaagaaactaaactaaacatattcaagcccgcgtatccagattggtgggcttgagagtgtagttttaaagcattttaacactcaacaaaattcgatggctttcaatttaacttcggcccatcgttagggagccccgttcactgaaagacaaacatgttatcacaatctctaattggtaggatcgaaacttcgaaagatttagcgatttttacaaacgccgcgttacgcgtttattacacaaacgcgaaaaaagcgtcaggaaagattggccccttgcgcactcttgcttttttctggaaacgtctctgaacgaccaactatagatcgtggaaaattcagattccattgcgacgaaaagaaggcggcggattcaaagaacacccaaatacaaatcgaagacggagccttttcagcaatttcgttttattcaacctctggaacaccaatcatctcaaactgattgaatg

SEQ ID NO: 16082 - DNA, 3000 bp, Unknown; identical to SEQ ID NO: 16081
  misc_feature (1)..( 3000): 2750-1469P.txt file - cDNA_ID_1031563; gDNA_ID_2926198; Annot_ID_201589

SEQ ID NO: 16083 - DNA, 3000 bp, Unknown; identical to SEQ ID NO: 8842
  misc_feature (1)..( 3000): 2750-1469P.txt file - cDNA_ID_1031665; gDNA_ID_1971905; Annot_ID_58531

SEQ ID NO: 16084 - DNA, 3000 bp, Unknown; identical to SEQ ID NO: 8842
  misc_feature (1)..( 3000): 2750-1469P.txt file - cDNA_ID_1031665; gDNA_ID_2926146; Annot_ID_139114

SEQ ID NO: 16085 - DNA, 3000 bp, Unknown
  misc_feature (1)..( 3000): 2750-1469P.txt file - cDNA_ID_1031892; gDNA_ID_2926237; Annot_ID_142781
gtcaaccgtaatttatcgtctcaggtgatagttagagttgaaatgcaagatcaatatggttggagaaaattggtttagccattatcagattcagattatcaaagtaaccatggttgtgaaatttttaaaactaaggttatatatgttcaattgatggttacattttagagagtgcatgtatcgttagtagaaatttgacagatatatcgagctttatgtataattgaagttatggcccatcaaatacataaagattcatgagcctagtagaacctaaaagcccataactatttatcaggccaaaacgtttcaatggtcaggcatttgttattcttttggtcttttgggttggttacaaattaaatagaagtagaaactgggctctagtagggagataaacgaaaagtctatatcaatgaaatgagactaattcgcatccctcatacttattttagagtatatttcttaatattaaaaagtgacagatgatgaaaactcgtaaattttattaagatttaagaggtacatgcaacattagtttgttgaaacatacttgcctctatccataattgtatattgttgaagccgaaccacgcaaatatatctaacacttgaaaattaatgtgagacaaatctaaaggtgagtcggggcatgaattatgttacacttatccgaaatcgttaattgatagtataatattagagataagacaaatatgtcttcttctaatatcacttgatgattgtcgattttgggattagagagagcgacctggccatttaaagttgctagcatgtgctcgtgtgtgtgtggacgtgtgtctcgacttctcctagcaatgagtggttcatattaattaattatgcatttacgatcaaatacaaaacaaaaacattgtgattacgtggatggtttgaatgagtcaagttttcactaattggaatcgtcgagaagattattgcgaaatgatttagagatagactgattaatgattatgaataaagataatcaaaatgagagttgaaccgagtccaatatcaaaccaaaccgagataaagtccggttaaaaaagatgtattttcctattagtcgaaaaggtaaaatgcaaaaatacacgaatgagtaaagaatctgtattttcctattggctctattttccttcttcttcttttttaactcccacactcatgtttctgacgcgtgtgtttcacgtcccattcctgttaacgaatatatattttatatttttgcaaataaaaataaacatataagtgggtttgagactttgagtgacctttgaaactttgagcagcttataaaaaaatgatgaaccaagcttagagtattcattatttactagtatctccaattcatccatatttttttccttaaactctatttttgcctctatttcactctaacacatatctattctcatcactattatagagatttctattttttcctctaaatatagagataaaaaataggggtttatattttttcctctatttttccttctaccaaatagagatctctatttttgaagaaccattgaagtgaaaatagagacaactattaaaaacggtcttatatacactttaattatatatttgctattagtcatggtttttgattaaaaataactaaataattcttgattccgtcttaacatgattcgtcattgatattaggacattacaatgaaattatattatgaaattatgttatcctaattcttatcaatataaaatttttgcataaaatttattttttaattgataatattttatttagtggttggttaacaaagatgttaacgactattgtgagaaattaattccacgaattacgtcctaattttaagtaattaaaggtataaagcaaaaatcaaaatatccatactgatgtacgactttctcacacgacttttacggcgttcgcttacactatatatccagccggtatcttaatcagtgtttatacgggcaagtggcttctcacatcaaagagaaaaagatttgaaaagatgtaactggtaagaatgacgaagaatcagagaatatacgatatgtacactttctcatctataatgtaactcttaacgaatacattcaactaaaaaaactagttataagtctttcagatcatgtaaacacaatctccaaagaaactacataagaagaatcatttgtgaaaggagcaccatccattaatctatgtagtagtggatcttataaactttttttatgttaaatcggttatgtgaaatcaaatagtttttgaaaatattgaatattttgttaaaatgaatatggagaatgagacactagacattggtcttcaaatttttttttttttttttttttttttaaattagaaaagatgtcaacgactttgatatagtttggtcacttttgctatgattaaaaacgttgtccgccagatttaaggaatgatattgtatattacgcccataaataaatcatactaacaaaatcgtcttaaccccacattttcctaattctttttggcatcatctagttggcagcctttgaacattcatttacttttctttacccaaaaataataatatcattccttaaatcttatttcaataacatacaactaaaataaaaatattccaaaatacaacaagtggagcgcgtgaggatcaaaattcataaatgtcattctcaaaaagagacttcatcgaaccatcgccaccatagcttcttcctttcttcacaataacacctctctctctctctctctctctctctctctctctctctctctctctctctctctctctctctctctctctctctctctctctctctctctctctctctaattcattttaaattacaaatttattcatttttgattgctttctttttcttcctcaagtctcttcttcttcttcttcttctaaatctcaccttttttcagattctgaaaattttggtttcattcttctccgagactctcttatg

SEQ ID NO: 16086 - DNA, 3000 bp, Unknown; identical to SEQ ID NO: 9787
  misc_feature (1)..( 3000): 2750-1469P.txt file - cDNA_ID_1031898; gDNA_ID_1972187; Annot_ID_180184

SEQ ID NO: 16087 - DNA, 3000 bp, Unknown; identical to SEQ ID NO: 12071
  misc_feature (1)..( 3000): 2750-1469P.txt file - cDNA_ID_1031965; gDNA_ID_2214529; Annot_ID_184875

SEQ ID NO: 16088 - DNA, 3003 bp, Unknown
  misc_feature (1)..( 3003): 2750-1469P.txt file - cDNA_ID_1032019; gDNA_ID_1620379; Annot_ID_155276
gtatgactactaaccattaacataactctctaattcatactactgcaatagaagttttattgacttaagttataatactgacataacatatttgactgcttttagtcctagtttatcatgacaggtaggctaacacttcatatccgtaatgtttgtatgttcataccttagatcaacactaattagatactccactatcctcacgagtaggattgaaattaatgctataattttctcatatatctgtggtcactgtatgcatattattaggatataacagctacaggttgaaatgccttgatacagtgaccactctcattgaatgaagttccagggcaagaagttgcagtattcatgtgcttatgcttaaaggttgatcttgcttctaattttgttggttgatcatttgcagagatctgttccatcatctccgggaccaaattggcttaactcacctggtagttcgtccggtctcatcgccaagcgtacaatcagggtcgatattccagtcgacaattatccgaatgtatgaactttcatttctacactgagatatactacttcctggttggaatgtaactccttaattttctatatggcagttcaattttgttggtcgcctcctgggtcctagaggaaactccctgaagcgagttgaagcaagtactgattgccgtgttcttataagaggaagaggaagtataaaagatccaattaaggtatttattattaaactttacaacttcatttgtatctacatttcaatgtttgtacaaggtgttaatatatttcttcttgtaggaggaaatgatgagaggaaaaccgggatacgagcacctaaatgaaccacttcatatcttagtggaagcagaattaccgattgaaatagtcgatgcacggctcatgcaagctcgggaaatacttgacgatcttcttactcctatggtttgtttttagctctccccctccctttgattttaaaccagttattgttacaaagttttcacactcggtttctgttttataggaggaaacccatgatatgtacaagaaacaacagctgcgcgagctagcattgctcaatggaactcttcgtgaagaaggatctccaatgtccggttctgtttctccttacaatagccttggtatgaagagagccaaaacaagagaagggtaaaaaccatcgaacagtttggctgtgatcataaagcaatatgaaaccgatccaaaagtcgacacaaaaaggccataccactcttgacgacacggtactgtctcttgtccttggggtagaaatgttgtatatatgatttatgaaatgtgtttgtcagtctatgtatcattgtcccggagagagatcagatgacaaaattgcaacggaaacacaagagctgatgagtctctgtctctctccgagactttgattttgtttttgtttatgtttttatgtctggaaagttgggttccaacagttttcttttaagttttttgtttatttgttgttttagcaaaaagaaaacattaaatcatgatgatggtttgtgtctggtattggtaatgataataatcataatatgttttggatacataaacgtcaaagtaaagcttgtttcaatatgatatgtggaattatgtaaagcaaatgttctgttctcgagtatttttcacatttttattactggaagtcgacattttctattacatgtcaactctgttttcaacattgaaagattacttgattaaactttaaacagatctatatatttaagtaaatcggttagtatacccatatgtcaatcggtttaatggcctgtgacccttataacctagtttcttgtgatgcaaggtagctttcctttactgttttacaaaaaaggcctattcaaaaattgttatgtactttatataaaagataattttaaaatcctatcgaatttggtaagagtaacatcttacatatgaaatctaccattcacaaatactactttattagtaatatgcaaatgcataacaatttttgtaatgtatagattttatttgcatataagaaagtgtttttcttttcatataagaaagttttttaagaacaaaaggaacatatgtcaaaaaaaattgtgataagttttccacttttcccttttccccttaaggtaccaaatctttgcaatctgaaataaatatcattttcttttgatttcctgtttcttttttgaaaatttcttgtttaatccttcttctattttctttttccaaatttgcataacgtttcttattatggacaaaagagtcaatgggctccgtcagtaaacgattgggccttattatagcccataagtacagaatctagctcgctacgtggcaaagcttcaccgctcgaaagagaggaatctatataaaccgtatcgatgctaacaagtttcatcttcaaaacaaccccttgagatttccgaagatcatcaaatccaaaaccctagaaaccgaacaaaaggtaggtcaaaattagctccgataaatctcgatttcgatttgaatcatcgttactcttagggtttattcgtttcccagttcttgatcttcgtcgtttgattctctcgcggttttgtttccttgcgtcgatccatgtgttttttctgttatcttggttctagaatattctcgtacctacttctgatgatttacctttaactgatgcgtaattgcttgatctgtttctgaattgttcgttgattttctctctgtttgatcgaattctgatcggattgtctcttgggcttgagtgtttgatttcgagatttttctggttgatttcttcaggaggtgtatcttaggctaattatcaaagctgatttgcataaagtctttccttttaggatagctatgttcttgctccatatgttaactggtttttgctgtgtactgcttttgcatctgtacttgtagcagtatagtaatttttttgatttgattttgttcctagctagcagaagctaggactattcaatg

SEQ ID NO: 16089 - DNA, 3003 bp, Unknown
  misc_feature (1)..( 3003): 2750-1469P.txt file - cDNA_ID_1032141; gDNA_ID_1620601; Annot_ID_161655
caagaaacatatatataatccttaattaagatacgccaaagaaataattaagggagaaagaaagttgaatttgattgtgataggtgtcacggtaatcttacgtgagatgggtacgtaggatctccaaaaataaataatcatgcacttttatacgttacttttgagttttgagtttacaaatatatataagctccttttaatttattgcatgttaatgactcgtgaatcacgagtgtacattactttttataaagcaatttttttctttgaaaagaattttcttgtatcagaactggtctgaatgtttaacatcaaccaagatttacaaactgtttagtgatgaagctacaatgaaccctcaaaaatgctaattaatttggtgaaatagatcaatatcaactttcaacgacacacctttgtttttttatgaaaaaaaagtctcattttcgtttgttttgattataaacaaagttggtctctcgcatgcaatgtacgttcacgctgcaatgacaatagtgtacgttctttgttgtaatttagtcgagaatccatctccgacgttaggaacaatctatcatctttcctttttttctttgcacaaatatcgtaaaagtgatacccacgattatctacaccaaaagtggtcactgacaatgtacgaaaaaacttagaaaacaacttaaaaaaagacagttcaaaatgatggtatttgatcagtgagtagcttcttcagtattaaagctcaattacatttattcaacctatggttatgattatataaactctgttttctctccaatttaccctgaatatgttagcacttgtaactaacctaattctttctattaatttcacatttaaacaaacatatataaatggattaactaattcttggatccagaatttagcttaccatacttaagatcaatccatggatctttattataaaacttgaagcgaacgctaagactagtagagtcaataaaatagtaaaccaataaacctgaagcttttacaacaactaagcaagtcctaaaggaagtctccacacaaagttctgtgctttttaactctcgaatctgaattctgaccttcactatttgaaaaccattcaaacctatcattcttctttacctctgcgaataaacataactcttcttggtttcttcccgggtaagcccgactagacccgacatctattcttgtagacggttctgaagatataccgagcctcaaggataaatcacagaccctctcagttgcttcttctgagggctttataccaataggcatgccaatgattatgggcgcttcagggactctaaaagacatgtcagcttgctgcgtttgattattaccttcgtaatacaaaggatagaccgaacccaagttgactggagctggagcaggagcagaagcaggaccagttccttgtctaattgccaatggcttttgatgcatctgcatggattcatgaagaaacgggtaaccgcgaggagtagctacacgcttgttgctgttatcaagtacatcaacagggactgcagcttgaactgtctggcttggtttggttgatgattgttgagcttgctgacgatattcatgatggtaagacggctcattagtcgacgcagaaaccggttcctgaattttaggaccgaggtaagtccttccgctactatgtcgttggcttcttgaagctcttacagcaatacatcccaaattaagagcagctaaccatataaaaaaaaaccacatcaacaaacaataaacagtacaaagcactaacttctaagtagtttcaataaggatcactagagctaaagagagaaacaaaaatgacaattaccttcaacacatggaggcaaaagaggaccagtttctgtactctcatctcttctaataattgtatcaatggcatcatttactctattccacatagtatcagcatctgtatactcttcctaatggaaaccgaaacccaattgtcattttgtgaagctgaaaacacactaaaaaaagagaaggaaaatttgtttaaaacctcggaattggctttagagtacatgatttcttcagcttttaacacaaccacaggcaatttctcctgccattctttgttcttcctcgtcgctgcgctatgtgcttccattgcgagtctgaaatcaaacaaagaaaaccccaaattaagatacaaagaaaccctagcgtacggttttgagaaagatgagtgaatgaaaaaaacctgaaaatctggcgaataatcgaaccacgaataggttgatgacgatcgctatgccaagctcgtttcacacactcgtaaggtcttggtcctggcctcggcattttctccttcttcacacacttgagcagtgacacactcagctacaaatcgaagtaacaagtcactcactcatcaaactaatcggttcaatttctatccgggagtattttccgatcagcgagttcgatgtacgagtcgccaaatggtgtggaaagaaaaatcaaccttaaaactctttttaaccgatccaaggaaacagatctgaagctttgaagctctgaatcgtttggagatttcgtctacttgagctcataccggtcacatctccgtcatcatcatcgtcatagaatctccgattgttgtctccatcgttgccgcttctggaaatggaaatggaaatggtgtgattcgggaccgcttctttaaaaacgaaccagttttgtgatttgtctattatacccctatttgtactaactgtcgtttttttttttttttttgtcggcaactgtcgtttaatatggctttttactaaaccggaattgaaataaccgggttttgaacagataatattaatttcaaacgacaccgttttggagttgtgtctaacactttgattgattctgaaatctggattcgtctcctccattaaacatctctcgtctgataacaccgatccatctctttctttctctctccgtcgactctcgttcttaaagatg

SEQ ID NO: 16090 - DNA, 3000 bp, Unknown; identical to SEQ ID NO: 14688
  misc_feature (1)..( 3000): 2750-1469P.txt file - cDNA_ID_1032199; gDNA_ID_2684212; Annot_ID_191564

SEQ ID NO: 16091 - DNA, 3000 bp, Unknown; identical to SEQ ID NO: 14688
  misc_feature (1)..( 3000): 2750-1469P.txt file - cDNA_ID_1032199; gDNA_ID_2684212; Annot_ID_137367

SEQ ID NO: 16092 - DNA, 1378 bp, Unknown; identical to SEQ ID NO: 342
  misc_feature (1)..( 1378): 2750-1469P.txt file - cDNA_ID_1032244; gDNA_ID_1564117; Annot_ID_148883

SEQ ID NO: 16093 - DNA, 3000 bp, Unknown; identical to SEQ ID NO: 5127
  misc_feature (1)..( 3000): 2750-1469P.txt file - cDNA_ID_1032288; gDNA_ID_1620764; Annot_ID_167282

SEQ ID NO: 16094 - DNA, 3000 bp, Unknown; identical to SEQ ID NO: 1960
  misc_feature (1)..( 3000): 2750-1469P.txt file - cDNA_ID_1032303; gDNA_ID_1620473; Annot_ID_158070

SEQ ID NO: 16095 - DNA, 3000 bp, Unknown; identical to SEQ ID NO: 10342
  misc_feature (1)..( 3000): 2750-1469P.txt file - cDNA_ID_1032307; gDNA_ID_2213643; Annot_ID_181350

SEQ ID NO: 16096 - DNA, 3003 bp, Unknown
  misc_feature (1)..( 3003): 2750-1469P.txt file - cDNA_ID_1032702; gDNA_ID_2214522; Annot_ID_184660
atggacccaacattttaatatatttcttaatcttgaattttgtatgaatcctctgtaaatatactactgtgttattgttaatactaatttttattattagaaaatgagtgcttatatctcagaaatccatctggggccactaataaagacaagtacagttgaagattccaaggtgagtctgacttaactaaagtaataatatttcacatcactgtcctctctctctctctgcagctctaaactgttttgaaacctaattgcagaagaagtccagacaaaaaaaagaggatgaatccatcacaacaacacttaccaaagctatgtcctaagcgcctattcctcttcttcactccattcttattgttctctctctattacatcctcaccactatcaaaaccatcaccatctcttcccaagatcgtcaccatcctccacagcttcatgtaccttccatttcccattactactcccttccagaaacttcagaaaaccgatcgtcaccacctccactactactaccaccaccaccatcatcctcatcatcgttatcttcttactttccactctgtcccaagaacttcaccaactacttgccttgccacgatccatcaacagcacgacagtacagcattgagagacactatcggagagagaggcactgtcctgacatagcccaagagaagttcaggtgtttggtcccaaagcccactggctacaaaacgccttttccatggcctgagagtagaaaatatgcttggtttaggaacgtaccattcaagaggctagctgagttgaaaaagactcagaattgggttagacttgaaggagaccgttttgttttcccaggaggcgggacttctttccccggtggtgtgaaggactatgttgatgtgattctgagtgttttgcctttggcttctgggagtatcaggactgttctcgatattggatgtggagtgagttcagttacatgaatagacaccagaacttgattcatcttgatattttacagcagtattactactttcgattatgatggattccatgtgttttgttggacccaaaatgtcaggtagcgagttttggagcctttttgctgaactataagattttgacaatgtccattgcaccgagggatatacatgaggctcaagttcagttcgcattagaacgtggactccctgctatgctcggtgttttaagcacttataagctgccttacccgtcgaggtcttttgacatggtccattgttctagatgccttgtcaattggacttcctatggtaatgtgtgtatttaaatagacctgtttatatgatttagttcactgtgttttgaactgcttgcttcatccactctgcttctgatactgaaagagagaacattttatccagatgggctttacttgatggaggtggatcgtgttttacgtcctgagggatactgggtgttgtctggaccccctgtagcatcaagggttaaatttaagaaccagaagagagattccaaggagttgcagaaccagatggagaaactaaatgatgtttttagaagactttgttgggagaagattgctgaaagttacccggttgtcatctggagaaagccttctaatcatttgcagtgtaggaaaagactaaaagctcttaagtttcctggattatgctcttctagtgaccctgacgctgcgtggtgacttcactttcccaaaatctaatttgctctgcatcttcaaaagcttaagcttgattcggttggatctttttattaataggtataaagagatggagccgtgcatcactcctcttccagatgttaacgacacaaacaagaccgttctcaaaaactggcctgagagactaaaccatgtgcctcgaatgaaaaccgggtcgatacagggaacaactattgccggcttcaaagctgacacgaacctgtggcaaagaagagttttgtactatgacaccaagtttaagtttctcagcaatggaaaatacagaaacgtcattgatatgaacgcaggattaggtggttttgctgcagctttgatcaaatatccaatgtgggttatgaatgtggttccatttgatcttaaaccgaacacactcggtgttgtgtatgatcgcggtctcattggaacttacatgaactggtaaatcactcaaaacgtctctgatatcatctaatttgacatctcttataccatattttccggtttttgtaggtgtgaagctttatctacataccctcgaacctatgacctgattcatgccaatggtgtattcagtttgtacttggacaagtaagatccgtccctaacttgaaaactttgatttacattcatttggtgatcaaagtgtaatggtttctttttctttgtttcttatgatagatgtgacattgttgatatactcttggagatgcagaggattcttagaccagaaggagcagttataatacgagaccgttttgatgttcttgtcaaagtgaaagccataaccaatcaaatgagatggaatgggacaatgtatccagaagataatagtgttttcgatcatggaacaatactaatcgtagataactcaattaaataaaactctttttggtatcacacactactacaaaaaatttggaaacttttgagagagttgttggtttgggtttaaattggacaattacaaaaattaagaggtgcatttagatattttgaaaactttaatggacctcataaatatttaataacaaacatgtaacgacgttattgtgacggtggcgttaagtcgttaactgcgtctgatctactcgtagcttcttcgttcttcagcatttgatcggagtaggtaaagttgtggatctctttgtttcttgctaattcaaattgattaaggttcctgggtttgatcggctctagctaggggtttatggtactcgttatataattcactgaatttagggttcaagggttctgattgatctgcagtgacctttttgattgacagatg

SEQ ID NO: 16097 - DNA, 3003 bp, Unknown
  misc_feature (1)..( 3003): 2750-1469P.txt file - cDNA_ID_1032884; gDNA_ID_2684227; Annot_ID_192030
taatttgacctactcatcaatgtttttttctcatctagtctgtaataaaaatgtggaattgtaatttttctcagagacattcacactgtaccattcatataggctatatcattaaactcgcttccaaatttttaaagacagttctctgatttctttggaatgacaatttaatcacaattttacaaaattttcattatatcctgatttaatttagattccattgctattaaaataaaataaataattcagtacattttagttattcataattatttcacataccttcgtgtacaaccatattttcacctttttatttatttaaatttataattatttcacaccagttcgacttagttacatagtgaaatccaaatgatgcgttagttatatagatattgtaagattaaggaatgttgtgaagaggatggttggggcggacgagttttgttctattgtttaaagaaatttaatttttgttgcctaggctaggtttgatttgaattgtgagacaataatcttcttacatggtgaacactgatcgtgctcaataaagcattttaatggtgatcgattcttgatcgcactgatgatgttgccgacgaggttcggtaaggactatatataactagtaaataaaatatcaaagacaagttcccttaatttttagtactatatttttttgtgttaaaagtatgttcccttaattcagttgaaagtttattaattcttacaatacaacggtcccgcacaaagataatgtgatgtgataaaatgaatacacggattgtcggaccaaccagcggccaaccacctattaagacgtttaacaaaaataagtaaatgtctaattatatgtttctcgatttttcagattgtaggaattcgttgcaactctcaactattttataatttgtatttattgtaggaaatgtccttatttctttgtaatgtcagtccacatgcaagaagtgttgtttttttcacttaactcatgttaacatagcaattctcttaaaaacttgccaagctgtttttttgtttgatatcgtaagacaacctataaaggaattactttgatgcttcccaatcaattatctcaccctggcagattaaaaaaaaaaaaatgcttgaaatggtagagccgccacaagcaaacacttttgctcatcattcatcattttcttataacttcaagtgtatagggttttccgcaggtttttaacaaatttatgttactatttttgataacacactattttacataatattatgatttttaataagctcgatggaaatactaattttcgaaaacgtcagttttcactattggtctacaaatgcattagaagccaatatgttggatgaaaatgcaatttgtggagattgtaagattaattaagttgaccaggacaattatatgtgtaaaaaattctttacgagtgacaaaagtgcaaaaaaatattaatctagttggcagtttgttttactatatttgttccttagactaacaacatttttaagtaaaacacatcatcatttggtttaataattgtattttgtatttatagattacagatacccaaaaaaaaaaaaaaaatcatagagtgtatggtatcgctatcaagtttcgtttagcaaaacgttcttttgatatcgagatgtgcaagcatcaacaaaacatcttttgaagcatggtatttgttcgtatagatttttcgtcaattctttgttatggttcatcccgaatgaagtattgtatatcctattcgcattgggattatgctataatagccttcattttttgcgggttgttacgacttgtgagcttgatgaactctagaatgtctctggtctttgccgtcttggtattagcgtggatgagttttggtttcagtctatattttagttttattgatagaacttaagtatttgctacaaaaatcaaagttcttttccaaatctttaacaattttccgaatcttgaattggaaatatagtgttgatttttcgtttattccatttagagggaacataaatagttttagtagcaattatgaagtgacgtgtttgtatagtactattgggtggtatttgataagattgatcattaaggagaccatcttcccaactatctttattaactttgattttgattttgattttgataatattatactaatatatttgtgactattggaccataagtattctcactatcatgtgttattttcgagtatcaattatgcaaacgagctgaatgatttgactataagtttttgtcacgtggtgctgaaattatgttatcgctttttccccaaccctagctttaattaagatgattaaaaaataaaaagtcatttgtgagtttataaagtaaaaaaataaaattcatctgtaatgaacttacacaactcataagacattagctaacaaaaatttgtggaatctcattttgacgagaaattacacagtcagatcttcaattttttttttgcaaaaaacttgtttttactttcacaatcaaaacttatttataaaacaccacaatcgaatcgcagttgttatactttacttcgatcgatatataaaaattgttaagaattcatcttataactttatatcatattgaagtataatcgtttatatcttctagtcttttagattatgttactttgacgattgataaatatcagaaacacatgttcctaccaaaaaaaaatatcagaaacacatgcgaagacatgggtgtgttgaatatgcattatggacttctagaatgcgttaaaaatatttaaaatctttaaaacccaatgggctttaaaaatcaattcgaaagcccaatgacctgcacttctttgacataaaataaaataattatcatttctccaacgtgagagagcacgaatgtgatgaatcacccactctgcttttacatccacaaagctcacttttattaaaccaaatcacaatctcaatatcacattcgttgcagagacaaagatg

SEQ ID NO: 16098 - DNA, 3003 bp, Unknown; identical to SEQ ID NO: 16097
  misc_feature (1)..( 3003): 2750-1469P.txt file - cDNA_ID_1032884; gDNA_ID_2684227; Annot_ID_137601

SEQ ID NO: 16099 - DNA, 3003 bp, Unknown
  misc_feature (1)..( 3003): 2750-1469P.txt file - cDNA_ID_1032925; gDNA_ID_1620375; Annot_ID_155138
agtaatttggatgcaaggagatgtttctcaatgggttcgtatcagtatatactcggtaactcggaacttaaagtcccgtttgccaacgacagactgccgcgtttgaaacctcaggacaaagaatctgagcagacagggaattcatcatcagaagacaataaaaagatcaatactgtggctaaaggagagagcttttcggtttcgaagatttggttgtggcctaagaaagataagttctcttcagatgctcaaagaaggttgccttcttcatcacttaacgttgatgatcttccgaaacttccatggatggaagaacataagaagctggagaacgacggaaggtagtatcttttgctcatttttcaaccaaaatcatcgatacttagggttgttactgatcatattttggggggttcgtaatcatatgttgtaccatattgttcaaaagggtttaattcttgataagaacttcagttggattatgcttgttaatcatatgagatcaaatttaattatgcatgctcaacaaaaatggattccaaaagactgatgctttagctttattttcattatctttgtctcttttttcttcactttggggtcactggttctctttattttcttcttttccatatactttcctttactctctcaacaaattcactgttaactttataaatataaatgtatttgttatatacatgctggttcctgctggtcatcaactaatgcattatagtatggtttacttttttatttttataacttgtctagaatttttaactgatatactcaagtctggatccagaaaacaaatgggaacttttgacttgtgttcaaacacaatcttgaatcttctctttggtttaggttaggggtttttggctctttgtgctataaaccaaaacaaaaatgaaatcttctataaaccaattacatttaggactttaatttcaaaagtctttggctctaatggtttatgttggttgttgtagggtcaatatgtttttctgacactgatataaaaccattatatacccactcgatcttgatttgattgcacataaacaaataaagaaaaagataatccagaataaacaaatgatgaattagaactctctagttcccttgcactgttgcacatatatctcttaaagtatatgataagtataataatatatagttatattgttatattaataagattatttattaaataatcttactatttataagattatttaatatatatatatatatatatatatatatgagaattcaaattaaatattttcatttgtaagaccaccctctagcttatggaaacatatatcataccatgacaatttggctccgagccaaaacacaaaaagagctgcaaagactattaatccttctaataacctgttttggaaggaaaaaagcactagtccaaaactacagtctaattattgttgtaaatttgaccacaataagtgtaatgcgttaaaatgtaaaatcttcaaaatctatgtcagtgtgaattaattaatttctgtacttttgaaaataaacgtaaatcttgttatagaaatctacgcaaaaaataaagaatttgacctcaggatactaaaaacagtaaaacgtatgcaattaagactaaaccgggattgcattgataaaccgatataaaaatttgaaataaccatccggtttattttccgtggccagcaagtcccatgaattttgtttgatggtcaaacaaatcccatgatatcgctcgtagattttgcatgtgtttgttgtgaattgtactgttggtggcaaatctcgtaattatatagaactttaagaccctatcagtaatctcaaaaactaaattctgacgtggcgtgtaacaacaactaatacggacgtaacggaaaactttgaacacacgaccactctgaaaaattcagaatctttttaattattagaaaaataataaaataaattaaaaacgactaattaatttacgatttcatgcttatccttacgattcaaacaaaatttatcttaaaaccaaattgaatatcattagttttttttcttcgggtatattgttttttaaatatattatgcgttatcaaaattaggaacgttccaaaattagacattgtaccttctttttttcaacagacgttaaattggtattctttttttttgcaaaatcagatattataatccgaccttaattatagcagtttaagataatatttggtcaaaacaaataaatttactagtctttagataattaatagttggataatctttggtcaaaacaaattaaaacgactaattattttcagtttttactcagatttcatgtttatccatacaattcaaacaatattgatcttaaaattctatcaaagtgataatataaattcttgacatacgataattaagtttccaagtcaaagatttaatactatcattaatagttttttctttctccgcgtataaaattgttttaaagtgatggaactattttaaaaattattatgctttatcaaaattagacattaatgcacattccttttttttcttgtcaacagaaattaactttttatccttttcttgcggaagaaaatcagatattataccctaagataatctggtcaaaataaataaatttggtagtgtttggataataccaaaaatagaaaagataatgataatttccaaaaaatgtttaaaataacaaaaataataataaaagagaatcataagttgataacaaaaaagtattacgaaataattaatacattatgataattccccaagtttaggagaatattgactccttgactcaaacgtctctcttatcttaatctctaaaatctctcttatctctctctctctatatatacacacacataatacccaaacgctctcaattaggttttcttctacacttgttcttcttcatttgctctcttcttcatcaatctctctctttttgtaaacggcgattttaaaatg

SEQ ID NO: 16100 - DNA, 3003 bp, Unknown; identical to SEQ ID NO: 15530
  misc_feature (1)..( 3003): 2750-1469P.txt file - cDNA_ID_1033038; gDNA_ID_2213640; Annot_ID_181187

SEQ ID NO: 16101 - DNA, 3003 bp, Unknown
  misc_feature (1)..( 3003): 2750-1469P.txt file - cDNA_ID_1033176; gDNA_ID_1620377; Annot_ID_155182
tagacaaaagtaaaacataactagattagttcaacgtttatgaactccgtcaattacttctcattttagccacttcgatttcggcctgtaagtagttgctttcagcgatttccagtttagatttaagggcatcgcatgaagcttcccaagtctccttttccttttcctaaaggaacaaaaaaaaatcatggcttctatgaattacaacaaaagaaaatagaggaatttatatggccaaacaaatagaaactctaaacatgctgtctgatgacagactgacgccttagatcatgtttacaattatctatacgcactcctatattcattccctggttaaaaccatgctagtaaatctgctaaatgatggaaatcatttgacgagtagtatgcaaaacaatgtcttagaatatacgaatgggcaacaataacgaaggacaaatgacagttggcatcagagagtcctgcgaatccatctttaaacattccacttacattctctgatttaaggtgtgcaagctctcctttaagagtttctgcagcagcccttagccttgctgcttcgccagttgcagctgcctccatctctgcaattttagattccttctctgcaagcagtacctaaaagaggtgtatacttggtgtgaagaatttatcacttatttcaaactattctctctcgctcatttgaaaaccaaagcacatcatccagtaatagaactaaagaatttagtcaaaagactaacctgcagcgacgaaatggtttcggctgctttgtccctctcagatagagcatctacgacctgtgcttccaaaccctctaagttctgtcaagaaggtggagagaagagaaaaccttggatgtcattagcggaaaatggtggctcatagcatataagaagtaacacaatcgctgatgctgactaccttttgatgcttggctgacaactcagtaactgcaatttgctttctctcttccacagcttgtaattgctttttcaggtcctccagaatctaggattaaagcaagtacgcatatgaagcagagtatacagagccatccctccccccccccccccaccccccctctctctctctctctctgtctcttttgtctctctatttttctatatattgcagactagtattacagaaaatgaaagagatcaaacctggtccttatcaagaagtgactgttgcaatgtctcaatcttattttctttaggctgcaatgagccacgtagttcctcgatagtatccctgagcctgtgtaaagagaaaactccagtactcaaattcttagaggtagctggagaagtgggaaaggcgacattcattttatacaatttctgtaaaaattatcttcgaattatttacttgttattggcactccttagttgttgcctctccgcatccattgctttaagtgcttcattcgcctgttgcctagtgcgttccagctcttgttgcatggatgagtgttgagaagatgctcgttcagctgtttcattcacttcccggaaacgggcgtcgagatcatctttttcctgaagatagcaatataatataccactgagattaagacagcacatagcagcgaaatctatatgtctgaaaatgcagcatagaaattccgaaatagtataagatggtttttgaaactcacagtagcctcaaagtggctaaaacagaaagcattataaaatgtagagaaagacattcaccttttggatttcttgaatgcgttgtttagcccttttgtgaagcctggtgaatttggcgtccaggtcggcatatttctcgtcgcgctctttgatttcctggtccagtttctgttcaactacaccaacaatgtaatagcacaagttgagaaaaggcaaacactggttccggtcaatgaatgagcaaatagaaaagatggcttctgaccttgggaaaacttagaggagtattcttgggatttagcatcagcctcagagtatgcttcccttagatgctcaagagcttgctcagctgcaactcgagtttgtttttccacatcaatttctctgctcaatgatgcgacctgttcttgaagttgtttcagctgagcagagtccgcttccacttgctcagctttctggagagacctaccttgcgctacctcatccttgagtccctcaaattgggatctgagaaagtcattttctaatctcagttcagcaatcatttggagtagctgatcaccattttctgtcagagtctcgttggaggcatcatttaactctttatcttctttgatcacatggctctcctcttcttctccaaccacatcagattccttgtcttcggacatcttggcagagcagatgtcagaaagatgaacccagacactcaagagagcgacgacaactagtaagcgcaaaatcgggatttgaatcaacaatcaaaagagaaaggagtcaagtcgtgaaattcgaataaaccagcaaaagcaacgcaaggagaagagagatttgaatgtaatcagtgccagagaagaagcttaccttgaggtgagggattagagaagagtgtggaggcagagagagagaggtcacaaacaaggaatcacgatttcgaaatattggatcggatctcaacccaaaggttaaaaacgtcgtcgtctctttcccgtcgatcagtgagacggtaaaacgttgatctgatcgactgacgaagaatggtaagaattgtgtaaagggtgttttactaatgaataattgcattcagaagccttaaaccttttgaaaattcatcaagtaaacccaagacgaggttagctaaaatgatgccgttttggaatggtaatatgaaaatatgaaggacagtccgaaaacagcttagcccataaagcagcaacttaggcccattatgtatttgtaatatatggcccaattataatcactttcccaactaatttatataaaatgaaattattgaagtctttgtccagtcaaatataataataagccattgaaaaaaatg

SEQ ID NO: 16102 - DNA, 3003 bp, Unknown
  misc_feature (1)..( 3003): 2750-1469P.txt file - cDNA_ID_1033212; gDNA_ID_1620413; Annot_ID_156326
ccgcatgagagccatatgcttcttcgacctttcattctatattctttccttttaaagatagcaactattgatcaaaaaaaagaagaaaaaagataggaactatagaactatagtctttttttttcaacgaagaacaaatatatggttatgaactattcttaatggatggtcaaacagattttttgatttttttctaagaaattttgcatgtgaatacataactacagttaattccattcaactgttacttttctttgggtgaaacaataggttggcaacttggcatagatatcaacatcagagttttgaacaaatctatcatcatttaagaaatgatagaaaatcaagtattgtttttcaaatcaagaaatatcaaagaagaattctgtattaagtttagttctcatggaagccatagaatatatcagaagtttgaaacaaacagcaaatatatggaataaaaaacatagttattggaataaatagaatagttatttttttttgtttggcataaaataaagaaaattatttgttcaacaaattgttacagatttcacttatgtatattttgaactaattcttatttttatattaattaaatcaagattttacttttgaaaaataattaatgaatttatgaaacaatctctatgtaaataaaataaagcaaattaaaacgctcacacatgtttacttattcggactagagagcttccgcataaagctgaggaaaaaaaagagagaagacgcacaccgaagaaaacacacaagactccattattctcctgcttcttcgtctcttcaattattttctctgagactagctttgattcaaccatggtgagctcaagtctaatttttctctcttatatagttctctttctttgttctctatggcttgatttgaactttgcttctcgattcgagttccatttcatcttggattttcaattcttccgatttaagttctcgcccagagttagatatgattagatctgtagatggactcgtttctttgtttagatctctgagattttggatttgtatggttagatggactgatctaggatatgaatcggccgatagtaaagtcttcaatttcagtgtgcttgtgttggttttagccaattgattttgaaaccaggaagaataatagtgttccatgtggttttcctttgattttagggttacgtctatcgtttgtttagccttttccttttataagatattgttttctcgcttctttgagttattatttgctgctgttgaagttttcagatgtgtgtttgattctgttgatggtagagtatcatccgattaatatgattcagaactgtaaaatctgtcaaattgatattatgatagctcaacatcatcgttcatatacgttgtgggagtcatccacgtcttccctttgatatacacactaccaagatctgttcatgattcattatgtttgatctctgaactaatgtataacccgaacgccgttttaaaagatgggtatagtgtctactaatatgtgtattctgaagagagttgcatcttaatgttctatgttttgttggtaacaggctaatgcagcatcaggaatggcagtccatgatgactgcaagctgaaatttatggaattgaagacgaaaaggacacaccgtttcatcatttacaagattgaggagctgcagaaacaagtgattgttgagaaaatcggtgaaccgggtcaaacccatgaggaccttgctgcaagtcttccagctgatgaatgccgctatgccattttcgattttgattttgtcagttctgagggtgtcccaaggagcaggatttttttcgtggcatggtaactaactaactatactatctctgctaaaacctgtctatcttggtttcacattcttttcattaacatttcttcttgttttttttttgccaggtctccggacacagcaagagtgagaagcaagatgatctatgcgagctccaaggacaggttcaagagagaactagacggaattcaggtcgagcttcaggcaaccgatccaaccgagatggatcttgatgttttcaaaagccgagccaattgatgaaagaaatcccctgaaaatttcggttgaatcaaactttttcgtactattactcagtgatgctttttcctaaagtttgctgtgacggtaccaacctgaacagcttcattttatcagtttggtctttgtctttgtctttggtctcctttttgggtccttatagtgttgtcttaaaacttaaggaatctggcttgtgctctttaccattgtggaagaaatcgaaccctttattaaacaagaatcctattggcacatcttgtcttcacataatgaaaactaatgatccagggattaaaaagttgtgaaagttttataggcaagttgatactgtgcaaaggtaatatacattttcaaacataaggatctctggattgatagaatttcatttcgtacacgactattcacatattcgtcaatgcgactatttcaggttcaaagtattaggaatttaggatagttccaataacgagaagagttgctcaatcgagtttggtccaataagataaactgaccatcaaacataaaatcctaatcgatacttttgattatttggaaacagatccaaccattggcagttgtccattgctcattctacgcaatctttcaactgtcaaatcttagcccaacaaaaatacttagatgattattatatgttgaccaaaacaataataatatgcttaccatatagtttattaattcataaataaattgaagaatacgaaattacgaagaaaataaataaaaatacaaaaagcaggttcttctctatatattcggaatttagcttccaaataacgcagaagaaagtaaagagagaagaagcaaaaagagtcatattcgttgaaaacatcattcactcttctctgcgtctccttctttcacccgaaattgtctctgacaccgttttgattcagccatg

SEQ ID NO: 16103 - DNA, 3000 bp, Unknown; identical to SEQ ID NO: 11790
  misc_feature (1)..( 3000): 2750-1469P.txt file - cDNA_ID_1033366; gDNA_ID_2214517; Annot_ID_133965

SEQ ID NO: 16104 - DNA, 3000 bp, Unknown; identical to SEQ ID NO: 11790
  misc_feature (1)..( 3000): 2750-1469P.txt file - cDNA_ID_1033366; gDNA_ID_2214517; Annot_ID_184467

SEQ ID NO: 16105 - DNA, 3000 bp, Unknown
  misc_feature (1)..( 3000): 2750-1469P.txt file - cDNA_ID_1033557; gDNA_ID_2936554; Annot_ID_194175
tcgttggactggacctctttgatcctactaaaatgtcaaaacgattgcaatgacacctagccccaaccaactagaaacaacaagtcaagaccactactttatgtgaaaattgagttaccgcttaccatcatctatcatatcaacactgagatattgtaaccaaaactaggatatgtttgtttggctttcatcagtgatacacaacagtgacaaatgatgaaattatgtttgttttgtagtttgttggttcaacaatacctttcagcgataaaatcatgcttgttacattgttgctaattcagaaaatttagcctacatatcgttaacgtttataaaacagttggttaacaatcactaaaaattaatatattaaaaaaagactaaaaaattaaaaataaataccgatggataaactaacgactacaatgcaaacacgattctattatctttactcttcgttaacaacaattagaaaataacaacaccatcatgaaaaaacaacatttttcttgtgtaattgggtatcgttgatgcttacaatacaacgaatgtagaacgaacagagtaaatacctctctttttcaatgacatcattatgaacgaatgaatttgtggtccactaaagttgggatcggcccgttaaaaaagcccataaaccaaaaaatattggctgacgaatatttcaaaactgccattctttatttgtttacataactcaaaaacatgacgataatcaaccaatattaaaacgccacgtgttccctcgcggtcatttatcattgaatcgaagagcacccgcccagcttgtttcaatcgtcgtcgtttttctctttgatttgcctgaaatttgttctcttcttttggttgcaatttctcgatctcgaattttctgagagaatacaaaacttaatttctcaaaccccagcagattcgaatttagggtttcttacacccattagatttcgcgtcgatggcgtccaatcgcggtgcgggtggttctctatacggcggagctgatccgtatagatctaggtatatttctaatattatcagtttctccttttctgaaatcgattctggatagagaaaacgggtcctagatttggtgaattctgcgtaaagtacaagtatttatctttggtgtgtgatttgtagagaagggctaagcactagaaatgcttcaggttcagaggaaattcagctgaggattgatcctatgcactctgacctggatgatgagattctaggtctccatggccaagtcaggcaattgaaaaatgtaagaaaccctctaaatcccatttcgatctttctactttttatctatagtgccatttgtattgtcttcttgtggttctgaaggatcattgttctctttaagctttaagttgatcatatgaatttggaaatttgtcttcttttcggttttgacagtggttagagcttggttaattagttgtgtaggtgtttttttgttcagggtactatgataatgttattgttcacaatacttatcagtcagtccacgattaattagttgaatccacttgtctgatgtcttttgtatacatctgtggttattgttttatatcaccacccttcttgaaggaatcagtcgacattctctacaattccttgtgttttaccttgcacttttgcgcattatttatccctcatgattttttgttatatcgttgatcgcttattttgatgcagattgctcaagaaattgggtcagaagcaaagtctcagagggacttcttagatgaactggtatgttgttgatgtccctttagttttttctttatccatcatagtaaattgcaatgtaagcacttaacatcagtaacatgcattcatttactcttctttacctttaagatgaatcactgattatatatagtatatccgaatatcggtttcctataacttgtttcagatgtctctgttcattattagttgggaaaatatagtttcatcctaacatatgttagataactttaaccgtagcttacaaaaccaatgaatcttgataaatccaaagtgtagattatgtttacttaggatctggtctgaacgctggtggtgggtaggattagatatcttcaatctcacctagtttggtgaaatgcagcaggaaatggttacagcttatcattgagttcctgccactttgtcaatgagaatgttggtgttgaatgtgttcattgcttttagttcgttctagttttttcttttgttacctagaagaacatcctagagaagataatgacaaacaactagatttggtagtgagactgcagaaacaagcatttagtgctgttataagcaaaataaaataagtagacgaaatgttgttcttgtctgaaacataaaacgcttcaatggtattttgtttttgtttgtgacagcaaatgacattgatcagagcgcaagcaggggtgaagaacaacataaggaaactgaacctaagcataatccgtagtggtaacaaccacataatgcacgtagttcttttcgcgctcctcctcttctttatcctctacatgtggtccaagatgttcaaaagatagatagagagactcatggcatacttgtgttaccccccaaaaaaaaacccttgatgaatgttggataagttgtagaaaatatcctctagattacaaacattttgtggttcttctcgttacctgttatatagagtgcctgtttttaacagtttacatgaagcaaaattgtatcacagaacaacagcatgagatattttagaccagttcaaatctggccttaacttgattaattacccgtccggtccaattcagtattgggcttttatagtcttatgggctgaagtgtcgtgatacgtgtattattatggttggttcttatgcgtaagtttatggtggtatcgtccgtagacgatagaggttccacactatgtaaaggagaccggagaaacaaaggaactgggtttggagataagaagtgggaacttgaatg

SEQ ID NO: 16106 - DNA, 3003 bp, Unknown
  misc_feature (1)..( 3003): 2750-1469P.txt file - cDNA_ID_1033727; gDNA_ID_1620705; Annot_ID_165241
ccatgtcttgtttcttggcattggtagatgaagagcctaagagcagcctatcgtaagatattcatgtctactgaaacagtctccttaagttttgaagagcgtctcacggagctggtacgtgtaatcaatgaaaactcacttcactgtcttcttccctgtggatctagtgcataaacatctaaacatattatatctgatgtaattcaggaacaggaccaagagctgtacagtgttcctgcagtatcggcaatgttgcagtcaatccgagattctttcactgaaagtcgccgtgggatatgcaagttcagacaatggctcgattccacaacttagagacttagcttaggcattcagtaatcagcaatggcttattatacctaattgctcaataccatttccttcactggaactgtaatagtttgatatatagctttaactaagtgttgtcaacattctgtgggcacataacatccttaaaaatcacttgtcagagaaaggaaaattcattttggtattatttctaatactgtaatgaagctataacttttggatgctagactcatagatggagatggacttgaaaagcctgaggcagcagagtacctgcaaattccgatatgctcaatatacaaggtatagagagacagagaaccaataaactcatggtcgaaatagaggaactaataaatcgcatctcttcgtgagaccccactttgtttacaaactcgtgaagccatgaagccaaaggaaaatctcaaggctgggaatgcaatcttctacatcagtttcagggactgtggtctgaccaagatcaccgagctgtggtaagaagaaccacagatgggcatccggaacacatgtttcttgaagttaagtgtacggttgcggacttttcgagctgctctcttaactaaactattctgctctattggctacaattggtctgaacacatttcttctaagatgttgcagattatcctctgcttttatttggtgttccaatgtaatctaccaagctgattgttttgtattaaaccgctgcagccttataattccttgaagaatgaatctatatatcattcatttccctttctagccaagcattggatctttcccgtctttagattcagtttttttggagtgttaccaaaagatcatgtcttgtttcttggcattggtagatgaagagcctaagagcatcctaccataagattttcatgtctactgaaacagtccctttaagtcttgaagagctacttaacgaagatggtgcttgttattactcaattctcttcactgtcttttaccctgtgcatctatcgcagaaacatttgtacattttgcattttgcaggaactgaaccaagagatgtacagtgttcctgcagaatccgccatgttgcagtcaatcctagattctttcacagaaaaaggcttatacaagtgttgtgaacattgtgggcacaaaatatccttaaaacagtgagaagaaagttcactttggttggtcactttataataatatacatattgaagatgtgtctacttacattagccgtgagagtaaaggcaaaattaggttttcctgtaaaaatagccagttgcttttagtggcttagtgtagatctcattctcatgtctattcgtgattttagttcaattcattcttctggtctttccataatatcgtttctcttagttctttcttctttgttgtcattaacagtcaacaaaacagctacaaaaacttttaaaccaataaaactgtttggttgaacaagatacctaggtctagttttaaactacaaaagacaatattttgttttcttatcatagaagagaagagaatccactgtttcctttatacagccatagatgttagtctttcaccatggacatgctgaaattgtgaagagaacgcgtttccttttacataactatatacataatatacttgataacaaatgcatggtacatggcattacccgtgatacacgccagcgtgcatatactgcttcgtgcacctcctcaaccttgatgccagaattaggagttgttgccatgatttgagagaatgtaccaactggtatgatctctaaaatatgagcaagaactttcacatttgctcgagttacgggtaacagttcctgtttcaaacaaggaaacatgtttcgactacaatcaatagagagttatctcagttttatacatgtgcattctatagtctttggcatctacttactttaggtttcatgattgacgacatttttgcttgtttctcctgcggattaagaaaagttagttagaaaaccaagaatcttgttttttctatgcatagctatcgatccttttaccagatacaccaaaaaaaagaaacaagatcaacactacataagccaagtattagcatccatttaaacaaatccaggctcaattctactagacccgatgaataacccaaagatctctgctcagaacagagcataccaaagaaaaaaagaaagaaagagaggagatgcaatgatttcattacgctagctagacctaactgttacatacgttcgctatagtttctggctttctgtacacggaatgcaaagaaagggggaaaacaaaaatttgagaaaagataaaagacgttactgttgaccggtgaccaagtagacaatagccggcgacgaaataagcgggaatatcgttatccaatttgacgattggtccaaaaccaaatgagcctagcagagcggaatgaaaatacatcggtctaaacgacggcgtttatctgaatatttattgcctttctacttgtctccgttgccatccgccaaatcgacgaagacgacgattaccaggttcatgaaatctgcttctcacttttattttagccatcgtagatctattttcttatggtcaattcgcttcagtgttttgaaattttgaagccacagctttctggatttgtaatttcgaatatgaaaatcgactgaaattgttttaggatatg

SEQ ID NO: 16107 - DNA, 3003 bp, Unknown; identical to SEQ ID NO: 16106
  misc_feature (1)..( 3003): 2750-1469P.txt file - cDNA_ID_1033727; gDNA_ID_2926196; Annot_ID_201450

SEQ ID NO: 16108 - DNA, 3003 bp, Unknown
  misc_feature (1)..( 3003): 2750-1469P.txt file - cDNA_ID_1033921; gDNA_ID_2214478; Annot_ID_133189
tccgccgtgttgtacggtggttgagaccagaaagtgaggtatgagcggcaagaaggtgggccgttacatgtgaatccgttggttatgttgtcgtagacacggacctcgcaggcgagctggtggttgttgacgtacggttgctgagctttcgccggtgacacggcaaagaagagaaggaggaataaggtgactgagagcgcgtggagtgtacacgcagccatgttttgtggtgttctgatctgaagagggattctcgtgagctttctcctgatttaaacagagaggacgatgatgaaccaaaggagacggcgaagacttatttagtcaatggaaacgcgtcgtatgtgttgactttttgtgacgtttctcattggtcctaccgtcaaaatgataatatgtgggattagaggagattttggtacgtcttctagaaagttgaccaggtcagtaaatttgttcagtaatagtcttaagctgaatacaaaagtgaactaagtaatactaatcatgctaaatgcccttaagctacgttagctctctcatggacataaagatggtcttggtctcttggatctcatgtgaaagagacacattgtctcagccaatacgtgttgctaccgtttttccttccgggtactcaacccatacccattctcgacgtgataaacaacttaaagatggtcatggactatttctcgtcaatctaaataatcttctctacaattttcaaacttctaagttggcgttgttcctagaaggaaagagattcatttggtttgcggtatgatgctgttggaaactcttaccggcaccacgattttctcatcatcctactatacggaagatttagtttcatcgtttcgatatgaaaactgtataactagattaacctatatcataaccaaactacagttagataaaataatgggccaactattaaagcgatccatgaacatggcttttggatagcaaagtcatgaaaggtttaccaaagaacttgcaacgcattacatatggttccgacggatacaaattcggttagaagactacatcaagtcatcaacaagcacaccaaactgatgaatctaaggacgcaaagcagaacaaaccaaatccatctgaccaactcatagaacatccaagataaggacactaaagcatatagctccaataatgagtcgaggcaataacttcaatactataatccacaacaaaaaacagaggtccattgtcaatcgccatcacatgatataaaactaagttatatcccggggaagtaagctttccattcacgatcgaactaaagaacaagacagacatgcttttctaatatgacacgagaaaatcacccatccttgtggcagagcacaaacataaaccaaccacagaataattgcaaggacctgaaatgatgcaagtcgatgcatctcaccaatttaaagggtaaaaaaatttcgaatccgacgtatataagtttacagcatcggtgttccaaactggcaaacttcaaaaaaaaagttactaaccatgaaaccaattggtgccaaattgaacagagtaaaaggaaatgatagaaagtttggagtcaaaacgaagtttcagatccatactcaatctcacaatgcacataaaatccttcagagatggtttggtaacaaaaaaagtttccatcttttattcgttgtaagttacaactatagtgtctatacatgatcattagctataaggaacaaaactgtagaagctaacttacaaccaaatgttcaaacttaacagaaaattcaatcttctgacttatcagttccgttcttgtttccatatatcaaaccagtaacctacaaatagcataagaaaaaaccattgatactctaaacgaagaatccacaaatgaatactaaactactaataaatgttggaaatttacctgagggtcagcgattggtttcctcttctcaacgtattgattagtatcagccattgcaagagctgccctagcctaaatcaaaccagagataactgtggaaatgagactagaggattcaataaaaacacaaacttttttggatgtgcaaaaaaatcaaaattggtacctcttgttcctttttaagatcttgttctggcttaatccagagaaagtaagcaatagttccggcgacgacccaagaagcggcactctgaccacctctaagacctcccatggaattaccgatgaaagatctcacgtttccaattgatcttctccagctgctagccattgattgatgcccaactatacgaactggtctaaggttcttctggatctcttctctgacaattgcttgactttgatgatgattcgatttggaactgaaattgcaagaaaagtaaaagcaggcgatttgattttgattcgcatttgcttggtgaacactgccaaaggctaaaccggtcgccgagacggttaatctgatgtttgggattgacacatcatgcggctgttgtttctccacgtaacatttggagacccgctcaaatatattgtgggccggagaacattgttttaccatatagggcccatagactttgaatatgtgtaggtaaataaaatacaatctgtggaacaaaaatggcaaaaatatttgaagtcagcaggattggttaacaatttgagcacagaaatacatttggtaacatctgagcatatcattcatatcatatcgctgtcgaatttgaaggaaaaaaaaaagactaaggaagtggatatattggtgaatgctgatgatgagaaaacttattattatatacgaaaaatttactaaagacagcaatattccaaaataatgatagggaagattctgagatggtgtgtggtcagtgtggaggcactacagatggtcaaacagtagcatacccacctggctatttggacaaggacaaggaagaagaaaaatcgagaaccatcttctcagccgattttagtaaccatcttcttgtttgctccgaacaatcaagagatcgaaaatg

SEQ ID NO: 16109 - DNA, 3003 bp, Unknown; identical to SEQ ID NO: 16108
  misc_feature (1)..( 3003): 2750-1469P.txt file - cDNA_ID_1033921; gDNA_ID_2214478; Annot_ID_183224

SEQ ID NO: 16110 - DNA, 344 bp, Unknown; identical to SEQ ID NO: 39
  misc_feature (1)..( 344): 2750-1469P.txt file - cDNA_ID_1033925; gDNA_ID_1507; Annot_ID_145123
  misc_feature (154)..(154): n is a, c, g, or t
  misc_feature (223)..(223): n is a, c, g, or t

SEQ ID NO: 16111 - DNA, 855 bp, Unknown
  misc_feature (1)..( 855): 2750-1469P.txt file - cDNA_ID_1034108; gDNA_ID_1564347; Annot_ID_149294
cgtgtctttttcaaacatcattcattcatttcttataatgctttctgattttaaaactcttgacactttgaacagaaaatggattcttgttatttgcatcaaacatcatctatggatgttaaaatcctattatcttcagatcaaatccaaaaccmaaactatacmaacaaatataagaatgaaaataagtttttttttaaaaacaacaagtgttacagctacattataagtytgaattataaaatcttacaaatattagtaatttttgattaaacataaaacaaaactttttattatcgtagctaacaatcaaagttttatttttttttttaaaaacagacgctaattcgcactactacacaaatcaatagttttagaaaaaaaagaaaaaaagagagagatgatcataaaataaggaaaaagaagaaaaggataacaataattaattctaacaggatagtgcacatcacatggcagaagtaggacagtaatttgtttttggttacatgtgtataaaaatgcgattctttgcttcattcctctttgttaaaataaaatagaataaaaataaaggaagaagaagaagaagaagaagaagaaaggattcgtcttccttcttccacaccctttctgacacctcatctcccctcccaccttctccgtcccgttccgtttctccatcaggtaattattaatctcctcttaatcatccctctaatctctttcccgtttcttcatctcccgattctcaattccatctacacagatcctcgattccgatccaacagttcgaattcagtttccgattctgatctgatcgaaccaatactcactgagatttgatcggcgattatg

SEQ ID NO: 16112 - DNA, 3000 bp, Unknown; identical to SEQ ID NO: 1305
  misc_feature (1)..( 3000): 2750-1469P.txt file - cDNA_ID_1034141; gDNA_ID_1620385; Annot_ID_155404

SEQ ID NO: 16113 - DNA, 3003 bp, Unknown
  misc_feature (1)..( 3003): 2750-1469P.txt file - cDNA_ID_1034215; gDNA_ID_1620721; Annot_ID_165813
agcaagcactgctcagtctcgaagatgagttctcaaagacaagtcagtcaaggttaccttcagactcaagaatctgggctctctttttacgctcagcttcagcttgcatttccatagcagctcgcactccatgagggggcataatatcccctggaaaaacatgaattagaaataggaaaaaacagatatgtaactatcaccggaaaagaaaaaacacgaacaacttacttatctcataacgaaggcactgaagaccccagtcttttgcagcaacattgatggcttcctgcaagaatatatatacatctcaaaaatccatcatatattttcttcttcaatggatatacttcctctaaccatcatgtctccttatgatttgaaaaagagacgcaaataagttcggatatccaacaaatacaacatgactaaatcccccagctgaatctaaattccatatacccaacttgtggtatacaaacacactgccagatgtgactaatttttccaactaaacagctcaagccgcaatgctcagtagggagtaacaccaacagcaatattcaagctaacgtgacttgactttgaaattgatcaacttagcggattctaaattctttgaaatgcacaggagcttaagtacggtgagtcctaacacttcaaaacagagataaagaaggctggagaacaaaccactatcttctcgttgagagtgtctcgttcctcaaaggtcttatcaagagtgatcttaccaagctcactacgcattgtggtctgagccagctgtacaacagcatagataggactctcaacgccataagaagctaacttaggatccacaatctgcaaaaaaaaattcccagatcaacaagaagaaatcagtaaagaatcacaaaagtaagaactcaaaacaaaaaaaaaaaaacaagaggaaaatggattggtgaaagaaaagaagatgaccttaacgtagagaacaccatcgatgtggatactaacgttgtctttagtaatcgcagtctgattcggaatcgggatagcttcttccttgagagaatgaacataagcaatacgatccacgaacggaatgaggaaatgaatccccgacggcaacgtcgtagcgtatttaccgaatcgctcaatcacaaacgccttcctctccggaactatccggattccccaattcgtcggcggcgtcaattgaaaactacaacgaacatccataaatcaatcctaaggttctctactctaatctaaaaccaaatgcttcaaaaacgaaatcgtaaggtgagaaacataaatgattcaaaaatcaatcctaaggttctctactctactctaatctaaaaccaaatcgtcaattgaaaactacaacgaacatccataaatcaatcctaaggttctctactctaatctaaaaccaaatgcttcaaaaacgaaatcgtaaggtgaaaaacctgttggaaggatagccggcggaagtgaactggcgaacggttgaagcggcggcggagaaaatcggaggtggagaggtaacggcagattgacggaggtacgaaacggacctcaaggcggagtaaccgacggagcttttacgaacgaggtggttcatcttcgtgggagaatcagaaaaatgatatgtgaagaaggaaaaaccccaaaacaaaacctcttataatgcgtagtcaatattcaggtactgtttcttcgccggatcacgaagatttcacgcaatatgcgtggagaggaggcaaatattttattgggctttagtggatagtttggtacctgctgttattattgggcttatctctagcccattcagacgcctgaaatatccatctgttattaatttattattcattgttttggttgttattttaaagagttttttttagttgaatccaaaattcattgtgaatcgagaaattgcaagaaaataatggctccgattggtaaccacttttgaggaaaacaatgaataggaaagtcgtgttcctttttgttcctcggtattttttaccatttgcaaggaatttttgatccattttcagacaggtggatcctacatttttcctcatcattcctcaaaaaaaaagaatgatagaacaaaattgttcctccccaaaattcctattgttcatttctttggtcaccaatcggagccaatataaaaaatttgggtaatggtttcttttagtttctaaaaatcatgtaatgatgtgagtgaattataatgaatatttatattgtaaggaataaaatacatattttatttcaagaaaataaacttatatcatgaaattttgatagttgtagatagtcattaattcattattatacgacgttttggatattgaaaaatttagacattacaaaagccatgaaggggtgttaaactttactataatggaaaaaagcggtttaaaattcagaatgcatggaaaaaacaagtctaatgggtttcacatggtgaagaactgtgtgtgagtcatcaaagatccggcgccgttcccttttagatataccgacgtcaagaaataaaatggcaacaattaaaagcttcgtaatgacgaagcgcatttcacctttcaaaagtgtcttctctttcttttgtctaatcttttctaagaaaataatttctatcttttgcttagatttcaaaagattcaatccaagttttcttttggtgggataaagtaaaagatgaacatgtaacatgggatccaaagtctaaagaaggttatattttgtgaactatatctaacaaagagaatagtggtgacacactttacactaaatccaagtcactagatcctaaaaagcttataacatgacgacttcaacaacatgcacctcatctcttctgcatgaaacccaatcactgtcgtcaatatatatatgcacacacctaagttcgtgtatctctactatatataaaggtaagtgtgcatagtttgagttagaaattggaattcgaccaaaatacatagttaaagtataatg

SEQ ID NO: 16114 - DNA, 3003 bp, Unknown; identical to SEQ ID NO: 16113
  misc_feature (1)..( 3003): 2750-1469P.txt file - cDNA_ID_1034215; gDNA_ID_2926191; Annot_ID_201047

SEQ ID NO: 16115 - DNA, 3003 bp, Unknown
  misc_feature (1)..( 3003): 2750-1469P.txt file - cDNA_ID_1034283; gDNA_ID_2214703; Annot_ID_136907
taaaccagagagcacagtacctttgagaattacgtgatggttttatcaaattatggaaaatttaaggatactcagtgaatgaatgctgtcaaagagttaacatcaagagcagctataaaaggacccactagttaatgcaatggagaaggaagcatgtgatgaacaacatgataaaagaagcacataataaagacgtgtgaagagcatacacattatataaccttaggaccactttctctgctctcttgtttttttttagatatgtaaaagggactagtggaatttaaggaacatcggcccacaaccctaggaaagttgcaacttgaggatgatagttcgaacagtacacatctcaaaccccttaagaaataaaactcactcaatctcatttacacaacagtgcaacctgccaaaacggtctcatttttgtgaccaaagctacatatataaagttccaccgaccctatagaccatgtggttcaatccttgggagttgggactatggcttcttacacaactaattttcaacatctacttgcttgctaccattgctaccatcactcagaatctccgatcttgttgtcagaattcaagacaaacatatcaaaagtcatagcaatggattcatatgaaaaggtagccattgagaagacatggttcatgtagttccatgactgcttgtaaaatagatcaggaggatattgtgtaagcagtataatatattcaagaatcaaataccatggcattatcagtagagaggacctaaaagacattatatttggtataactatgttgagaaattaacattatagatgtggttctcaagaatgtgacttggaaaggtaaccgagaaaacaaaatagaagaagagatcgtgaaataagctggctcagctagaggagtggaatagattctcatttatctgtgcatgacttcattttacctcttctttctgagttcgagagagatgagcttcttcgatacgccgggttagcatagaaattccataatgtgaagcacttgaagatgcataatacgaggtaactgtcagctgagcaaactttggaagtgcataacctagcaagcattgtacacaaacaaaagttcaggtgctttcttcaaagtaaacatacagatgtatctacatatataccaggtacatcaaacaaaagactacgtgcacaaagctactaacatacccactaccacctggcatttgaaagttttaaacagataagaggaaagccaattctcttgatggtaaaccattaatgtaagtaattcacctaaaggtaaaagttgcaattctacactgtgcagcacaccttgattcgtattctaaccatactattggaaaacttatcgcggcttgtaaactttcttgcattaaaaagctacaagtacaaaagatgctaacagaactacataagttcaaaacacaaaataaagaggttcaaaacacaatgagaaggccattcacaaaaattcaggacaaatcacagacagttaatcactaacgcaggatatatacgaaacaaatattcaggcacaagagaagcgagtgagccaaaaacgattaggttacctccaaaagcagcccctacacctgaatatactagaagcaatggaacctataaggaaaagcaataattgagaagtacataaaattcatacaaggtaatgtcaacagaaaagaggaaacaggaagaattccagaactagtaggtaaggcaagagaaaatacatacccccacaagaaaggaaagccgctttgacccggaaaaccgattttgaagataggggatccctgaaaacccaaagagataagatccactgtagaaatgataagtatttgacgacaagagaatcatgtgatacctgtattgaaagcatggacggcactaagcaagccaccaataccagaaccagcctatagcacaggagacacctagttagaaacagagtagtatagctaaatgcacagcaagataaatcgatttccatgctatccaaaaagccaatacacatcatggtattcccaaccaaaaaataattcccaaccaaaatactaagtcaaaagtcaaaacacaacaaatctgtgaacggaaggataattggagaatatgatggatgctctgcacccaacagccaacacaaatcatttcaaatgaaaaagctaaaacacaaacatcgcaatagaccaaattaacattaacctggaaaaggctatttcagaagtcaatgaaaaaaaggttaaacctttacatgaccaacagaggaaaccaaaaatcacaacacaataccctaagctagaattcaaattctcattcgcaatataattgcaactaaattcagctgattgccaacaaaccaattacccaactaggagtccaaaacaagtatccgtgcatataaagtaatcccataacacataattgaaacggagactgaagagaatttcaaagagatgaatgagatagaaatgcgaaaactgaccactgcagcagcatcgtgtaaaactggagttatcgtccactctcctttctcctgagaaattattaaacacaagaacatgagtctcagacgcttctgacacaaaaccacaaaacactgtagaagaaactttggcaactcactgaattagggtttaagagagaaagacaacgaggacaccgagcagaaccaagaccaggattcatagtcggatcataatcaagattcccacgccgaagcttctcttcgtatacttgtctcgttcccatcctctctttctctccgatcaccgtctctcttctctccgagaatgttccttctccaccgttgctacgccataactgaagcttacaactaataaactactgggccttatgggctttcttattctggcccaaataaagacactacgtcatcgtcatcgtcttcccaaattgagatgccctacaaaattcacactactatcttcttcttcttcgatttagcacagaagctgcagttttatcaatg

SEQ ID NO: 16116 - DNA, 3003 bp, Unknown; identical to SEQ ID NO: 16115
  misc_feature (1)..( 3003): 2750-1469P.txt file - cDNA_ID_1034283; gDNA_ID_2214703; Annot_ID_189747

SEQ ID NO: 16117 - DNA, 3000 bp, Unknown; identical to SEQ ID NO: 10899
  misc_feature (1)..( 3000): 2750-1469P.txt file - cDNA_ID_1034424; gDNA_ID_2214461; Annot_ID_132983

SEQ ID NO: 16118 - DNA, 3000 bp, Unknown; identical to SEQ ID NO: 10899
  misc_feature (1)..( 3000): 2750-1469P.txt file - cDNA_ID_1034424; gDNA_ID_2214461; Annot_ID_182780

SEQ ID NO: 16119 - DNA, 3003 bp, Unknown
  misc_feature (1)..( 3003): 2750-1469P.txt file - cDNA_ID_1034497; gDNA_ID_1971795; Annot_ID_175624
tcgaaaccatcttaagctttgttctgcaaaatgatgtgagctatatccatcccttggggtccaattcttcaaagagttgtcttgattctggccaataacaatgccactaaactttcaggtttctagaccgcttctgacagagaattgtatcaccaccattgaagtttttgactcaaaggaaacactaccatacgctatcttcagaatctccgttcaggtaaactgatcatcctttcttctcaaataaactctttctgaaagacccgaaattgtgaaactcttgaggttgcagatgctttgtccatgtactggggaaaatgagatccggaaaaggacaatggttttgtttgatcttctcaaggaatacagatgggatgcaaaagctgtgttagtactaggagtccttgccgcaacatatggaggactattgctaccagttcatctggccatctgtgatcccgttgcagcatcaattgcaaaactcaaccagttgcctattgagagaaccaagttcagaccgtggttagagtctctaaacttgctcattaaagccatggtggatgtaaccaaatgcatcatcaaatttgaaaaaattccatttaaacaagcgaagctagacaacaacattttgggagaaaccttgtctaacatctatctgactacttatcgggttgtcaaaagtgcactcacatgcatgcagcagatcccttatttcaagcaaacgcagcaggtgcaaattttcacccttcttatatcttctctgcaaaatgaagaaccagacacacagaaattgtttccagcatattagcagtcaacattgagttttctcatgactaggaattctctgaaatacgtaggcaaaaaaatcaaggaaaacagcagcggaactttcaattgaatcaaggagagcagcaggagaactgtctagtttgggatatcagttgctgaacatacacacccgcctcaacaagcaggtagaagattgcagcacacaaataggtaactttcaaatcttctgatgttaagttccataatcacaactttctactaaaagcaaaactcgatctctgatattgctcctctgttgttatatctaaagaggaagaaatcaatcaaaggcttagaaacattaacatagagactcatcaagacaaccaagacgtactccacctacttttttctctacaagatgatttgccacttcaacaatactccagacaggtataaagaactatctatttttctttttccatgttccttcttattgtttctttcatgtctcgtctttaactttacataaagatgagctccgacattccgtatgacgatacatagaccgattcttttatctttgcaaaattgcaatagcattgaatattctttattcacccaatggcagatatctataactgaggtacaagataaggtaacactactgctattatcaaagccaccagtagagccacttttcttcctactccaacagctatacgatcatccatctaacaccaacacagaacaaaactacgagatcatatgggttccaataccatcatcccaaaaatggacagacgaagagaaagaaatcttcgatttctactccaattccttaccatggatctcagtaaggcaaccatggttgatgagctccacaatactcaactttttcaaacaagaatggcattataaagataacgaagcaatgttggttgttatcgattctaacgggaggttcgtcaacatgaatgccatggatatggtgttgatttggggtgttaaagcatatccattctcagtttctagagaagatgagctttggaaagaacatggatggtctatcaatctcttgcttgatggaattcatcctacatttgaaggaagagagatctgcatattcggaagcgagaatttggattggattgacgaatttgtgtcactagcgagaaaaattcaaaacctagggttccagttagagctgatttacctaagcaaccagagacgagacgagcgagccatggaagagagctcaattttgttcagtcctacattgcaacagctcttctggctccgattagaaagcatcgaaagatcaaaactcaagcggattgtaattgaaccatcgaaacctgatcgtgtttttgaagaagttaggaaccttctcgacttcgattacgggaaacatagaggttggggaatcattgggaatggatcaactgcggagacggttgatggagagaagatgacggagaggatgagaaagattgtgcggtggggagagtatgcgaaggggttgggttttacggaggcgattgagattgcggcggagaagccgtgtgaactgagtcacacggcggttgttccgtttgaagaagcgttgacgatgaaagttgtcacgtgcgagaaatgtaagtggccaatgaagaggtttgttgcatatcagtaactcacagccctgttactttattcttacctccataataatatgtttgtattttatttatgttgttgcttcgtttaaataattgattcaattctgaacatggaaaggcaattgttagatttttggatattccaggcttgatttcacaatcctctgtgatatattttattgtataattctttataacagtttgctctattcctataaagctaacagctctagttaacagttaaaaaatttgtacagtttttaattaccaattagattcgatataaaaagtagaaaaaaaaaaagttcgtaagactaatccgactccaaaatatgaaatttcatttatccggaaccgtagaggaagagatatctatatggtcaaagcgacacgtggcatttatacaagacaatccaatctacggtagtaaggtgtatctttccgcactagatccttccccaataacacatcctccagggcttcatcgcgcgatctgcgactcctctctctctctgttctgagaaacgacgacgagaagaagaagatttagctgacgaaaactacaacaacaatg

SEQ ID NO: 16120 - DNA, 3003 bp, Unknown
  misc_feature (1)..( 3003): 2750-1469P.txt file - cDNA_ID_1034523; gDNA_ID_1972119; Annot_ID_178880
cccgatgtgagccaatctagtcttaatccattcatgtccttccattccatcaacataacgtgccacactttctccatgctcatatgtctccaccaaaacagcaggatgtacaagaggatacacaggtttagggaaagagacatccttccatctacggaagttatatatgaaccgactcaaatgtgaagcttccctcgcgagatcaacttgagacaacatgaagacaccaaactgttgcacactctcgtccaatctcaaccatttcaaagctggaattaaagtcgatatctttgccaccaaattaattatcacaaaatctctcctaatcgattcaccaacacccggatgtctaactttaaccgcaaccagcgaagacttggacttttgtcctggatactgaaaccttaaagaagctctatgtacttgggcaatactcccagatgccactggcacctcatcaaactcctcaaatatctcagaaagtttacgaccaaatgccttctcgatagttttcttagtgtaggcgaagctatgctcaggagcattactgtgaagctttgagagctgtgaacacaaatccttggggaatagatcaggtcgcgtggctgcccattgaccccatttgataaaagcaggacctgctctttccagagttcgatggaccatctcaagccatattttcctaaaacgaggcccacatgattccacaaccagccccatcagaatagtaggagtaaacaaacaagctatataaaaagccctcccaatcaagataaaaccctctataaccgaaaacaataacgaagacagaaagataggaccattcttagcccttgtatagagagatttatctgaagcatagtgatttatccccgaaccaggagctctttgtgcccatgctacttgtccacaagtgacagcaacgatcccaggtattaacaagtgcgaacgggtaagagacaagctaaacgcctgagcaatggtactaatacgctcagaatacttataatgaagccttctccaagcaatttgggcatgatgactaactacatttcttgcaggggcagtagtataacttcgagacagatgattacttaaaaaacttcctttgagatctctaaaggcaaaagtacaatacacattactcggaatcctaccagatgaagagtaagttctgagctgaggcgaccttagagcagctgtaaaagcagttctatagcttccccattgagacactctatctttctggttcgagacaagagattgtgtttgctttccaacgattttagagatcaaaactctgcaataacaacaacaaatcaatgatgagaaagtaagcaataagcagctaagagagtatacagaaggatccgatcaacattaagacgtatgaaccattgaaactcgtaaatgtcgaaactttacagataaaatgagtctccgaggaaatgggaaacaaaaatccgatcagaaatcatgaaagacccacgaaagtggttaagcccgtttgattaaacaaaccttgacatagcgacgaagatggtgagaaaccaacggaaagaatatgcgaaaacagggcttgttgggtatggatctctaaaacgttaaaattgaggagcattttctcattgacttgagcttttggggactagtcggtcacagtctaccgtccggcgttaattgggttcgaagctttcttcccggagaagacctaaagccgatacggagaagagacggaggaagagagagagagatcaggtcaggtcagtgatttcgttcggagagagagacaggcccaaaaaaaggaaattgatatctcgtgggcttaacgcttgatttagtcgacgtgtgacattgtcaaaccaaggaatgatgtgaacataaaaagccttaatgtcggtctaaaagacagcttgtcgtcaaaattaaaatgttcattccaaagttttttattttgtctccctaagtatttattaacttgtctaattttgattttgattggtccacatatctttttaattttatactttagaaagaagaagaaacagaatacacaaaacatagttaaaccacattaagctgtctcgatcccattccttagggtgtcaggtcacggtcgacataaaaacatcttttccatccaatatttaccggtttcgtttcaccggatttgggctctccggcgacggagaatagccaccatctccgtaggtcagctttctttttttttcttctctttcctctctctcatatctctgtatgattggccgaggtgtagggagctctggccgccggcaaaaaaaataggttaactaaatttggtgtgttctcggtttttgttaacagcaacgagacgaaattagaggaaattgaattgagctttaaggttgattgaaactggaatctggaaagtttgtctttttggttatgtttggttttaggatctgtaatgaagattttgcttgtgaggttattaaatgcagccaaaggaattctatcaccaaaggtttatactttgatgataagaaaacagaaaaatgagctgggactttgtattgcatggttttgaaataactgattgttgtgtggttataggaagtggtgtttgatatggcgaatttcttttgtggttgctaatgcttacagctcactaaacaatttttaagttgaatttgaattgttgatcagatgtttgctactgagttgtgtgatcttttgaatatctgctataacttgtatactcattcttgatacacgagcttacatgtttcagagtttagaaagctttataatgtgtgaactacactgttgtgcatttagcttcttctaacaaactgttgtaactcaccgttaaaccaaaactagattccttttcctgtctaaatgtttaactccatgaattgtttaatgaaccctgtaaatttgatacagaaaacagtatacttgatagctgaggaacaagagaagtgacaagggtgattgaaaagttgaaggactcagatg

SEQ ID NO: 16121 - DNA, 3000 bp, Unknown; identical to SEQ ID NO: 13441
  misc_feature (1)..( 3000): 2750-1469P.txt file - cDNA_ID_1034582; gDNA_ID_2214627; Annot_ID_135987

SEQ ID NO: 16122 - DNA, 3000 bp, Unknown; identical to SEQ ID NO: 13441
  misc_feature (1)..( 3000): 2750-1469P.txt file - cDNA_ID_1034582; gDNA_ID_2214627; Annot_ID_187840

SEQ ID NO: 16123 - DNA, 3003 bp, Unknown
  misc_feature (1)..( 3003): 2750-1469P.txt file - cDNA_ID_1034834; gDNA_ID_2214620; Annot_ID_135870
ttgagatatgtttaggtacttattcgagttcggattcgggtttttcgggttttgaagtttagacccgttagactattttaaaagttcgggtctaggttcgcatcaggtttttcgggtcgggttcggatcggttcttcgggttcgggtattatgcccaggcctgaccaaactgattcttaactaatgattaggagttcataaatataagtttttgcaaaattaataaataaaaggtctcggtaggtataaagttaaatataaaaccacataccaatttttcttttttcttttacaaacatatatatatgactaacttgtctatcttttgtcgttagagtttgtaaaacaaagctaaaacgacaagatagctactagtacttacagctatactatagtctgattccatatttactatttatttttaaattattattactggaatttgtaatctagttatgacaagctctttatcgagctccgggatcaatttcgtgtccatatttgaccatatggatacttaataaagttgctaaatatgtttttaagaaaaattatactatagagagccagtggcagagtttgagtaggtatatacctcaatgaaatccttgaagagccgtttcgggaaccacatgggtttatgaacagcaagggtgaagagagtcttgagccctttaaccgaagttggtaacaaaagatccgccgacgacttaaatcctaactggttcaaattagactcactgatcgtatcagtcatcgcgagtatcgaacctgataaagaaaaaattgttcttagtgtatgtaagttttaataatgaaattacaatgtataaatataaaaaaaaaatagacttttagaataatttacggtatcttgtaattactattattgatatacgaaaagaggagtgttaaatgtgatcttgaactcgcggtatgggagtaatttccaagaccatggttttaggaaaaccgacacaccaaaactcgcaaaacattgtagcatgttttaaccactcgcaaaatattgagtcatccaaaatatagtaatcacctgaaaccaccatggcttgaaccatctcagggtactcctcggcgatcttgaaagcaaccatgccaccgtaactaaaccctacaagagtaaacttttcgataccgaggatacgaagagacttgactaaacagtgggcttgaaacgctggtgatcgatccgcgttgtcggagtaggacccaccaaagaagaggaggtctggtatatagactgagtacttcttggctaatgatccgacctggaactgccacgtcacgatcccttcggctgcaaagccatggatgaacaataggactggtttcgtaggtttttggggttccacggcaaagtttttgtcagattttttggttttttttagggtttcttttgggatccagaagttcatctttgtccctggttcaagctctacggtgtaaggaatgacaccggccaatttcatgaggcggtacaacaatggtttttgtaaatccacaaagttcaccattgtatgtactctttttcctttcgttcttgtttggatatatttagagggagagagatgtaagaagatgatcaatagcaaatggaaggtgaagattttaaagcttcttgagttgggattaattataatgtatctggtgttgggttcttgtttatattcaaccaagcatttattgttttacacattttatatacatatcttgtttgacgttttgaatgataagtgacaacttgccaaatagcataataaactcactagtaactagaacattttaataacaaaagagaccaaaacaaaaactgtttttcttcagtcttttatgtaaatatttaagttttcgaagtataagaataagttttgtaattgtaataatactatcattctattacacctgtatatacaaattttgtttgaagatttcacctttttctaaagttaccaaccaaaactaataaactattaaagtattaattatcaagggaaatcttgcctcattttaaattaaataaggaaaaattagagatgatggagttcttaataacttgctttgcatgtaatctctgaatctagtcagaattggaaatctgcacttcctacttgtatcggtatgctgtaaacaaaaattattgttctttttggggttaattactagatagtcaaaaaatgtttttgttaaaattcacaaaaaggttgtggctaaatcgtaaataatgtgcttattctcttcatttttgtttattttgttttctatgaaaagtgtgtataacatataaaaaataaaataaattataaatgctttattactcttttgtaaaataattatttacatcattgtaatattgaataaatatctgaaagacatatatcatctacattattcatcttcgttttgttccggatgttattggtccctttcttactactgcaaagaaagcccacgtcccatacctcctatgatttttatattctcaattggttttctgaaaatattttattataattattgagctatacgcaattagacaattacgcacatctaatttacgtactatataatttatctaatctactcctctgtgattaatattaatgaaccatttctagactaacctccaacacttaagtaattaaacacgtcatctttgagtgttgtagatgtagtcaccaattgtacctaaaacgattataagttgattgaatatggacaaacccaaactgacaagaaatctctataacctaactacctagatcaaataatatttatttttaagtatatcataccaaaatgttgaaacttatattttcatttcactccatcaacccaaactaacatctactaattctcttattttaatataaatttcctagtccgccatatatataaacgcttcgtctccactctacatatttagcaacaacaaagaaacccctaagatttttatttatttttttctcaatttcttcaacgatg

SEQ ID NO: 16124 - DNA, 3003 bp, Unknown; identical to SEQ ID NO: 16123
  misc_feature (1)..( 3003): 2750-1469P.txt file - cDNA_ID_1034834; gDNA_ID_2214620; Annot_ID_187649

SEQ ID NO: 16125 - DNA, 3003 bp, Unknown
  misc_feature (1)..( 3003): 2750-1469P.txt file - cDNA_ID_1035323; gDNA_ID_1971873; Annot_ID_176645
ttgccttgaatttgtagtttcatttgcactgtttctgtttctgttctataatctttacatgtggtttgtattacatctctgatagtggctaagtagctaaaagaaatagatcattggtttgaagtatggtgtatgaatcgatgatggagaaatcatcttaaactgtcaaatgcttaagaattttctatgatctttatcatcatctttgttttattacaccttacaatcagagatttttcaatttggtgttctagatatttgtgtagatattggtatactctttgaaccataacgttacaagagatgttagctttattcttttgaatatgatgatactcaatgctgatatttcttgttgtttatacattacagtgatactagcatttcttctgctacttcattttcaaagccgatgtactaccaagaccaacctccagctctgccaagagctcctccagtggcacagcctgaaaccacctcggcccaaagctctcaagtcttacctcagactgaaaacacttcagcccaaaccacctcccatgtcttatctcagccaggtacgtacacaactatggatcaacaacaacaacaacctctggctcaacaacctttcttacaccaaggcgttcagtatatccctcacccatcacaatacataccaatttactctcatcagcaacaaaactaccctgtttacgtgatgtccgtcccacaatctcagcagtatatcccagcaggaactcccccgctctacccgaactcaaaacccggcacaaactcgagacctgaagctgcccagaacgtttaccgagctgctccccctcaggttattcagcttcagcaacagcatcagtacatgggttacgctggagctcctcaacatagcacaaacgcaaacgccaattacggtactggagctcctcaacatagcacaaacgcaaacgccaactacggtggaccctttgaatacacaaactctccaaacgagacagtgtattaccacacacaagctcctgctgcaaacactgccattccattagcgtctccataccaaagcatgacaccagcagcagccgcagcagctctagccgatatgtccaagcaaatggctcttgacggcggcaaacagcaacagcatatggctgcgtctcagccgctttaaacgctggatctttggtaataaatgcgcaaagtgttaagtatagccgacacggcgcgctctgttctttttgcgtattacatgtaacgtcctgttacatctcgttagatatacataggatttgctatctcgttgttcttatcgtagtttgcttatgtctctctctcttttctgataaataaatatgttttggatatttttttaagttctatattggaattatcttgatccgaagattacacaaaaactcaagaaatggaacaccagtgtatactagatatagaactgtgaagtgatctgttgaggttgcttcatgctttgtcactttaagtgatgcattcaacacttgaaaacttgatattgccgctcagaaaagaaaaaaactccattaacaagtcaagagaacaattccagctttttaaacacaacataaatctccattagcttcattacttataaaacgttcaatcacatatctccaccatggcctctgttaagaccataaacatgtagcagtgattgaagtaaccaattcatcctctgcaaaacttgattccttagctagcttctaggatttcctcatgcgcatcgagatcaaaatcctttgaattcactcgaatcatatgcataaaacagaatcatcttagcctctaacctgaggctctttgattcaacttgtagtcaatctcaccaacagcttatactattgtagattcacgtcaataacctgattgaacaaaccgagtttcaaaacagtacccctgttcaaccatcttgttaaacagaacacaccagcaacttgaaacccactactagtagtaacctttaccatgtcacttatcagcaaaccttgtgatatccctaagacacgcccttaaaacagcttacatatcaactctagaatccttgatgtatctttcaagctgtaaagaaaaacctgcaatacttcttcttgtatgcaactaccaaaacgaatttggctattacaccattcaatttgcagtctttagtcaatgcccttcattttcttaaaaacaaaatccttcacttgactgacctgcagataacttcccatgagtagacacttacgttgtctcgtcatcaaccaagacaaatttatgctcatgagttgttgtcttctaaatgcaatttgaatcctctgcatttgcattcctttctaggacttcttttcagctgctaacaccagctttgagatgagttgtttatcaggcttgatacacaacactttcatagtcttgaagtgaaataccttgagacaactcctgcaacacttacacatgtctcttttcagttccttctttagagaattcattgaaccacttcaataacttcatctctatttacacgttagtgtcttttctgaaatttgcagccagcaactcctatctagaaacctgcaatttatttctgaaaaatctgcagtctacttctaaatgaccttaccaacaatcagctccaaaccaagcctgtatccaccttgtaccatctttgagctgaaaacccgttgataataaactgttcttgacttgttttcttataagcatattgaacttccatgaatctgataaactagtgaattacacagccctttaactcttttatcttcagctaaccttctaagacaacatccacaaacatagctccaccatgaaaaaataacaaccttaagtatatgtattgctaactaaaccggacagatgaaactaaaccggagattaagacatttaaccaaattattgattcaggttctgtagcagattcaggtatgaagaagagcttttttcctgtcacaacctaaaaccctaaatctctgatccgccatg

SEQ ID NO: 16126 - DNA, 3000 bp, Unknown; identical to SEQ ID NO: 1455
  misc_feature (1)..( 3000): 2750-1469P.txt file - cDNA_ID_1035346; gDNA_ID_1620403; Annot_ID_156010

SEQ ID NO: 16127 - DNA, 3003 bp, Unknown
  misc_feature (1)..( 3003): 2750-1469P.txt file - cDNA_ID_1375255; gDNA_ID_1621115; Annot_ID_56186
ccacaaagcctacaacagcaatgagacagtattaaaactatataaaacaaacaaagaacataataaattttggatgtttcaagtaaatatacaaagttcataccccacaaaggtagatcatctgaagttagaaccacccgatgaaagtccacgccaatcagatgccacagaaaaaggtgagaaataaggttagcaatccaaagaagttatgtaagattatatatcctacaacatccaatgccgtaaatgatattggtaatgcagtgaagttagatatcggaataatttagatttgcatgatgtaaaaatgaaccaaaggaaaactcagcagatacaaaatgtttccaaactttacatagtaggaaattgcaacatcatagataataaatcagcattattttcatgaatttcagtggtaatatgtacaacagacgtgaaacatacccataaaaaattcgaaccagtagctagattcaatggcatctttaaaatgcttgaccttagcttcatcgagttcaagcggacagatgacacttctctcgacattctctgtggaaaaaacagaaaaggtattgtaactagagaataagtacgaatgtacgataactgttaactagtatgaaaaagaagcttgtataagaattgaaacgtactcatgaattttatcgcaatctcactgtcaatcagctcatttccacctagaacttcaccaagaccaccccatttgtgaacattgtttccagatgggcggcaaaatggaagactgtaatagttgtatgtttcttgtggattgttatatgggccaactttgtttacccatagggtgacctgctcctcggcttgatactgaaaaaggtgaaggcaaaaaaaattgacttgacagaaaagcacagaaatgtaaaagtttatgggattaactagtaagagagagtaagaaccaaaattccattagagagaacagaacaaaatgtcaaacgtagacagacagatactgataaaggctacgttcaatatcatttcaaaaatcaggagttaaagtcttcacacaaatgatggttccatagaaataatggctcttgaataatgctaccagattgctcttgaataatgcataacccgcctttatctatcatctttcacgcagaaaatatatagttggaatcgactttaaatgtcacactacttgcgagcgtaagaaggcagaggagcaaaagcattaaagctagatctcatgatctccaatatcacaaaaggcaataacaattttgagctgaaactgaccatcagcaaaagaagccatgtgtgacactttcagtatcacattttagataccaattgaaaaaaatcatcaacccgacctcggaactataagatctacatctcgaagatgctaatacattaaatgccactcaattacaacacaactcagtgttgatccaagtatttgaacatcaaacaggctaccacgtgcagaaatcaacgagaatctcaaaccaacatcaaaatttcttattaaaatcgagattgtgaaaagcctaaatcacaatgaatagacaaaatacgcctagacttgcaacgaaaagatacgcctaaatcacaatgaatagaagctcgaggatcctagcaatccgtaaacgaacagatccatgaaaaaaaattcaatcgcaaacaccatgcaaatcacggatctacggacacagtgctcgatttcgagctgcattaaaagaaaagaaaaaacgactggagatccgagtcttaccttgtgatctgaatcggatgcgaacgtaggagtgagaagggaaacgagaagaaggaacacgaggacggcggcggaggaggaagacggcatcgtgaaaaccggcggacgatcagatctgaggaaggacggagcgagagataccaatcgagagagagcgagatcctcagctcagtgttttcactttgtagagattttgggtaatacaaaaacaacgataaggcttacaacttcttttttgctctattaattaattgggcttgtagtactaagaaacgtatattaagtttaaaacccatataaggtcttttaatgtttgctctattaattgattgggcctttcgttctaacaagtgtatattagtttagcggcccatataaggtctattaatgttttcatatacgcgcacgaactatgtcatttcaattaaaatatacactcacacatgggaacataacttcttctttttttgtatatatgttgaaaaatgttaaaagtagatgaaaatcatgacataaattcattaaaaggttacgtttgagtgacaatcttcatagagaaaaatgtgatttatggacaatgactctctctatatagaaccaaaagaatctaaggcgaatttgcttgctgctgaccactcgtgtcgtgtaaatagtgtatagttgaagtgttgaattagggagaaaaaaagcgcgttggtgacaaaaaaaaacgtagttatacactcgaatcagcaagggaaacaaacatgtatggatcgcatggaaacttgtgggtccctctttcttttaaaaaatctcgtattaattaaataaatggaaaaaaaaacatgatgggagtttgtttaggcaggggagattcttcttcattctcatcattatttctctattaatttcaccccaaaaaagaaaaaagaaaaattccaacaagaaaaaaaaaagaaaaagaaagttgattcttcgcttaggcttgaaatctctccaatccaaatctcaaattaaccttccatcgtcatctctttccctttttttttcccactttctttgcgaatcgcgagatctcggaatcgcatccttgattttgggatactgttttttttttttttaatcttgtttcattttcacgtgaaattcttagctgctagaactggacttgaatttcaacgagaattttggagattttttttttgtttgggtttttcctttctgttttgtgtgtttggaattagggttgtcgagcgagaatg

SEQ ID NO: 16128 - DNA, 3003 bp, Unknown
  misc_feature (1)..( 3003): 2750-1469P.txt file - cDNA_ID_1375398; gDNA_ID_1971953; Annot_ID_58655
taaataaatttaaatgagactttcgtgttccacatggtctctcatccctctctactcggaaatggaactgttgatacggacaacggagtttttctcgaccgcaaaacataaattgtcgagtactatttgtaatttgagatggtttacgtaaattgaaatagtcctttctgatcataaatggcctgttttctccactcttttaaatgagtttggattgttcatagacagattttctcatttttttcgatatatgtaaatctccgattattaaattgtaggccggattgttagataaagcttctacaactatagatttgttgagttgtcatacgtaaacagttttgcttcaaattcactaacctaggaccctccttttgatattaatgtgtggttgttagaaaaacaatttttcgtgttccatataattttagaattacgtggcatggaacatttacatcggggataaattaagcgtcgtccacagattttacgacaatgctccatataagaacatgcattacaaaaaaaaagggaaaaaatgcatgttcatgtatggtcgtctgtctgtttataattgaaaaggactttgatgttgttaatgttattaatggagattactttgaatctcacacggtttgattaaacgaatcttcgtcagcacacactctgttcacacttattatttgagactagcagaagaaactcactagtttatcatagattctgaccttcgcacttgttagtcttttaataacttgaagatactcgccattgtatatcacaactaggcgatttctcgttcatttaaaatgttaatattcgtgtttaatgtatatttaattgaagtaatgattttacatgtacaaatgtatcctagtattttgaatcttctagtaccaagtggttttctcttcgattacctttttgtcttttttcattacaacatgaacaacaccagcaataattaaaatatcgtgctttttgtttttgtcattttttggggtcatacatatataatatatacacgtaagttcaaacatttgtttgttgttctttttgtttgtcttggattcgacatccttagaaataaaaaccacatttttaataacgaaagttcattaaaagtatttcgaatattttaggcatgttggtttgattagagtttgtattccttattcaaactaatgtcgttgttttttactgtttagatcgaaagaaaagttttttttcgtaattttcgtttatttattttgtgaaatcactagcaaagaaaaacgtacgtgactatcacatcaaaccactataacatctcattttatctatcgcttaattcgttttttaagatcagatctgagatcattgtgcatttcaattgtaaaaccgagcctaaagtcaataatataacattatttcagaaccaataatttttaacagacgttgtttgtttttgggtctcaagctgaacgactttgcaactagtacacttggcatatgtttcatgttttttttataaataatgtgctaccttgatgaagttccctctctctataaattgaagtgtgtgagatgcatcatccatacacaacatcttccatcttccgataattctcctttagtcttataatcactaataagtacgataattgaaatggatccaagattcatcaacaccattccttccttgaggttcttatctccaattcatgtatcattaatgcaacacattcacacacacacacacataaatattctgtatatagagttaatgcttcttaatttgatttagttatttaaatatagatcgatatatatccatgcagctgtttatgtaacaatatatgcatgtatgtcgcgatgcaggtatgatgatgataagtgtgatgatgaatatgcgtttgtgaaagctctatgtatgagtggtggagatggtgccaacagttactccgccaattctcgccttcaggttcttcaatatcttcgcttacttttagggtttaagcagaaacaaattattaatgttcagatttttctctggtgatacaaacatttttacaatcatttaattatgataaaattgtaaaaactgaacatgaactaactaattgtcaatatcaaatattaaatgaatttacatataagaacataatatttaaatgtctttatatgaattgcaaaaacttcaaatatattatgcatgaagtagaaaaatataaacatatactcaatagaaatagattttcttgtttttaaaattgaaacatatgttctttctatctatatgttgagacagtctttaataaaattctactcaaaaagagaagttatgaaagatgcatgatttccatctattttatccaatcaaattcattcatatcatatgttagtttgtttttaagaagtttacatttgtatttaggaaagtaaaaatatattaaaaatataagtaatttaaaacgaaattataggtttcatttaaaataaaaaaaataaaatataactaagatatttatgttagattaacctctactaattgactaaaaaatggtatatatgttgaccaaaaaagaaaaagatactaatgatacaattactaacatatgcgttctgttaacgacggttctgccaaacaaattaaaatgttgataaatgacgattcttaggactagtataaattctctaaattaaaaagggctcattacatcacctataacttataaacctacaagtcattaaagaataataaggcatgtacatgcactagtcaaattgtaaactcgaaaatgcataaacactagtaatatataaatgtatataactcaaaatcatatattgttgttgttatcgtatgaagcatgggtccagtatcacattatcacggatcgacatactgtaaagaaaaaaatcatattttctaaacgaattataaaatccagataataatactattttttataactaagcttctttttttgttgttttttttagaaaaaagttttatcaatg

SEQ ID NO: 16129 - DNA, 3003 bp, Unknown
  misc_feature (1)..( 3003): 2750-1469P.txt file - cDNA_ID_1375398; gDNA_ID_1971953; Annot_ID_177399
taaagaagaattaagttttctttcaaataaagttttactaggccataacctgagagacttgtgtcatatacaaggggcaggttcaggttactaagatgatcaatcttcaattagcaaaatcaaataggaaactccaatggctaatgatggaaaactagatggtaagtaagtaagaattaccatacatctagcaatggtggtccgaaccaaggttcgagcaagcaaagcattcttcttaagctcatcgcctcgcatctgaagaactttctctttctcggttggtgacagaagttgagagtagtgttttagaagagatgtactcttcacttcatctggtcgaataaaccatagatgagtctccctacatgtcaaaagataacacaatgtagaagataataaacagataagaatgttgaagatgagtttcaacacaatttggatcattgcacaacattaggaacgtacatccgagatggaagttgcagaggaaccagtgaaggcaattcgatcgataagcttcgctgcaattgagacatgactctgattctcatcagctccaacaaattcttattctattggaatcccaaaatcgcaacattcaaacaagaatcagtaatccaatcagtgacaagacaaatttagagaatcgatctagaattctaagaacaagtaatcaactggacttggaatcaattattcagatgaattacccaaacggaaattaatactccggctaaacgacggcgaggtcccttgccggtgacggaggaaagatactctaatcgaacggagatggtaatactttctgtttgagaaaaaagtactaacagtgtcgaaccaaatcgaattttattttgaaccaaacggttttacttatccttaaaccaaactaacccgtaaatactttggttcccagttccgttcgctggataccgggaattacatttaaccggatattagaattacaacattttttgttttgttttgattaataacagagttctacacttctacttctaacttgtgaaccttaaagttccatagttaaggaaaatctcatgatatacaagattagggcaacatttttttgttttgtctttaacttatctaataaaaacaaaattttagtaaattcgaaattcagtttggcctgtaggagaggtccgaccacccatccaatatctccggtttatgaaacatggactagattataaaagaatcttttatcgtacgaggaaatttgaacgtatgattcatcatgcatgctttgccgattttctaggataaaaggtggcgtaccatcaattggatggggccgccgcagaaattagttactagtactaccaaagaaataaataaatttaaatgagactttcgtgttccacatggtctctcatccctctctactcggaaatggaactgttgatacggacaacggagtttttctcgaccgcaaaacataaattgtcgagtactatttgtaatttgagatggtttacgtaaattgaaatagtcctttctgatcataaatggcctgttttctccactcttttaaatgagtttggattgttcatagacagattttctcatttttttcgatatatgtaaatctccgattattaaattgtaggccggattgttagataaagcttctacaactatagatttgttgagttgtcatacgtaaacagttttgcttcaaattcactaacctaggaccctccttttgatattaatgtgtggttgttagaaaaacaatttttcgtgttccatataattttagaattacgtggcatggaacatttacatcggggataaattaagcgtcgtccacagattttacgacaatgctccatataagaacatgcattacaaaaaaaaagggaaaaaatgcatgttcatgtatggtcgtctgtctgtttataattgaaaaggactttgatgttgttaatgttattaatggagattactttgaatctcacacggtttgattaaacgaatcttcgtcagcacacactctgttcacacttattatttgagactagcagaagaaactcactagtttatcatagattctgaccttcgcacttgttagtcttttaataacttgaagatactcgccattgtatatcacaactaggcgatttctcgttcatttaaaatgttaatattcgtgtttaatgtatatttaattgaagtaatgattttacatgtacaaatgtatcctagtattttgaatcttctagtaccaagtggttttctcttcgattacctttttgtcttttttcattacaacatgaacaacaccagcaataattaaaatatcgtgctttttgtttttgtcattttttggggtcatacatatataatatatacacgtaagttcaaacatttgtttgttgttctttttgtttgtcttggattcgacatccttagaaataaaaaccacatttttaataacgaaagttcattaaaagtatttcgaatattttaggcatgttggtttgattagagtttgtattccttattcaaactaatgtcgttgttttttactgtttagatcgaaagaaaagttttttttcgtaattttcgtttatttattttgtgaaatcactagcaaagaaaaacgtacgtgactatcacatcaaaccactataacatctcattttatctatcgcttaattcgttttttaagatcagatctgagatcattgtgcatttcaattgtaaaaccgagcctaaagtcaataatataacattatttcagaaccaataatttttaacagacgttgtttgtttttgggtctcaagctgaacgactttgcaactagtacacttggcatatgtttcatgttttttttataaataatgtgctaccttgatgaagttccctctctctataaattgaagtgtgtgagatgcatcatccatacacaacatcttccatcttccgataattctcctttagtcttataatcactaataagtacgataattgaaatg

SEQ ID NO: 16130 - DNA, 3000 bp, Unknown; identical to SEQ ID NO: 10947
  misc_feature (1)..( 3000): 2750-1469P.txt file - cDNA_ID_1375432; gDNA_ID_2214466; Annot_ID_133026

SEQ ID NO: 16131 - DNA, 3003 bp, Unknown
  misc_feature (1)..( 3003): 2750-1469P.txt file - cDNA_ID_1375709; gDNA_ID_1620736; Annot_ID_49487
ggaggctctcccacacgaagaggaataacactgtcacccaaaatttccctaacaggtcgagctacaggagggctagctgaacccaagtcttttacttgctcaggtgactgggagccctcttctgatgtttttctacccccaaacctatcctctctgcgccaatcattcaggatctcaggacgagcagggctttttctgttattaacagcattcctactacccgtctcgaaccctggacttctcccaccaggacttgatctgtcgccgtaacgacggtcatatccatcttcataaggtggactccgagaaccactagaactacgtgtctcacttggagacttatcatcattcttctcattcgtataccttttatttacatacacatgtctgatgaagtcccttaaccgctcaacattactgacagattaaaaaaacacaatcaatcaatgtaacacatccatctccacaacaagaagacagatttgtaactgtaataccttccgtcaggcactgattgccgctgttgatccaatcctttaaaataaatatccttagcatgctgttacaaaaacaaaagatactaaatcacaaatgccaagagaaaaaactcatcaaaagaagagagatttagcgtgtttacctgatttccaccttctttcaaagcagtaacttcttgtgaggtaaatttcgccattgatatcgatttaacacgatgtgtaaactcacgactgttcaaaaatacatatgcatatctcaaacaacatttccaatgaacaccatctacacaagaatatgagaagataaagtacactcactgtattccactgcagttggtacaaacaaaagtccagaaagtagtgcaaacatattgtggtccctaagtaaatgatatcgaagaagaaacgttaacgttaagttctctcaaaatttttatcggaaatgatcaaatgaagagcaaaaaaaaacttacaaggctgttacagtttatacacctcttattctcaggaagtttaagaagactcctaataatcttctcgttcttctcgtcttctttaactcgacccgccattttcgattccaaaacactaagctagaaactacacaaactttagaactcaggatcagttttctgaatcaataatggcgaaatcaagttctgaacaatacgaattacagatttgttcgcttagtctaacgtaaacacgagatttgacaacaaattctagttcggttcacagagttgagatcgatcatgactaataacatacagatccagaaactataggagatttagaagagaaacggagcaaagtagacgaacctgagacgaatcttcaacgacgatcgaatttctggagattttgattcttctttgttgaatcagtgtttgcagagagagagagagagagactttgtacagctaagaatggtctgtggggttaaaagagtagagagagagatttgaggaaggagatggacggaaataattgacggcgttagatttttgtggaatctaagtttgtgaccggtgttgacgacgtcgacggctgtggtctgtctcgttgacggcaaaatgagacaatagtcgacttacttatctacgctatttgcctatttataattttataattattttttcttttaaacaaataaaaaaatattagtaaactaaaacaaaatttaatacatagtaggtagatatttttttatattgatttgtattacgaaaaatagattaattagtatttaactaaaaataaatgatttgagtaaacattaagaaccttttttatacgattttaggtaaataagattaatttgattaaaaatcgaatgaagacacgtccaaatttatgatatttgtttattagttcatttaatatgtttaatagatattttgtaaatgaagatctttgtttttattaagccatatgaatttaaaatttggataattaaatttaattttaaatagttaaaaatttgatataaaatttaagtcgaattgtaagatgatttatacaattgtggggtattctatattataattgattattatagaagacaacgactaagtgttacttataattttttaatttatttttatcacataattgggtagttttaaaaaaactcaaaacaaatttgataactgaaaatatttaaaaatatcgatgagaagtagttaccaaattttgaaataaacaaatatttttgaaggtagttgtgaacttgtgatctcgcaacaatcattacgagatccagtgtcgacgaacaaagactaactcaatctcttcaccccactgaatctcctcacctataatctccaggatggagaatagattagaaaaatattattcaagattttgtgcactatttaatactttggagattgatgatgtgattttgtattcgtggttcatataattttagtttttactttttcaccgattatgaaaattttaaaccaaaaactcacatatatgcgaatccttatctagttagacatatatattgtctaaagtaatattgtaaaccgcatatgtgttaattgcgatttaatattgttgtaaggaataagccatttgttagattggttattataattagtttccaattggctattaattcaggattttcactattaaataaatcatcttaaaatcttcttattttaatgctgattttcgaacatgttttttttttttctgtcaaataaaaataatttaaaatcaattacatggactcaaccgctcgaatcaaatggaccgagacaaaggcaacaaaagtgactttacggtctaaagaaacctctgaagcagaaagagtgtttcacttaccatctctatctccgtcgctgatgactgtatcttcttcaccactatgatcatcatcaaaactttgtctcatcgcatctttttccccaaattctcacaaaccttctcttctcaattccaccaaaccctcagattctcaatctccgatcgtcggaaattctcagcgatg

SEQ ID NO: 16132 - DNA, 3003 bp, Unknown; identical to SEQ ID NO: 16131
  misc_feature (1)..( 3003): 2750-1469P.txt file - cDNA_ID_1375709; gDNA_ID_1620736; Annot_ID_166265

SEQ ID NO: 16133 - DNA, 3003 bp, Unknown; identical to SEQ ID NO: 16131
  misc_feature (1)..( 3003): 2750-1469P.txt file - cDNA_ID_1375709; gDNA_ID_2926157; Annot_ID_139561

SEQ ID NO: 16134 - DNA, 3003 bp, Unknown; identical to SEQ ID NO: 16131
  misc_feature (1)..( 3003): 2750-1469P.txt file - cDNA_ID_1375709; gDNA_ID_2926157; Annot_ID_198497

SEQ ID NO: 16135 - DNA, 3003 bp, Unknown
  misc_feature (1)..( 3003): 2750-1469P.txt file - cDNA_ID_1375747; gDNA_ID_2214558; Annot_ID_134824
atatatatatatatatatattatgagatttcctaatctaaaataaaaataaatgtaaataatatatataaatattactaaaactaatatatgttaatattttaaatctttctacaatctttatgatttttatattgttcgacgatcatctcaaccattgactctcgatctccaactacagataaagtaaaattttaccaaagaaaagtctagtgactcatcataccaataaaaaacacacaacacctagttttaccaaaataagactagaaatagtactatagtagttatgggacgatggagtgatggttttgcaaagcaaaagccaataattgtacatttcaggccgaaaccgacaatgaccccatcctacccatgtgtcatgcattcagtatttattatgtgtatcagtcaaattttcacataatgacgaaccatctacatacaatctatggcgtggcctgtggagggcaggacaaaccgacataatattgtgtatatccactgaaatttattattaaaaaaaactaatacaatgataagtactagtattagtgataaaaaaaacttatacaacgttgttttcatcttacaattaaagatattcataaacgataaatctctacttcgaaattttttaacatctccaaatgtttgttcaagctagtagtagtccacataaagtcacgttggggtttcaggctttcgttaaagattcacaccgtcggattgggatttccagacgtcacagatagacttatcttcttcgttaaatttagaatccaaagattattgtctgcacactcgttattatctaaaacagccttttttagttaaattgacgatattttagtgacattccaattttaaaattcgtatgggtctacattaaatgagtacagcgaccaactactccttccctcatagtagtatttaggtattgcattcacattacataagatgtactttcctactctatataaactctcactcccctaacactcttcatcatccatcacatctcctcttgcaaaccaacgtaaaacactaactaagagatcaatatggctggagtgatgaagttggcatgcatggtcttggcttgcatgattgtggccggtccaatcacagcgaacgcgcttatgagttgtggcaccgtcaacggcaacctggcagggtgcattgcctacttgacccgaggtgctccacttacccaagggtgctgcaacggcgttactaaccttaaaaacatggccagtacaaccccagaccgtcagcaagcttgccgttgccttcaatctgccgctaaagccgttggtcccggtctcaacactgcccgtgcagctggacttcctagcgcatgcaaagtcaatattccttacaaaatcagcgccagcaccaactgcaacacgtatgtgatcttttcactcttataagtatatgttataaattttttagtttattttgttaaatattggaaacttatattaacgttgttatgttaatttgtatgtgaatgcagcgtgaggtgatgagcgacggtcaaatgaagctactagcggatgtttcgaatattatataatcgatgagataatattaaataaagatgttcgaatggctgtactcttttcaatttcctgtctttttttatcgtggcgtttctattatgtgatcgtctgtactatgttcgcaaacaacgttctttgaatttcagacttgaagtttaagttattctatactctatatctatactaacacttactttagtttaatcgatatgaccaaaatgattaacttgcattacagttgggaagtatcaagtaaacaacattttgtttttgtttgatatcgggaatctcaaaaccaaagtccacactagtttttggactatataatgataaaagtcagatatctactaatactagttgatcagtatattcgaaaacatgactttccaaatgtaagttatttactttttttttgctattataattaagatcaataaaaatgtctaagttttaaatctttatcattatatccaaacaatcataatcttattgttaatctctcatcaacacacagtttttaaaataaattaattaccctttgcatgataccgaagagaaacgaattcgttcaaataattttataacaggaaataaaatagataaccgaaataaagatagaatgatttcttagtactaactcttaacaacagttttatttaaatgacttttgtaaaaaaaacaaagttaacttatacacgtacacgtgtcgaaaatattattgacaatggatagcatgattcttattagagtcatgtaaaagataaacacatgcaaatatatatatgaataatatgttgttaagataaactagacgattagaatatatagcacatctatagtttgtaaaataactatttctcaactagacttaagtcttcgaaatacataaataaacaaaactataaaaattcagaaaaaaacatgagagtacgttagtaaaatgtatttttttggtaaaataatcacttttcatcaggtctttttgtaaagcagttttcatgttagataaacgagattttaattttttttaaaaagaagtaaactaactatgttcctatctacacacctataattttgaaacaattacaaaaacaaacaatgaaaatgcaaagaaggacgtaggcactgtcacactacaaatacgttaataaaatgtattttggtcgaattataactttccatacgataaagttgaattaacatgtcaaacaaaagagatgagtggtcctatacatagttaggaattaggaacctctaaattaaatgagtacaaccaccaactactccttccctctataatctatcgcattcacaccacataacatatacgtacctactctatataacactcactccccaaactctcttcatcatccatcactacacacatctcctattgcaaacgaacataaaacactacctaagagatcaatatg

SEQ ID NO: 16136 - DNA, 3003 bp, Unknown; identical to SEQ ID NO: 16135
  misc_feature (1)..( 3003): 2750-1469P.txt file - cDNA_ID_1375747; gDNA_ID_2214558; Annot_ID_185794

SEQ ID NO: 16137 - DNA, 260 bp, Unknown; identical to SEQ ID NO: 297
  misc_feature (1)..( 260): 2750-1469P.txt file - cDNA_ID_1375747; gDNA_ID_1563531; Annot_ID_147851

SEQ ID NO: 16138 - DNA, 3000 bp, Unknown; identical to SEQ ID NO: 8914
  misc_feature (1)..( 3000): 2750-1469P.txt file - cDNA_ID_1375813; gDNA_ID_1971923; Annot_ID_177222

SEQ ID NO: 16139 - DNA, 3000 bp, Unknown; identical to SEQ ID NO: 8914
  misc_feature (1)..( 3000): 2750-1469P.txt file - cDNA_ID_1375813; gDNA_ID_2926219; Annot_ID_142376

SEQ ID NO: 16140 - DNA, 3000 bp, Unknown; identical to SEQ ID NO: 8914
  misc_feature (1)..( 3000): 2750-1469P.txt file - cDNA_ID_1375813; gDNA_ID_2926219; Annot_ID_203229

SEQ ID NO: 16141 - DNA, 121 bp, Unknown; identical to SEQ ID NO: 474
  misc_feature (1)..( 121): 2750-1469P.txt file - cDNA_ID_1375975; gDNA_ID_1591317; Annot_ID_150833

SEQ ID NO: 16142 - DNA, 3003 bp, Unknown
  misc_feature (1)..( 3003): 2750-1469P.txt file - cDNA_ID_1376113; gDNA_ID_1620769; Annot_ID_50183
catggctcgtttcatcgaaggatttgcgaggagtctctgttttctgaggatcacttctgttggtattgaggttaggatcgtgtctagttcagggacgtctttttccgcaacaaagactcctatttcttcccaggggatggcgtctgcgaaaggcagtactatgtcgtctgctatgataactggaatgcacccaaacacaactgcttcaactaacctagggctccatggagcccatcctagaggacatagacagaagatggctctctgcatgtcttcgtagtatgttgtcgggtgatctgttgagatgtcaaacaaagggttgttcttgaagttctcccacaccgctgctcttgcacctctatacaaagagagaagttccagtcagcagattctaaaacaatttgatcttagctaaccttatatataacctaacttcctaatgaggaatgcttaattgttatcttaataggtagatcttgatgtatatgtgcttcttttattgtatgatactatagagtttgcagttccattttggttgaaaaatctatgtaagactagagaaaactcatcacttgagagttttacaagtctacaaaatatgtaccttgcataatatccaccttcggggtcgttgttaacatcataaaataaaccgcggaagtagacaaagatagagcgtggaatatctggaggaataaaatgggcctgcatcttctgtggaggtgcaaaaggaggaatagtgatcgagccttcgtccaaacagacatggttcctttgaccaaatgtctgaaccaaagtggcacgctggagtagtggaagtatccctctttcaatggctttttcctcctgtttaatgtcaatcaaatcttcaattcccacacaaatcattggaatattccacaatcttatacaataaactcataaacagattctcagtttccatgtaactaagtactaatgtgatgatacaacagctaattttaagctaatgatcatctatcattgtaagatcacagggtattcttgatgaacagcaaccaccaaagtattcaatgcatataaaaaatagagtttgttcctgaatgcagagataatctacctgataatggaagcaagctccaaagtcatggggcacaacaaagaagtgatcagctccttcagtccgattccaataaggccaatttgatgagattagttgtatcgaacttctcatcatacgcggcgatttaaacggtaatggcaagccggtaggagtgaggtcgcaagtaggataaattggcgtgtaaaaccaatcagcttcatcaggattacgcgttcgaacaggactagataaaaggaacctgtgcataaaaatctcagcagcaaacatgtgtgtaagacatcgaggatccttttgcagtaatttcttgttgtacttgcttggaagctcatatacataaaccttaagctttcccactggatcatcctccaaaacatcaccagcacttcctgcatttcaaaaacacacctttttgagctctcttacacagctgttacatagttcctcaatcaatagcattgacttcttaagcaaatcaaattatatgtctataaaccaaatgctggagaaacgacagatttcaaacttatttgagcgaccctcaaggattaatcaattcaactctacattccaatctgctggagcaagaagaacaagtacctgaaattcgctctgtccgaacattttgtttagcggaagaagcagagaagaagaggaacagaagaatggcggagaggcaagagtggattttcatatctaccggagatgtgtttgaaggtttggatcgcagaaaggaagaaggaagaggaagaatataagggaagagtatcgttgggaggtcatgggcgcagtggttgacgagtttacttcggtattaggttttagggtttattttattcagaaggaagacgtgaatggtgaaaatgaaatagagtgtcgatggaaaacgaaattggagaaatagcttcaagtcacagataagtaagaaattgcttgtgatgtactttttttttccttgaattcaacgaccaaagacggaaactggtgcacatcacaaggcgcgtgctattatgggctgagttaatgtccattgggccttgctaacgtccaacgttgactagttataacttccgtagtaggtcatgatcgttttagagtggccactatcaacaactagttaacgacaacaattttttatatatatgttttatagttgttggtaatacgacaattataggtgacataattcattgattagcgattaatatatttgagatcactgtaaaagaagtactatgattcagtttttgatcgttttatgtcattagcaacgatgaaatgaacattgttatatatctctaaatgtaaccataacattgtggataataatctgttggagtgtgaacactctgaaagattctaaatcatccaattttatgtgaagaaatatgtagaaaaaacaaacaatggatgagttataggtttggttaagacttgaaaagtcattgatcacggcttttgtccattattccgtgtttaaagtaatttacattctcttttaagatctctcagtccaaagacaatgcaaacaataataatttctccacttgtttctcatcgtctctgtcttgctcgtgctgttccttgcaaccgtcttctcaacaaccaccaccgtgctcctccttcgatccgcctctcaaaccaccgttcaaccacctcactccgcctcttctcctccgccggtagaccccaccaccttctatttcccttttaaactttttgtttccttttgaaaaagatattttgcttgcgtggggcaattccgtcaaagcgttaccattcgggataaattggtcattttttcatcactgtgtctctctattgagtctttagggtctctctgtgtttgcaaatctgacgccgagtattttgctaaagcagcagccagtcgggacagtgaaatg

SEQ ID NO: 16143 - DNA, 3003 bp, Unknown
  misc_feature (1)..( 3003): 2750-1469P.txt file - cDNA_ID_1376113; gDNA_ID_1620769; Annot_ID_167439
ttagccaagacaaaaggagtgtacagtattatatgatcaatcgaagagaaaatgtacaacaaacttggtacatgtacctcgagtaaatgtactaatgttatctacaaaaaaaatccactcggaggacttggacttctaatgtttttgaagtgctatagaaaggcaacaacgtatgctctaggtgaaacccaagatatacaaaaagattcctctctttctgactttaccaaggtttcaggtcagcaaccggaccagcagtccagttcagtgccttctcacctgtcttcaagtatatgcttttgtcgtggggtaacttccgagctagcccgttaagtatctgatggaatgcatcccctggttgtgcaggttgagggaaaagcatggctcgtttcatcgaaggatttgcgaggagtctctgttttctgaggatcacttctgttggtattgaggttaggatcgtgtctagttcagggacgtctttttccgcaacaaagactcctatttcttcccaggggatggcgtctgcgaaaggcagtactatgtcgtctgctatgataactggaatgcacccaaacacaactgcttcaactaacctagggctccatggagcccatcctagaggacatagacagaagatggctctctgcatgtcttcgtagtatgttgtcgggtgatctgttgagatgtcaaacaaagggttgttcttgaagttctcccacaccgctgctcttgcacctctatacaaagagagaagttccagtcagcagattctaaaacaatttgatcttagctaaccttatatataacctaacttcctaatgaggaatgcttaattgttatcttaataggtagatcttgatgtatatgtgcttcttttattgtatgatactatagagtttgcagttccattttggttgaaaaatctatgtaagactagagaaaactcatcacttgagagttttacaagtctacaaaatatgtaccttgcataatatccaccttcggggtcgttgttaacatcataaaataaaccgcggaagtagacaaagatagagcgtggaatatctggaggaataaaatgggcctgcatcttctgtggaggtgcaaaaggaggaatagtgatcgagccttcgtccaaacagacatggttcctttgaccaaatgtctgaaccaaagtggcacgctggagtagtggaagtatccctctttcaatggctttttcctcctgtttaatgtcaatcaaatcttcaattcccacacaaatcattggaatattccacaatcttatacaataaactcataaacagattctcagtttccatgtaactaagtactaatgtgatgatacaacagctaattttaagctaatgatcatctatcattgtaagatcacagggtattcttgatgaacagcaaccaccaaagtattcaatgcatataaaaaatagagtttgttcctgaatgcagagataatctacctgataatggaagcaagctccaaagtcatggggcacaacaaagaagtgatcagctccttcagtccgattccaataaggccaatttgatgagattagttgtatcgaacttctcatcatacgcggcgatttaaacggtaatggcaagccggtaggagtgaggtcgcaagtaggataaattggcgtgtaaaaccaatcagcttcatcaggattacgcgttcgaacaggactagataaaaggaacctgtgcataaaaatctcagcagcaaacatgtgtgtaagacatcgaggatccttttgcagtaatttcttgttgtacttgcttggaagctcatatacataaaccttaagctttcccactggatcatcctccaaaacatcaccagcacttcctgcatttcaaaaacacacctttttgagctctcttacacagctgttacatagttcctcaatcaatagcattgacttcttaagcaaatcaaattatatgtctataaaccaaatgctggagaaacgacagatttcaaacttatttgagcgaccctcaaggattaatcaattcaactctacattccaatctgctggagcaagaagaacaagtacctgaaattcgctctgtccgaacattttgtttagcggaagaagcagagaagaagaggaacagaagaatggcggagaggcaagagtggattttcatatctaccggagatgtgtttgaaggtttggatcgcagaaaggaagaaggaagaggaagaatataagggaagagtatcgttgggaggtcatgggcgcagtggttgacgagtttacttcggtattaggttttagggtttattttattcagaaggaagacgtgaatggtgaaaatgaaatagagtgtcgatggaaaacgaaattggagaaatagcttcaagtcacagataagtaagaaattgcttgtgatgtactttttttttccttgaattcaacgaccaaagacggaaactggtgcacatcacaaggcgcgtgctattatgggctgagttaatgtccattgggccttgctaacgtccaacgttgactagttataacttccgtagtaggtcatgatcgttttagagtggccactatcaacaactagttaacgacaacaattttttatatatatgttttatagttgttggtaatacgacaattataggtgacataattcattgattagcgattaatatatttgagatcactgtaaaagaagtactatgattcagtttttgatcgttttatgtcattagcaacgatgaaatgaacattgttatatatctctaaatgtaaccataacattgtggataataatctgttggagtgtgaacactctgaaagattctaaatcatccaattttatgtgaagaaatatgtagaaaaaacaaacaatggatgagttataggtttggttaagacttgaaaagtcattgatcacggcttttgtccattattccgtgtttaaagtaatttacattctcttttaagatctctcagtccaaagacaatg

SEQ ID NO: 16144 - DNA, 3000 bp, Unknown; identical to SEQ ID NO: 5547
  misc_feature (1)..( 3000): 2750-1469P.txt file - cDNA_ID_1376639; gDNA_ID_1620801; Annot_ID_168688

SEQ ID NO: 16145 - DNA, 3003 bp, Unknown
  misc_feature (1)..( 3003): 2750-1469P.txt file - cDNA_ID_1376726; gDNA_ID_2926232; Annot_ID_142694
gtgtgaggattcttagggtttcaaatgaaggacgcgaatcgtacctcgatatgtggaagaacgctgttgatcgcgagaagaaagagaaggcctttgaaaaaattgcagagaatgttgtagctgttgatggtgagaaggagaaaggaggagacttggagaagaagagcgatgagtttcagaagatcctcgaggtttccgttgaggaaagagatcggattcagcgaatgcaggtcgttgatcgtgccgctgccgcaatctccgcagctagagctattctcgcctctaacaattccggcgacggcaaagaaggattcccaaatgaagacaacactgtcacaagtgaagtcacagagacaccgaaaaatgctaaacttggtacaaatcttctacttgttagcacaatccaaagttaatgatagtattagtcaccttacttggctatgttattggaaattttattaggaatgtggagcagaacagtgtatgtgccacggtcagaaacttcagggactgagacaccaggaccagatttttggtcatggacacctcctcaaggtagtgaaattagttctgtggacttgcaggctgtggaaaagcctgctgagtttccaactttgccaaatcctgtattggagaaagataaatcagcggattctctttcgataccatatgagagtatgctttcttctgaaagacatagctttactatcccgccttttgagtctttgattgaggttcgaaaagaggctgagacgaagcctagctccgagactttatcgacagaacatgaccttgatctcatatcttcagcaaacgcggaagaagtagctcgtgttcttgatagtttggatgaatcttcaacgcatggagttagcgaagatggattgaagtggtggaagcaaacgggtgtggagaaaagacctgatggtgtggtttgcaggtggacaatgatacgtggggttactgctgatggtgttgttgagtggcaagataagtattgggaggcttctgatgattttgggttcaaggaacttggttctgagaaatcaggacgtgatgccactggaaacgtgtggcgtgagttctggagagagtcaatgagccaggttagtgtaaagtagttgccgtagtaaatctaacgcactatagactatttgagacttaatttgaattgtctattacaggagaatggtgttgtgcatatggagaaaactgcagacaaatggggaaagagtggacaaggtgatgaatggcaagagaaatggtgggagcattacgatgctaccggaaaatcagaaaaatgggctcataagtggtgcagcattgaccgcaacacgcctcttgacgctggccacgctcatgtctggcacgagaggtattctcaaaatcctcttttcacataacgaaacactaataacataatcgaatctttatcctttaactttcagtccttaaaatatcaatcaatctctttaacacaagttagaatgtttgtcctttaacttttacaccttatattgttgaacatcaaatcagttcagtagcaaaacattgccttttcatactctttaaggtgctctattaacatttagaagcttagtctgcgagctttgttgaactgttatcaaaacagaactgacactagacaagctgtgaccaaataacagggaatgtagagtgtttctaaatatgtcttgattggttttgaccaggtggggagagaagtatgacgggcaaggcggaagcacaaagtacacagacaagtgggcggaacggtgggtaggtgacggttgggacaaatggggagacaaatgggacgagaactttaacccgagcgctcaaggagtgaaacaaggtgagacttggtgggaagggaagcacggcgacagatggaaccgaagctggggagaaggtcacaacggatcaggatgggttcacaaatacggaaaaagcagcagcggtgaacactgggacacacatgtaccacaagaaacttggtatgagaagttccctcactttggcttcttccactgttttgacaactctgttcagctccgagccgttaagaagccttctgatatgtcctagatatatcaaatactaagcataaaatatataaataagctgggacaatcaaagaattggcctacaatattagagtagtttgatcaagtgcaatgtatgtaatatttattatgacttctaatttgttctatgctttggtgtttcttaatgagtatggccaaagtttatttggtagttactaatataacacaaatctgattagaaaactggaacacattccattccaggagcataaagttatatgaacagataatctaaactctttatttggtaaagataagaagacaaatattttctgtaaccaataataatcttcagttacatttgtattaaattctaataaaaaaaatatacagaggacaagccaaagtggaaccccacccactgtcttctcaaagattaaaaaaaagaaaaggattttacccaaaatctccgatattcttattcctttgctgtatcatcttcttcttctacttcgtcctcatcatcgtcacatagatcctcctttttcgttaattggggagagatatacgtaacagctcttctctctacaaagaagttgacttttgcatccttacatctctcaaatctttctctggttaatctgtattcgtgtatttttgcagtttcttttgaggatcagatcgtgacagggtttagctcaaggagaggtattagatccgtactttgtgataaactttctcaaggtttacgatctcattctatctagatcggcttcgtatagatacaatcttgtttcaattagcaatggatcgattttgttattcgaatatttagaaaaaggaaagatttttccaaaggggtttcctcttataccattttttctgggttttttgaaatttagggtgagaaaaagaagaagaaggtgagaaaagtgaaggcaaggctttgaggatg

SEQ ID NO: 16146 - DNA, 3003 bp, Unknown; identical to SEQ ID NO: 16145
  misc_feature (1)..( 3003): 2750-1469P.txt file - cDNA_ID_1376726; gDNA_ID_2926232; Annot_ID_203746

SEQ ID NO: 16147 - DNA, 3003 bp, Unknown
  misc_feature (1)..( 3003): 2750-1469P.txt file - cDNA_ID_1376881; gDNA_ID_1972143; Annot_ID_179295
ctccgcttcaatcgggtcaaaccccaatcggacggctctaactcctcctcaccaattcaaattttacaatgtgtctacaaaaagggctctgagattaaccaaatcagatcctttctatgccggagttgaaacactagatagaagaaacagagacgtccaacaatccaacgaatccgggttattaattggaggtaaaagtaatggttttgccatctgccgacgacagatcggcggtgacaacgatgataaatactagtctctcttttttcacaaacgggaagaaaaaaagaaagaaggatcaaagctcacaagccaatgctacgattctgacaaagagattgaagaagagtgatattcagaatcgcaggaaagacgaaatagagaaaaacaaaatgaactttttggttttctctccagaaacaaaaacttccgttttcttctgttcttttttttgtttgtttgctttcttcaaccattcttttttaattacattaatattgcacgtcgtgttattttattttaactttatgttttaaaaaaacatataaggaagtaagtactactcctcagtgttttaagaattactatattagttgactaaatataatttactcaattaaacatgcatttaatttgttcagtctcgtaatagacagtgattagtgattactgtattttaatttctcttgtttacgaattcataaagaaaagaaattagtagtacacattacacaacaacaaaacgtaatatagaaaaacttgacaacttggtctgactctgagccgtctctgctcggtctgctgtcaaaatcttttctttggacaattctaccccttgttttaagtgtattaaacattatatattcgaggccgaaagagttttcgcactttattcaaattgactaattgagcatgaaatacagcattaagaaattagttatttgtaattaacgaaactttgacctcactttttattctccacattgtatgatagatagatccattcattgaccattgttcatcgtgatgccaaaaaaaaaaaaaaaaaaaacattcattgtccactttagttaagctggtaataaagcgagtatagaaaataataccgcaaatatccgaatatattacctaatttcctaatataagacatgtatatataagtcgacggaaaagacggtaataattaatatttccatttaggacctaatgccatctcattttcatttccaaccgtaaatatttttaatgtgaaaacggtaaattttggtgcaagataagtaactttactaatactgttgatttgtattttgtagttgtagttaacaaaggaaattcggggaataaagaaacatagtaagggcacaacaaaaattttatctattaataaccacatggtcccaaaaagccataataaagtcgtatgatgacatgtttacacgaccatcgttagaaaattaatacatattacggatatcaaaatcacacccaattttcaaatctctttatctaattatctaaactgttccgtttttagagggacccaacaacaagccaaagcaaaaactttctggtaattgaatgtatattgtatcatttcgccaacaatttgtttgaaaatggatgatttcgccaacatagtttttggaagaatctgaagttttggaaccctatttataaattatataagtccattaaataaaagtatgggccgcgaaggaaaacgttatgggcttcgtattgggtttataatagaaagcccaatatgttaaaatttatgaaggaggctgggcttcacgtgagttattactactagacctctgtattcttctgaatctgacatatcgctgattttaatgcgacgtggagctttataagacgcaattcatcaaaatgaatgagccccactattttgttgttgttttggagtttttctgattgagggaaaagatgaaggggatcttcacagtcccccaacaacactccattggagccatttcccaagttggtaacacgtttatcaaagccctccctcgttttcatcaacaacttatcgattcatttgctttgtagatctctctttgtttcctgagctgagtttacttaggactaatcttcttcttcttttttttaaaagaaataaatgcatggcaagattgaaaatcaaattaaaattcagtaatcactatgctaaactaataccccatcaatttataatagaaaatcaaattttgatacgttaccggtggattttagatatactcatactaattaattactaggatttcgaaaatgactagacatcttcttgccatatttgctaagtatgattgaaatcaaactgatttaaagttagtaatacatatatatgctcatgattttcttgttttttggggtcaacatacatttctgcaaatcaaatatgctggtttaagtctactaaacacaaaagttctcatatattaatatattttcttttgtctcaataattctagtaaataaagtagaggaagagaatgatgcacgccagtagagatttttattcatataaaatcgttgtctttagaggaataatacatgccttaattctcaacaaaaatacatttataatgaggaaagtttactcaagttgcataatatatcaaagtacccaatgcacgaattctaatctttttttaatactaatcattaagtccattttgacgaaatatgtgaacgtcattacaaaaatcttcagaatattcagaccaattcaattttattaattacaaggattatcagcttcgaacataattagacggtaagagccgccctgttagggttttttgtcctcaatgccaaaatcctcccattgcagatattatatcactcccactgtctaataaacaactctcttctcctctctacccagagcgagtcaccttatcgtctctctatctcctccttcctatatccccttgctctctgggtttttgctcagtgtgctacgtgagagatagagagatg

SEQ ID NO: 16148 - DNA, 3000 bp, Unknown; identical to SEQ ID NO: 14141
  misc_feature (1)..( 3000): 2750-1469P.txt file - cDNA_ID_1376943; gDNA_ID_2214702; Annot_ID_136892

SEQ ID NO: 16149 - DNA, 3000 bp, Unknown; identical to SEQ ID NO: 14141
  misc_feature (1)..( 3000): 2750-1469P.txt file - cDNA_ID_1376943; gDNA_ID_2214702; Annot_ID_189714

SEQ ID NO: 16150 - DNA, 3003 bp, Unknown
  misc_feature (1)..( 3003): 2750-1469P.txt file - cDNA_ID_1377007; gDNA_ID_1972029; Annot_ID_178213
tatcttctctgcctgttgtattgattttaattgtattcgaggttaagttttgactgatgttttactagcgatcgcagagtgatcgataattaacaagtttatttttcgatttggtaggtatatagtgaattaaacatgatttttgttcttcctgaacaacctaaagcagtgttatgaacgcatcacgcatgtaacaaccagtcaaccatattagtgtgactttaattcattgaataaatgaaatttttttattttcaacaaggcttgtaacggttgataaatctactcagaaaacttctttttgtttgtcttgcaaatacaaacgatacgtttcaactctttttttggcgtccaataatacttcttaaaaaataatttgtttattgtcatgagctacacgtgggaagacaagtcctatccattattactacacactactccaacatttgcccacattttgaaaaaaacatttttttgtaattcaattattcgacacaaccaatcccatctcttgtttcacttccgccctccatctttcttcgtgattgagagaatcttcaacgaaagaaagcaactttttttgggtgaaattcacagaacaaccaaggtttttcttcttcttcttcttctccagttcctacaggtttactcttactcatcttcatctttgtctcgttcttgctcttcaatttctggtctttttgttgttcttgtcttctcgccaaatatactaagatctaagttttatatcattgtaattatcaccaacgaactgttaagaccaaatttgattactcgaaatggttttgggtttagggtatgaagaactgatcaaaagattcaattttttatgaagtcaactttcatctgcaaattgagcaatctcagatttcgattgtgtttcagaatcatgcctgacaagaacatcgtagaggacgttatcggtgatttggtggataacttcacggagactgttcagaagaacaaacatggttcctccttcttcgaacaagaagattccgtcagttctcgtttcaaccgtttgtttgatcgccagaagccaattcatcatgtcttaggcggtggcaaatgtaagaattcgtatacaggaacataaatatgagattggtttttcttgtaattgagtattgagagattccttcagctgctgatgtgttgttatggaggaacaagaagatctctgcaagtgttttgatgggagctaccgcaatttgggtgctttttgaatggatcaatttccatttcctgtctctcgtttgctatgccctcttgcttggtatgattgcacaattcgtttggtctaacgcctctggattcttaaaccggtaacttgttggagtgttgttgtcattattattggtaccttgtgattgcaatctaacacaatgtcctttaatgtctcaaagcagctcacagtctagagtgcctcgcctagttcttccaaaggatttctttgctgaagtcggtgtggccgttggaaaagaagttaaccgcggtttgttgtttcttcaggacttggcttgtaaagggaatttgaaacagttcctcatggtgcgttgtttgtttcaataaccacaatcttgtttgtataatgtattagcactttcattactatgctaagatagaaactttgatcacaatatcatttttcaggctgtaatcggactatgggtagctgcaatggtcgggagctgttgcaatttcctaactgttttgtatatcggtgagtggttcttattagtgtatcctcttttgagattggaagttgagtaatacaagactttaaagggatgcattttatgtgtgtgtgtgaagggtttgttggggcacacacaatgccggttctgtatgagagatacgaagacgaagtggatggttttatggattctatgatcatgaagtttcatagtcattacaagaagcttgatactgggtttctcagtagaatcccaagtggaaagtttggattaaagaagcgtgagtgactaaatcactcaagcattttcttattttaccttgtttgttgttagaacaatatggattatggtttgctaaatgaatgttttgagaatattattcattcatgtagattttgtgtatttccttactaaacaataccttgtccatgtatttgtcaataccttggttaataagagaatcatcatatctgtcaaaattatacaagtagattgagagttcattaactcaatgtctaaaaatgtaagacttaaaacaagtttgaatcaaaattatttcacaaatcaaaagtatggttttcttatttcgtaagaatcgttgactaatattgaccggctggctaataagaagatcagataactctacaggtatgggatccaccattgtcaaacattttacacgtgtcagcttcctgagcttcgaagcctgaatgttaaaattaaaaaatttaaaagaaagaaatataaaaagaagtaaatcaaagaaaatggagtaaagaaattgatccacgatcgatcaacaaagtgaggttaggttccatctccacctctttctctctcgaatcttctccgattaaaggtgctcttttgcttatgaaatttgtgtttcttaagctaatcgaatttgttttcttgatcgttttgatgttcttttttttttttgttattgttgttgatttgatgtgatccggttgtatttgaagacgaaatcgattcgaagtgttgaggtttagtttggggtaaaatagatgattctcaatctgttcttatttgtgaattattttgtatttctgattctctgtttttttctgtttttttttgtttttttttggatttgaaacctagagaaagaaccttgtttcattagtgggagataaaaacctctaatgatttgatataaatttttgaacttgtacagattcgaatcgatttcccttgtaccctctcttaatactggttcttgcctgacaggaacaaggtctggtttacaaaagtctcatagatg

SEQ ID NO: 16151 - DNA, 3000 bp, Unknown
  misc_feature (1)..( 3000): 2750-1469P.txt file - cDNA_ID_1377119; gDNA_ID_2936560; Annot_ID_194411
atatctcagtaaacgttttcagcttcctctcttcttcttcttgtttaaccagatcaaagatcatatcttggtcaacacgttcatcttccatgattacaacaagcgggttccctgaatcttgactttgaaccggaagaggaatctgtgaatcttgttgttgaatgcccctatcatcatcatcatcttcttcttcttcttcatccagtatgttttcgagctcatttgcatattcctccatgttttgatccgttgtggatcttgaaccatgatcttgaagttgaagatgaatctctaggtgttgttgttgaatggcactatcatcatctccttcttcttcttcatccagcatcttttcaagatcatccgcatattcctccatatgtttatccaatgtggatcttgaatcatgactttgaagaggaaactctggatgttgttgttgaatggccctatcatcatcttcttcttgttcttcatcaagcatattttcgagctcatccgcatattcctccatgttttgatccattgtggatcctgaaaccatattgttgtgtagtggtggttgctcaacgaggttgttgttgttctctgtcgggaacttaaattggtcaaggacgttcttcttcatacggatattacacaaggcaacttcttggaattcagcatcgttctcactcgctagccaatactcagtcatacaccaaccagtggcttctccctcttataatttatttttttatttttatttttttgttttgataaacttagttttaattttttcctaaaattttcctaaaacttagcattagaaggttttttttaatctccctaactaactatgtattaaaagggttttttcttccattatacgaggttatcaaccaataaaattaaaagataaatcatttcaaatttgcttaatcaaaatacagatttatcgatattttttaagtaaactttttgtaatgttttttccttttctaataatacaaaggagttaattagatatttcaagattataggaaaattgttatctataaccctatacgattggttacgtgcataagaagttagtggctaatcatatccaaacttggtgatttttatacgatttgattgcatagcgataaacttgttaacaaattaaaaagctcttgtattctctgttttgtgctgcaatatattaaacagtctacttcatttctggtataattcaaaggcggcactaatattactaaataatctctgatatgatctatatttagttaataaattaccataatgataaaggatatttaacaagtaacaacattaactggcaacaaaaccatccatgaactacttcggtgtaaaataaaaactgaaaattttagataacaaatgttactctaaaattagtgtttataaacaaaacaatttctctaaaatcttcattcttaataaccctctctttaagctttttcgaaacaaaagaaataagatgaagaagtcatcaccattgctctgtttctctcttgctttgttttctctcctctcatctccttcctcttccactcgtataatctcctccattgtcccctccgccgctccttctcccgccgtagcccccaccaccgacggcgacgtagacgaaaacgatttctccgccttcacgcaatggaacattttaaacctaacggaccttaaaagtacctttaaaaacctcccggatttctctaagctcaacatctcatcccttcacgtgtcacccgccgttggctccgtctgctctaacaccgactacgccgccgaatgcatcgtctcaatcctcccactcctccgtgacttccgcaaattcgagccaaaacccatcgacgtccttcgaatggagatgagtgcgctctacgagaaagctaacgccacgcttgacttagccaagcgtctcatcgtggataagtcaacgccgcgtgacgtggctgatgtattggacttgtgtgtcgataactacgagtcgcttctcgatgatcttaaagatgcttccgtagccgtcgatgatggagactttgaacggctcgagagtgtggtcagtgctgcgatcgctgatgtggtgacttgctctgacgcgttcgctgagtcgtcggagcttgagtcgccgatggctaacgttgatgattttcttaagaaactttgtagcaatgtcttggctatttctcagatgatccacatgtaaatgcgtaagtatattaatgataaagagatatagtacaacgaaaaaaataatatagatactaaagttacgcaaaaaaaaatttcttccaaattatcaaaatgtgaagtcttgaatttgagaaaaaaaaaagtgtatggtaatgagttcaaaaatgtaaatgttattaataatgtacaaattattattaaagtcagtaagttgattcagaagagaaatgtatagtttcttcttaaattttctgatgagaattgtaggaaatcaaattactactatttaaccattttagaattatgatccatttgaatatatttttcaacatatcataaactttataaaagaattttggaagaggtatttatggttggcccagttatatctgtttcacacaaagcccataaacacataattttcgaacatgcatatttatgtttggcccatttctctgtttcacacaaagcccataaacacatattctggaacagatatttattgtttaatgctttaattctaaaatttcctctttgaaaacaacacgtgacaatcgcgttttgtaagtaccgaaaggcgttagcgtgtaatataatcggacctaaaattgacccgtcccaatcctaaattaacgggttcaaaacccgacccgataacacacacacagatatcaccaccattagtctcacttcgaagaagcaaaacaaaatccccaaattttcaacaaggataagagccggaagctcatcgccggtgaacggaactagggtttcattcatccccaaattgataacaagaaaatg

SEQ ID NO: 16152 - DNA, 3003 bp, Unknown
  misc_feature (1)..( 3003): 2750-1469P.txt file - cDNA_ID_1377348; gDNA_ID_1620467; Annot_ID_157925
gtcagaatcttcaggggagggattagaggggataggggcagagggtaatataggattggaggttttgatttggtaagagaaatagaagccttgtttgtgagcaagagagaggttgattttggtttaagtatagtgaaagtttcagctaccttatcttgtattgtagcagtaattccagatctagaagaatttgaaaccgcatctggacaaacagaaataggagtctcaacaagatgcatctctacatcagtagtagttggatcagaagcaacgaccaacacagagcctaccactacaggctcaagaacacgagcagtttgcaatgaaagctttggggtcttggaggaactggaggacagggaagggaactgggacagggataaaataggggaagagggatcagggggtcaggagggagaggcggaggagggatctggttaccaccagcggtgggaagcattggattcaaggcggaagcacgaccattcgagaaccagcggttctgcattgggaactgggacagagagaaaaaagaaaaaagaacacacaataccagacaaaaaaactatttagcaagttatatattcatatcacctcaataccatacatcacaatgcttaaaataaatagagaatatagtataactattcgattccataatttaaggtaaattgacctcgaaaaaaatatctacaacctccaccaaataaatttgtttcgaaaacgtttgatatattccttaaacaacgtaatttataaattcaaatcaaaaaacagatcttcaaattcgactaaatctatatattcgattcaattgattgtcattgaacaattaataaaattaaatacccgaatatatcaagtatatatcttaactaacattatacacaaatattattctaggttgtactttcctaaaccctatatcaaacaattcacgaactagattactataaatatatggtgaagaatgcaattgaaagtcaactaaagaaaagtgaacaagctacacaggttcatcagatatggagagtggtgaagaatttgatagtagttattattttacaaatataagaaatagaatttatttactaataaaacttttttattctaactattacaataggaatatattctgtaagaacattgttttttgttaactaaatcaactttcagttatccaaaaaacacaaccaaacttttcaattaaatcataatgaattgtataaattaacattattctctacatttgtaatagatcagacattaaataaaattcagtttaccaacattaaaaataccaaacaattaaatgtataatatttacgtaaaatatatatactaatataaaatttaatatcacaaaataagtacacgttttattttaacaaaaaagttttaacaaaattaattaaacaaaaatacctacatgtatgtgcgggtcatgatctagtattcaataaaagaacatgaacaaactctatatttacataaggaatttgaatacaacaagtttctctcatatgtggctttagaaattataaatgagagaaatttaaaatattcattttggcctaatacaaataacaataaaaattgtctacaatgagagactaattttctgatacttatgttactgcgagataaatatcttttaaatttgacgactctttactaggaattatacaatcaaacttatgtaatggagctatatattttaatagtactccaaacttttaagtaatattacatgattctacaatatttaataaatgtttaaaaaatatacacctgattgaaataagtttcaacaagaaaaacatggctattttgttggtgtatcaaatttattttaagcaatctacatctctttttaatctgtttattcctagatgataaaggacaaacaacaatatcagttgtacatggtaaaatagtctaccctctacgtatacacataaacggttaaaatgaacacaaattacaatttagaccaatggaaaatcgattttactcaaacaccaacaaactttgaacaaagaactgttacacgtagaaccaaacaatatgatgaaaagtattattaaaatttagatcctttagaaattcaccctcttttggaataaattcattttatgcacatttttttttctccgattataggtctagccaaactattactaactcggaaaaaaatacagaaaaaatattcacaaaaaaaagagaataaacctatcaaatttcacctaggtgatttgatagaagtcgtatcacctagttttcctacttctccaaaagtttcagatttgaaatagacaaagaatatcaaatttaaattagagaaaaaaatatcttaaaggagaatttttatccaataaagttaaaaataaagaaaaatggtactttgacaccttcaaagaattttttttttaaagagaattatggtataaagatatgaagtacatattctattttttgcatggtttgaaatatgtgctgtagaaaataaaatagattatccttacaaaaatgaatcaataacattagttcaatagtatataatacatgggaaatgactattgagaaatacaaaagaattcatccaccattaaaagatatatgttgtgactagtgcatggatagaaaaacaagaatttaaagaaatcagaagaatttatacttcttctctttcagggaatacagttttcgtctcaacaaaaaattctttaacaattcctgcggctggacttggactggttagaattgctccttcacgaaatttggggtgaatttacaaataaacataaataaagggaggtttcacgaatttttaaaaataagtatcctgatcactaaatattacaaaactaaagaacgtcacacagatggtgatcgaacaataccgacacctaaacctctgtaccacaattcgacgcaattcatcgttacccaaaaacctctgtttcgattcctagacactctcactagggttttacaactatg

SEQ ID NO: 16153 - DNA, 3003 bp, Unknown
  misc_feature (1)..( 3003): 2750-1469P.txt file - cDNA_ID_1377706; gDNA_ID_1620553; Annot_ID_160368
ggtacaacgggatatgagctgtgcacaagaacgaagaaaaggcataacaacaaattcatcagttgtattgcttcacgaaataaactgaaaccatgcaataaatatacaataaacagataaccccactaactcgtatcaaatagacaagagcatataatagacatccccaatggtacatactatataacattaagcttagcctgatgaaaagaaaaagaacattacccttgagaaataacattctcgtgtcagaatgagatgctacgcactgcagagtaaaacaacaagacagaaaatcattagaaatctgatggattcagcaaaatatatgaacatgaaataaaacatcctaaataagaagacgaaatctccatgtgaacctgaagaagagcgagcgagttgcaaacacggttggactgagcaggagtcagatttggaggtgcaagaacagagtagattgatacaatctcctgcaagcacaaatagacgaaacagtcaaatcaaaaccacgctactaacaccgaataaatagcatttagatataaaagaatcatttgcattcaacgctcatcaatttaacaagaaaggaaaagcatttaagtaactggagataaccgaaacagatgcatttaagtcattacctgtaacaaggcagcaatggtaccaaaagagttccacaacaaaggcgccagatcctgaaacaattctcttttctacaaaagaaaccactaattcagatactgaaccaagttcccaaattcacatactcaacacaatttgagaaaagttctcaactttagcaaatttcaagagtaaccctagcgctcgttgacgaatcagacaaaaaaaacgactgcccagatggaagaaatgaagaagaaaacatgagagattataagaaaaccttggaaagctcgagaagagcattttctctgagttcaggattgctgagatcgagtaccaactgttcagcagaggccaaattgcgatctttgttggccggagctccggtaggattttgtgcggaggtgctaggaccaccgaaaggtgtgcccatggagagagaagaaggtagattcgccattctccagagttggttttctcgtttgtttgttaatgggacttttcaaggattcggtttctcccttcttctctcttctttatagatggcgattacgcccctttcttccttatttatttattttcatgtcaaaacaaaaaaaaatgtttagtttcaaaatagttttaatcatcactatttacgacttaaaccgttttttatttgttattcataaattataatatgtagtgatgcatatggtaaacaaataaacaaaaagtagtgttaattggtttgtgtacaaaattaagttataagttaaacaacatgaatgtgaacggaaatcaatttatcaaagcaatggcacataagcaagaaatagttctctaataatatcattaagttttttaatcattgatgtaaaatatcacatatgagtccaacataagaaaatatttttaaaaaaaattgttgactgaacgaatttagacggaccaaaacgtaagaactcgaacactaaatgagatttaaattttcaagataggcgtaaatgtaaccgatgcttctgaaacaaataataaaagagttagaaagctttataagaaaagtacaagcggaaaatctgcggttttccaagtgtgacgatatctttaaaaaaaattctattaattttcaacttttttttattcagaatatatattaaaaaactaataaaataatgttttgagtcaaatgtcactatgtttgtagtttaatttctgcatattacgtaaattttaaccttaaatctacatataaatttttgcagccattttgtgaaataaatcatatagttgagacttatttacaatggctgccactgaattttaatgtttgtttttgataattagaaagagagtcggctatggcctatgggccaaactggccaagcatgggattgtagtggttatggctcatagtgggaaggtgtttgagtaaccatgtttacatatttttttaacttgtaaacatactattactgaaccatatattattttgggcttgtggtcttcattttgttagggccatttctgcttataaacaatttactgagtataatttcaatattatttcgcggtcaaaaaaaaaaattcaatattatttctgtgtcaagtttacattttatgaattgatttccaataaagcatagcataagcaaaacaaaatacttgggacttgaatgtttcattgcattttaatttttggaatatcagtgtcataaagcatagtgtgtttgcagtaagcccactggaaaaaaaatcatatgtaaagagtgcttttactaggcccagcgggaaaaaaatattttgacccaaaagttaacaaaaattaggactgtttttatgtgagatttcatttgttaattgagcatccattttgtaagtgctcaattaacaaatgatattttgacccaagttaacaaattaaaatgtgtatgtcacaccaatcaacaacataatactataattcttatctaccaaactaaaaccacaaacatagattttagcataaaatacacaatacaaaataaaactaaacgtaggcatattataaaaccgattcagagcataaatttaggtttattctatgttgaaaatagtattttgattttttttattctatgggtttatgaaaagatttatccaaaatagaaagaaataaacaagaggagtggttgaataaattgtactattttggagggttcgttttcaaaattagaaagaatacagttatagatacgaaaaatatctgatcctaatcatcacttcaaaatatctttctttccctttccactttttcgcttacactttccccaactcatcatcactctaaaatatctcccaccacataccacttaacccgacccgacccgaccggaaaacccgacccgatccatcccaatg

SEQ ID NO: 16154 - DNA, 3000 bp, Unknown; identical to SEQ ID NO: 11013
  misc_feature (1)..( 3000): 2750-1469P.txt file - cDNA_ID_1377843; gDNA_ID_2214471; Annot_ID_133094

SEQ ID NO: 16155 - DNA, 3000 bp, Unknown; identical to SEQ ID NO: 11013
  misc_feature (1)..( 3000): 2750-1469P.txt file - cDNA_ID_1377843; gDNA_ID_2214471; Annot_ID_183032

SEQ ID NO: 16156 - DNA, 3000 bp, Unknown; identical to SEQ ID NO: 5553
  misc_feature (1)..( 3000): 2750-1469P.txt file - cDNA_ID_1377914; gDNA_ID_1620801; Annot_ID_168677

SEQ ID NO: 16157 - DNA, 3000 bp, Unknown; identical to SEQ ID NO: 7258
  misc_feature (1)..( 3000): 2750-1469P.txt file - cDNA_ID_1378100; gDNA_ID_1621135; Annot_ID_56550

SEQ ID NO: 16158 - DNA, 3000 bp, Unknown; identical to SEQ ID NO: 7258
  misc_feature (1)..( 3000): 2750-1469P.txt file - cDNA_ID_1378100; gDNA_ID_1621135; Annot_ID_172639

SEQ ID NO: 16159 - DNA, 3003 bp, Unknown
  misc_feature (1)..( 3003): 2750-1469P.txt file - cDNA_ID_1378208; gDNA_ID_1620620; Annot_ID_46993
ttcatctcccaaaaagctcctagatgatggcttgtcctgtttgattaggctggtgatggtttactcaaagaacagactcttgaatgttatggaaaaaagaacggggaaatggttttcaacttttcgtactattatcaatgactcatagcttcttacctgaaatccctttacctgaatatttttccacttaagtttttttattgttttgttttctacgctctcaattttactctgcctgtctgtacctcttgcaggaatggtctaaacaaggatggtaagtatgcatttgcggagatgatgaccgaagacgtagagacttgtagagatgaacgatgctaccggctatggatcaacagcctcgggattgacagttatgtcaataatgtatttgaagatgttagaaatgggtaatctttattttgagcttatagtaaatcaagcaattagtagaaaattttcctgcagttgatgacgttgcatttggaaaatactgaaaacgctctttggtcctgatgccttttgtttgttccatttactattttatgcagatggattcttcttgaggttcttgacaaggtctctcccagttcagtcaactggaagcatgcttccaaaccaccgattaagatgccgtttagaaaagtagagaactgcaatcaagtcataaagatcgggaaacagctaaaattctcacttgtaaatgtagctggaaatgacatagttcaagggaataagaagctcattcttggtaatcattacccgagagctcatgtttctcttagcttgatacaaaaacatgatcgccttgccttacaaactggagatttatatggttgtgtatctcaggtctcttatggcagttgatgagattccatatgctccaacttctcaagagtctcagatctcggacactaggtaaagagatgactgatgcagatatcctcagctgggccaacaggaaagtaagaacaatgggacgaaaattgcaaatcgagagtttcaaggttcctttctttacaactacttcaaacacttaccacaatagtattatataaagtatgtccacctatcaccttctagtgaatcaaattaaaattctccaggacaagagtctatcgagtgggttattcttcctcaaccttctatgggcggttgaaccaagagttgtgaactggaatcttgtcaccaagggtgaaacaggttttcactactctttttactaaggtatagttacttactccgtttacctgaatcaaagcttatttgattattatatggttattgaaacgtacagatgatgagaagaggttgaatgctacatacatagttagtgtcgcaagaaagctcggttgttcggttttcttgttacctgaagatatcgtggaggtaagaactgagagactataatgtatcatcatccgaaatagcaattgctcagatgagatgtgttttggtatgttgtgacaggtgaatcagaagatgatcctaattttaacggcaagtataatgtactggagtcttcagagacattcacgggagagttcagattcgtcgtcaactcagagcaccacaacgacgtgcaccagcacagcctcgtcccctgccccatctgtcacagaagaggaggaagtctcctcattgagcggtgaagtcacgagcttggccgttggtgatgcggtttctgaaatcaccacggtctcagaggaagcatccatcgaatagagagagcgagatcacatatatactgatatacatctcttgctatagcaaagtagctgttataatagtgacttctctgtaatcttttgtttttttgtttcatcaactaaaattaccaaaaataataacaatgttacaaacactcaatcacatcgagaaaagtaaagtaaaattgtgaaaatttgtttagtacttaaaaagttaggaggaggaaaaagtgtacatcttattttgaaaacagacactacgcaaacaaccatggatcagacgacgatgatccacaacagtcaaggcaaacaagagatagatagctcaacagacgatgaagatagagaagatggaacgagacatgcagacaaaagaggacttgaaaaccgtggcgttgggcacctctaagatcaactacatggatcctaggatcacggtcgcatggtgcaaacgtcatgaagcacccattgaaaaggtagttaattatatacaaaacttgaatattgatctaccatgaaacaaagagagtcctctaataaagttttttttttgtaatggctggttcgttaatgtagatattcaacaagtcacttctggagaaatttgcgtgggcaatggacgtagaacctcacttcacattctaatatgcattgcactgcagcagctgatgagagtttctctataaaacagagcaaagcaggctacattttttttcttccaagtagataaattctttttgtttgtatctttatttgagatcatgtcttctttttttttcgtatatacaattgttcattgtttgcttgaattcaaatttagtctgttttataaaaaatgaaaccataatctttactattttaaaccataaaaaaaaagtcaattgtaaatacaaaacaccaaaggccaattaagatttattccaactggaaggatagagcaaaaaaaaaagaataatctggcgcaaaaatgacttacacaaatcaataagttttccaaattttgtttctttagcagaaaatcaaaaatgttattttggtcacaaatgtaaaaattggtataaacaaggttttaacaaaaaaagaaaaatatatatatacaaaggcaaaattacccctgagaaaatctggggccttgacacgacgatcctccatcatcctcttcctcgaggaacttcaattccaatctgtgagatctctgcacaacatcttgtctattttcaatcgaaacctctgtgagatcgcttttgatttttgtaattctcgtcgcaggatatctctctcattgggatcagacatg

SEQ ID NO: 16160 - DNA, 3003 bp, Unknown; identical to SEQ ID NO: 16159
  misc_feature (1)..( 3003): 2750-1469P.txt file - cDNA_ID_1378208; gDNA_ID_2926189; Annot_ID_140956

SEQ ID NO: 16161 - DNA, 3000 bp, Unknown; identical to SEQ ID NO: 4367
  misc_feature (1)..( 3000): 2750-1469P.txt file - cDNA_ID_1378280; gDNA_ID_1620702; Annot_ID_165117

SEQ ID NO: 16162 - DNA, 3000 bp, Unknown; identical to SEQ ID NO: 4367
  misc_feature (1)..( 3000): 2750-1469P.txt file - cDNA_ID_1378280; gDNA_ID_2926189; Annot_ID_200891

SEQ ID NO: 16163 - DNA, 3000 bp, Unknown
  misc_feature (1)..( 3000): 2750-1469P.txt file - cDNA_ID_1378400; gDNA_ID_1621142; Annot_ID_172884
attccggtcttaaactttgttgctagactatgctgggagttactcgacttcagcaaggtaatcatcgatctctgctggtgttagtaccctgcattaatcccaaaaaaccaattgagtatcaacaacattctattcaaacatcatcagcagcaaaaaagattctttgtttcaaagaaaaagggtacctgaaaactttgtcagcaccgattttgccaatttcaatatttttgcttgagatctctccctcaaagctatcacaaacaaaaaacaaaagacaaatgaggtgaaggcttttcggcacagtgtatgaagactaaagttacacatgtatgtatgtgtgtgtgtgtgtgtacaccatcatcagaaacagcttaaggtttaccacaagaatacaaacgttttaaaaccctgtgctttcattataaaagacagtgctatgggtttggtaatctatcagtcacactgagagtgtgatctatgaatatgaagtgaactctgattatcaggcgaactactttctaataataatgtagatttgtacttacccttctttcaatgtcagtatcgctgtgtgaatggcatcgtcaagttccatgtcttctgtgtacctgcaaggaaatcgtaattggttaaggtttgtcagcgacgaagagtggtttcatattgttatgacaggagcctatattatcgaaatttgagtagtaaaagaaaattttcaaaatcagtatactggttatatatctttggatatcaacaaattgtaaacagtattaccttttctcaaggaaggtttttgcattagaaacgttcttccccatggctgaagctttccaggagaaataagagccagatggatccacctagtgcaaaaacaaaatgatttgaattaaaccccgagtaaggaaattcaaaagcaaagttttaattctcaggttatattctcaagatgagatggtaattcagtttagacagaaacataaggtggtaactattgtaacatgatagaacagaaaggtaaatactctgctacaagttttgctaaagtttagtatttcagcgctgaaaagaatggaaattgagctaagaagattgggagactcgattgtgctcaatcaactaacacatatcctaaggaggaaaaacctgatacaattgtggacccttgtcatcatatccagccaccagcaaggaaaccccgaaaggcctaacacctctataaacaagagacagtaaccaaaattagaaacaggatatacaatgggtacaaatttgctaaagcaaaattatttcagagaagtaatacaaattagaaacaggatttacaatgggtacaaatttgctaaagcaacaaaatttacgccaagtcaattttcaaatctcaaattgcaagtgaaaagctaccactcgacagttacttttgctgaagaaatagttcagttcaattcaaacatattaggactatgggaggaagtaaaaatatgacagatgaggttgaatttacagttaaatatagcactcaccccgattgagtaaactcttgcataacagtagcggtttcccttacaagttgggtaacagggatgggttcctgtaacaataaagcttccttaggtgaaaccatatcacattagcaagtatttcaagcaaatttgagaaaagagagagaaaggattactttgtacagacgaagatattgctcagcctgtttcctactcttcctaacaagaactcgaaaatcaggacccatgccacttcatagaagaaaatgcagaaaaagttagtccttaagctataacatcaaaaacaaaaacaactaaaaacttaaaataaatgatgagcaaacctgtaaacaactccaatattaggagtcaaatgctgaattttttgaacctgaaacaggcaaaagagaaaactaatgtcagagatgttgactaaattacacaatcgaagaaagcatcacagagcatggctatatggtaatgatacgaatattcttgttgattatcaacttacagatgcttcatcaaccagaatagaaggcaacttcttttcagttgcaatgacaactccattagaagctgcagtaagaaaccaagttatcagaagaaatctacaaatttttcattgatctataaacaatttcatcatgacattgacaaacctttaatccctaaagatgtttggccagatccaacagctgtaagggcatgttctatctgcaccagcttaccagatgggctgtttcagacacagtacaacaaattagtcgcagcaaaaactaaccaaaatactcactatgattaaccaagttcgtacctgaaagtggtgagagaaaacgagtactgactatctcccatagctccttaagcaaattagcgaaagctgtgaacaacacaaacgagtaggatcaatttccccggaattcagggtttcaacgtcaccgggatcaaacgattcaggttttggtttggttaaatcattagagtcttaaaaacaatttgatagaatgggatttttgagatcgacacgaatcttcggaaaagaactagcgctgtgaagagaatagcttacctttagcttcagcttcgagatcgaacaagtgattagttgcagagagagagagagagaggtgaaataaataggcttttaggtttcttgcagagaagagaaggttgaagtgagattttacgaattcttttctggaagaagaaaagggaagtaaaaccaaacgactgcgttttatcagaaacgcgatttttaataaagagaacgcgaacgcgaattatatcaaagagaaggcaaacgtgaattttatataattaaacatgcgttagtcgcgtcacttatcctgatcactagtgatcagtgataatctattaatcatctaggtggcagaagcagcatcgttgagaacgaagaagcttgaaaaagttgcgagctcagagaatctggaagtagcaaaatttggcggctttaactcagcaatttgttctgtacatg

SEQ ID NO: 16164 - DNA, 517 bp, Unknown; identical to SEQ ID NO: 164
  misc_feature (1)..( 517): 2750-1469P.txt file - cDNA_ID_1378446; gDNA_ID_3474; Annot_ID_146327
  misc_feature (162)..(162): n is a, c, g, or t

SEQ ID NO: 16165 - DNA, 3000 bp, Unknown; identical to SEQ ID NO: 6723
  misc_feature (1)..( 3000): 2750-1469P.txt file - cDNA_ID_1378577; gDNA_ID_1621102; Annot_ID_171459

SEQ ID NO: 16166 - DNA, 3003 bp, Unknown
  misc_feature (1)..( 3003): 2750-1469P.txt file - cDNA_ID_1378577; gDNA_ID_2926189; Annot_ID_200870
accacaatcagctgcctccgcctctgcctcctccaccggtgcagcgtagaagcagtggcggtgacgttttcatggaggcaggtcgtctagcaacagagtacttggtttctcaaggtgttctaccacaaactgtgctttccagtaaatggcagaatggtaattttaggaagcaagctggagagtttcagagttccaggtctcaagaagaagcccgaatggatgtttcagctccagctgcagagaaaaggaggtatattgatggctatagctcagctggatccaggaatagcttgaaaggaaggagatcccaccgttatgactcggattttgggaggagcggatcttggtcagagagaagtaaagcttttgagactgagactggtgacgactctgtgtctgggcatcaagaagagcagccgcttgctgaagatattgctagctcggttcagcggtcagcctctggtgaatttatgagaaaatgtgaaggagcaggtgattccgagtctgtgttggacaagtacaatctccaggatgaggcacagtctaagacaggttcctcgagtgccgggaaagatatagtacaggattgtgaaatctctaaagtatccgaaggctcttctagcttgagtgctggatcaggagagatgaaaggtaggtctggtggtaatggtggagaggatgagaaccagactgctatcgaagatggatctatccatcaacgttgtgaagatgcatctattgatcaacagtgtggggctgatgaatcattcaccaagagtggtattgatttggcaacgctgtgtaaatttgagaaggtgcctacgaggacacgctcttctctgactgcaaaaggcccaaagctttatttgagtcataatatcaaggatacctctcataattctggacttgaagaagaagatcaaaccgaaaatcgatgtgagactcgaggccaatcatctggaaaggccgatagtactggtgatgaaaatgaccaagttgaagattttgctcttgttcaatatattgagaacagtaaatgtcataggtctaattcttttcccagtagcattctcagggataacagtgagaaagaatcaggattagaattgcctaatctgcacagatcacattcggtggggaaagtaggtgagaaaaggcctggtgaaggcagtgacttggaggagggatcaaaaagacagagagattgggtggcagtttctgaagctaatgaacgcttcaacatgtttaaaacaagcggaaaccaatgcgatccggaagaagaaggaaagacaagctcgttcaacaaaagactgattgacggtgctgctggaaaaagggtcagccatgaaagtctggttaataactctacatacaataggacacacactggcagaacaggtccagggtatgctgaagaacatcagctgtttcctgcttcgtttaagatgtgtgacctaaatctagggggagcgtcggatgtgaatgatgggataaaggaatctcgtcaagctgttgattttgatctctcaatcagcagttctagtaagtctctcgagtttggtacgagtactcggatgagcaatggtaaagagatagaagtgattaatttggatgatgatcaagaagtggtaaagtccagcaatgatccaggaagaaagtacggccaagtcctactcttaacacttatatatacacacacctattacattttggctaatgggttttcatatctaacaggcaagaagctgctccatatatgggcatcgatgacgtcccagactacaatgaaagactcatgatggtagagtatcttgattcctttactccaataaaccagggaaccagtagtgtcccacagaataacaacacagttagccttcaagaccgagaggtacctactctacttgtcaagttttatgtcacatagaatgtttgttgttgctaacagatcctgaaaacgtctcagggagctattggaaatgaccaagtaccaaataatacagacgatgattcgatcttcatgtcactcggagaaataccattgagtaagaccaatatcaaattctttctcttttctattttagcttcttaaagagctgagattcattatgtctttgcaattgtgcagcattcttgcaagcttgggaccaacctccagctcgaggctacgagaagcctttctgattctctttttttttgttatgtttcttcagtctgtgtaatgagtgtgtagtagcccaatttcgtttgtgctaatctcaatcctctcagatgatgtaagaatgtgacttgtggtgttttatggttgtatgtaccctttgtaattctctgtttattctcacactgtccccatgttttaggtcagttcaacaattttctgaaattgtaataaccaaaatgataattattaacggtatatatatgtcgtgtccaatctcacggtcaaaaatgaagaaggtgatgctgagaggtcaggcgattccgacacgtgttatattccaaccacccacacgtaattttcaaaaaggaacaaaattgatcatgagggaaaaaagaataaactttttcccacaaagaaactttccacattgaacgagagaattatagatctgcgaatccgatcattggattagggttttcacttttcaccctcctttttccatctctctgctgtatacccttcctttctccaaaaagaccaaaactttgcgattcaattcgaaatctgtgttcttccattgagctggattttcatttttggaatcatttcttctcttctttgatccgatagatggtggcatggtaggaaattttagacctttatatttctatttaaccgtcaaggaaccaatgaatttgtatagcttgttgagttgactttttgattgtgtatgatcgaatttgggatcctcatttcgggttttgggttattgatctgagctcctgttacttctgaaaccgatgtgaatttggtgggggatagatttttttgtggagtcaatg

SEQ ID NO: 16167 - DNA, 3000 bp, Unknown; identical to SEQ ID NO: 8686
  misc_feature (1)..( 3000): 2750-1469P.txt file - cDNA_ID_1378584; gDNA_ID_1971851; Annot_ID_58418

SEQ ID NO: 16168 - DNA, 3000 bp, Unknown; identical to SEQ ID NO: 8686
  misc_feature (1)..( 3000): 2750-1469P.txt file - cDNA_ID_1378584; gDNA_ID_2926180; Annot_ID_140503

SEQ ID NO: 16169 - DNA, 3000 bp, Unknown; identical to SEQ ID NO: 1264
  misc_feature (1)..( 3000): 2750-1469P.txt file - cDNA_ID_1378596; gDNA_ID_1620377; Annot_ID_155189

SEQ ID NO: 16170 - DNA, 3003 bp, Unknown
  misc_feature (1)..( 3003): 2750-1469P.txt file - cDNA_ID_1378727; gDNA_ID_1620490; Annot_ID_158578
acccagaaccttgaacgtgtatgcgtgtggaaacctcaacacatgcacaaacatgcacacacctaaattgcgtttaacattacgatttaaatgtgattttctcaattcgaatccaatttatgtataccaccaaattattacgtaacaatccgaattctaattcttgaatgactaacacagatgaatgaaaaaaaaataaaaaaaatagatgaatgaaatccatattccgtagtggagcaataatgtttataaatatatcattttctaatctcttcagcttaattagcttagagctgtaatacccacctacaatcatatattcatataaatttatgttaaagttatatttattctttaaatttcacatataagtatattattaagtgatttgattgtgaattatcatcacatttggttgccatgaataagatcgtgacgaaagaacaacaaaagaaattgtgtcttcatctggaaataagtaaacaaagacaaaaatatctctgtcgtcttttatcatcagtgtgttattgtgctaaaaaaaagttatctttgattcgaatatgatagagacccaaaggagtatataattataaatcatttttattcctatatatagtccgaatctatcttatgttcactaatatttgattaatttaaaccacgaaatcaatgtatttctttcacaaattaatgaggtagaacggatgcatttgcatttatattcagtaggaaccttatttcgaaaagcgcaaagaatttaatataatgaattaactcactttcaattggttataaaataaaaatttagtacttttttcttttcttttttttgccaatttcttatctccatacgttcttaatcagaaataattaaatattattagtcagaacctacaacggatcacaaaattgttatacttatatcaaaaagatttgaatgatatatcacttctcacttctgaaacgcaattcgatgaagtgatactattcataaaatttcatgttaaatgataaaagttaaaacgatttttcaatttttcgcacattttaaaattacatctaaaattattaactttttcaataatattttattgtttatttgagagtggaaagtaaaatgaggaagtggcagaggaacagagccatgtaggagccacacgaacatgtgctttgtggtaacagtcagctactacatgttgcagccgtaccaccataatatattagttaatggattaactcttttaataatcctctcttattgcttagtaagttagtttacaaaagcaaacgatctttttaaagtctaataatcccaaaataaaagaaaaacaaatattgacaaaatcctaacctaatcaacatcagtctcttgttttaatgttaatttcaacttggcagttcttatctatcccaatctcatatggtttattatcattttttttttttgtctttttatcactatggtgtattgtatctagattgaattagattcttgaaatgatgtaattgtaagaatatctaacgtcaagaactttgggattaaatttaaatttataggaaagaatggacttaagtaaggagataatatttgcagctatatatttgacaatggatcatgtcatcatacatttttttgtcaactcttaaaatcttaattcaagaaatgtttttttttttcttttgttttaatctgtttttgtcaatattaaaaccctattttgtacaccagggtcattttcattgagtaaaattcttaaaaacttcaaaagtttatgttgttggcaaaggaaatacgtaagcgtgtaatatgtacagttggaatagtgtttttgctaaaaagaaaagaaccatatgattgaaacaatggaatatataaaaagacatgtgataaaataaaatacaaaaatagtcaagaacagtttaatggattttccttgcaagtcgtcatgctcatgaacctgttttaattgcatgcttacatataaaaataattaactcaaaactcaaataagatcaaacaaaatatcaaacttttgatacaaatttaactgtcttatatccttgacaaaaaaaaaaaaaaaaaaaaatttaactgtcttatatcttggttcttaatcccttgtgaataaccataattagttgctagaaacaccttgcaaatttcataatcaaagtgattcctaatttatgtgcgaacagaatattaatagttgtaagcaatgcaaaaacaataccaaaacgattattcttgatgaaaagatggaaaaaagctaagcacaactaatgttcaaatttctaaaattagttaggcagtaatctggcatttaaacatggtgtaatacctagtaagccaatcagagattaattggaattttgtttttcccgtattctcgtttttattgtaattttaccacttctagccatttataaatattcaaaattaaaaaaaaaaaatatcttgtaggactttattttttttggagttttaaagttcactgataatttaaccaatttagccaaaattaaaatatttgaatgttttgataaatttttaacatttcgttttccaaacatgtaaatttgaaatcgatacatttacaagattagcacaaaccattatgctaaagttttagtcggtgcaacatatataaatatgaaaaaataaactattgaatatatacacaacaaaagacaatttctctattattatgttgagaaaaaaatctttttagattaaataatagtaatggctttatgggctttttactctatcgtgtccacagtacccccaactaaacaaaaagaaattgttaaagagctctctctctctctctttcataaaaaggcaagaggagagccaagtaccaaactttttccttcagggttttcctctcaaaatcccaacttggcctctgtttttgctttcttttatgttctcttcttctctaaaaaccatctcatacttccaagaatttctctcacaaagaccaagaactcaaaatg

SEQ ID NO: 16171 - DNA, 3003 bp, Unknown
  misc_feature (1)..( 3003): 2750-1469P.txt file - cDNA_ID_1378800; gDNA_ID_1620409; Annot_ID_156222
cagaggactgagaaatagagaaatgtgagattgatgaaatcgaacggtcagaaaactaccaccaactttacttatttaggtttcagatcaagccacgtggctaaattacctattgactcctctcatagtcacggacacgtgttcacaagccctgcttacttcatatagtagtcttgcccaaaacacaaacagagaaagctaagaaaactcaaaaggcggtggtgagtactggtgagagtgtgagtgaaaaaacaaaaaaaacaattcaactgcaaaaatgagttccggaatcggaagtttagtgaaggtcatctttaagaacttcgatgtcatcgctgggtaatttaattagtattatttagcctgattatgattttttttctcgttttattttctccattaatttgatccttcttggtgtgcagacctgtgattagcttggtttatcctctgtaagtttcatacaagtatctctttattttcctgagaatatattatatatgtcaaatcttgagttctttttaatttggattttggtttacacagatatgcatcagtgagggcaatagagtcgaggagtcatggagacgacaagcaatggttgacgtattgggctctctattcacttatcaaactctttgagctcacttttttcagactcctcgaatggtaactttcacacaaaatctctaaacctttcttgattacgcaagctactacttatgaaaagagagtaaggtcacagtcacacacaatatgtttgtttctagggctcttaaaatttgtgataaaatcgatgacttggattttacctaccgaccttactatatgaaatttattaaaaagttggtttggggggtacatagatttacctttcttgtagtccaagtaaggtacttcaggtaacggatgagcttatgtttaacattcctagactgacttcaggagataaactgagctgtatgtaacggtggttcattgattcaattatatagactgaagtttcgagatttatggtatgatcaggatcccattatatccatacgcaaagctagccctaactagttggttggtcttaccgggcatgaacggtgctgcttatctctacgagcactatgtgcgttcattccttttaagcccacatactgttaacgtatggtacgtgccagccaagaaggatgacgacttgggagcaaccgctggcaaatttactccagtaaatgattccggtgcgcctcaggaaaagattgtgagctcggtatgacctcttaactctctattactctataagaccctatttgtgacctaatgttcgatctataaggcacatcaatctcttgaacgtttatattttcaggtggatacatcagcaaaatatgttggtcattcggcttttgatgacgcctatatctactaggctagtagctagtaaactacttccggctagttgtagctgagcatcctgatcttagtgtatcgaaatacttgttttctcctctttttctttgttttcgggttttatgaagtttgttgttactgctaaggaattttaatatcaaaataaatgttaattgagtgagttatataattatgtaataaaatctgagcacaaaaataatagtgaactaaaaggtaagagtctagactagctatgatcaatttagtatcgtatattgctttcttcctcgaccaatgatgagagaattcagaaacgaggttttgatagcgtagctcaccgctcagtcgctcacgggctcggagtagatatattttctttcaatattcgtcgacttactcgactataaacaagcagtatgaagaagagttgacactaaagaaatggtaaagccaaaaatcttatagctgtaaagagaataagaatgagtaggtgtactagccatatattcgttttcttaccacgttaccaaaagcattgtgtgtttgaaccggagctaattaatttgattctattcacatattgtatttacatacatcatgtgaagtctgtcatggaaataaatgtctcttttcatcgtcacgaaaatatgtttaatttgatgttgtcattcttaaatgattttctactttattgttaacaaaagaaattgatttcctaccttacacatatcttgttggtaaaatagacaactaattttaataccctcatctcaataaatgctatttacactaaataaagtctgatatgagaaatgttacagaatgcaataaacagaaagaaataaaaaaaaattgcaacaaaaaatcattctcaattggggaagaaaataaagtcgaaatgataagtttcataagaaatgtatattttaccatgtttactaaaaggcaagacccacgtgggaaggcgttacatattacacagtccaaatcagcatcgttattattgtgaactctcacattagctgttaccgaaactaaccaacaacaagtttttgcctctttgaggacatttaaatatagagaaattgtttctttctttgattttttaaaaaataaaagaaaaatcaaaacttagtctattaagcatcggtcattatcacaaatgtaatcctaagcatccgtatctaataagttaagagtaatttatccacacatagagttttttttttaaaaataattatttattttctttaagtgtaacgactaataaaataagttataattaaattaagaatcaaattctctctatcttttgcactttttcttctttgtctatctctctctctctctatctctaacctttgcttctccgtccttttctctgcttcagttttctcttcctaacaagcaaaacccgaaacagatcgaaccatttttttcctttagaaattaaacaacaaaaatcatttttttgtttgttttcggtttcacctaaccaaattgattctcttacctttttatatcacattgcatctgggtttccattagaaacaacaacaaacgaaaaaagaggcttctttcgtttcagagaggggttcaaaaatg

SEQ ID NO: 16172 - DNA, 3000 bp, Unknown; identical to SEQ ID NO: 12810
  misc_feature (1)..( 3000): 2750-1469P.txt file - cDNA_ID_1379041; gDNA_ID_2214573; Annot_ID_135114

SEQ ID NO: 16173 - DNA, 3003 bp, Unknown
  misc_feature (1)..( 3003): 2750-1469P.txt file - cDNA_ID_1379043; gDNA_ID_1620721; Annot_ID_165832
tacttcttactaatggttatctctctatctttcatctaaaaatatcttaccctttagtgagctcttaaattatgttgttcaattttcttaacaactttaattatgttttaggtattaccgatcacatcattgttcaatagtaaatgttatgttgttccctttcgatccagaacttggtcgtgtacattactaagatacatttgtttttaactataaccagatttgcttatccagatcggaaaatataagtcaactacttgtgttcttgctaccaaaaaaaaagaaaaaaaaaagagctacttgtgttccttcttttaatggaacttataagcacaatcaatctcttaacaatcgttcttctactcttcgttgtttccaagatatggaaagcttgttggatcctccttttgcgtccattgatgctatcaaaaagattcaagaaacaaggaatctcaggaccaaagtacaaaatcttgtacggaaacctcagcgagataaagaagatgaagaaagaagctgacctttgtgttctggatcccaattccaatgatattttccctcgtgtgtttcctcagtatcaccaatggatgtctcaatacggtaccgttttctatccatcttgttttttttttcttcttttcatagatgaggattacttaacacacacataagttgtctatgatatattaggagatacatttctattctggactggaacaaaaccaactatatacatctcaaatcatgagctagcgaaacaggtcttgtcgagcaagttcggtttcactattataccggtgaaacgacctgaggtcttcatacttttcggtaaaggactttcctttatccaaggtgatgattggattcgccatagacgaatcttgaaccctgctttctccatggatcggctcaaggtcttttactcttaactatatacttctcagcttgatttgaaaagaactaatatattgcttgcttaaaaattgtcaggccatgacacaaccgatgggagattgcaccttacggatatttgaggagtggagaaaacagagaagaaatggtgaagtgttgatcaagattgagataagcaaagagttccataaactgaccgctgacattatagcaactactgcgtttggaagtagttatgccgaaggaatcgaattgtgtaggtcacaaacagagcttgagaagtattatattagttctctcactaacgttttcatccccggaactcagtaagtataatagtcacttagtcagtactcttctgctactctcagttaattcgtttggctaaaatattcttgagatttgaagatcgttgtttcttgtgtttcaagataccttcctacgcctaccaaccttaaactatgggagctccataagaaagtgaagaactcgatcaaaagaatcatagattcaaggctaaaatcaaaatgtaagacctatggctatggggacgatcttctaggggtcatgttgactgctgcgaaatctaacgagtatgagagaaagatgagaatggatgagatcatagaggaatgcaagaatttctactatgcagggcaaggaactacttcgattctattgacatggactacgatgttactaagcttgcaccaaggttggcaagagaaactcagagaagaggtttttaatgaatgtggtaaagataaaatcccagatacagacaccttctctaaactcaaattggtaatgttcattttcattgtgttacttgcgggtgaagaaaagggttttcttacacctattaatcttgcagatgaacatggtgttgatggagtcgcttcgtctgtacggacccgtgattaaaatttcccgagaggcaacacaagatatgaaggtaggacacttggagatcccaaagggcacaagcattatcataccgttactgaagatgcacagagacaaggccatatggggcgaagacgccgaacaattcaatcccttgagattcgaaaacggcatttctcaagccaccattcacccaaacgctctcctcccgttctcaatcggaccaagagcttgcattgccaaaaactttgccatggtcgaagccaagaccgttctcactatgatccttcaacagttccagcttagcctctcccccgagtataagcacacgccagttgatcacttcgatctcttcccgcaatacggcctacccgtaatgcttcaccctctcggatagtagttctgaatggtgaggaagagaaaaccaagaatctcaacggatatttggtcacgttatgttctatatttggccttggtcacaaataaagttcagatgatataattcaatagtggataagtcaaattcaaagtgaagtaaggaataaaaatctgaacatgtggtggttgttttagtttcttgattttcatagtcgattctatctaaatttgattatgcttttgaacaaagtatttctccctaatttaatagtgggaggtcgaccatattccgaagtatacaacagaacctagtggattaaaaaccaaatcactcgttgaaaatttcgactctttgggttgttcccacttccactacaattaaatcaaatactaggcgtacaactaaatcaacggcatcagccccattccttcaacgtatggggtcctctgtgtgtctgtctctccaccgacactctctttatcgttgatcactccaacggaccgtcaggataatgccacgtatatttcttctattatcctctgcacttaacacacggtggactacgtactctcacgctgcttcagattcgtacattgcgatttggaatgtttattatatacccaaagagcaaaactttaggtgggccttaaactaattaatggcatttacgcgtcagtgagagtggagtatataacaatctgaagctgaagaagaagaattgagagataacagagagatagtttcttcttcatccaaaagaatccaatcttttcctcaaaagatagtttctggatcgaacgacaatg

SEQ ID NO: 16174 - DNA, 3003 bp, Unknown; identical to SEQ ID NO: 16173
  misc_feature (1)..( 3003): 2750-1469P.txt file - cDNA_ID_1379043; gDNA_ID_2926191; Annot_ID_201064

SEQ ID NO: 16175 - DNA, 3000 bp, Unknown; identical to SEQ ID NO: 5802
  misc_feature (1)..( 3000): 2750-1469P.txt file - cDNA_ID_1379064; gDNA_ID_1620818; Annot_ID_50674

SEQ ID NO: 16176 - DNA, 3003 bp, Unknown
  misc_feature (1)..( 3003): 2750-1469P.txt file - cDNA_ID_1379075; gDNA_ID_1972119; Annot_ID_178878
tgcatgaatcatgatgacaaactgatggaaacaaataatcagctggaaggaaatgatgaggcaaacgactcagggttcagatctagctaccaaaatcacatgtcaatacacatgatcatctaagtaaattttcacaagtgtcttttcaaacagttgaatgagtatgcaaaagatgatgagataacatgtaaagttattgtggtagctgaattagttccagtttatgattagacacatcatcagaaacattattgataaagaggaaaatgacttaccaagtgttgcggagtcgaaagtcttgatgccatcaacgccgttcaaatcgccgctgaggaccgtcaagtctctgccgtcgccaacgagggttaagttagttttcttcttcccgatacgaataacttccttgtataacccttctttgatgtagatgacaaaaggcttcacaccattctctggagctgctgcaaccgcttcattcaccgtggtgaagttgccgctgccatccttggcgacaatcaagtcggctttatccttcaatgcctgcaaattatgtttaagagaaaaaaaaatgaaatagttaataaaacatatgaaagtcaacaataaacatatgaaacatatgaaagtcaacaataaacaacaattcaaagataaaaaaaaaaaaagaacgaatcggagttttaggcttcagatatttgaggtattatctcaaaagacaaatatataataaaacaggaaaattaggtttttacagtgaaacaaactctgtaagaacatggttcgtcggaagtgacaacccaaagctcagatctgatggataaagttaaataacttgttcatatttcaacaatggtgatatttgttttgctaacacaaaaaaattgaagcttttctgctaattagagaaagttggggattatttctttaacaacaaaaaaaagttggggattattttgatcatttcccattgttgatttgttgtccataagtttttcattttctaatcgatttctgttttcaaagctggaactttattagttataaacgctagagagcctaaaagttggattcgcggatacaaaacaaaaaaaaatcgattagcggacacacaaacaaaataaaggttttcctagttacctgatcgggcgtggagatcaaacttgctggaggagccaccgttgccccaagaaacagtgaggctattacgagaaaactcaatactaagagctgcatggtactggtcatcgccattaggtctctaattctctatctctcgaaaataaaaatcagccgaggaagtgtaactgaagaagagagaatgagatgttgcagagtagaacttaattttgttatgacttttgagtcttataattacttctcatacatatagtttatacagattatatataccaagtttaaacgctagtggaacgtctatatatctctgcatgcatgcacgaataaggaatacatcctataattgtccatcctataattgtcatgattgaatggtccatgacgacaaaatttcctcatatgagtgtgaacgcatatagataatacaatattaattaacaataaatattaaaccagacacgaaaccaaatgtttgtgttgttacacttaacatatatgtaagtatattgaagtacatgttctcagcattttatggctttgtatgatgttagaataagaaatgtacgtataaatgactttttcttttttggtcaaatgtataaatgactaatgaaattcattattcattgacctgaggttaggtggaccactgatctatatatagtcacgctcactgcagtgccaggatcaacatatatatataaataataaattgcataaataaacataaattataagtcaacaatgtagttaattgcataaataagaaacaaacaaaagttataattgacaaaagaacaatgtagatgatgttatggagctttttacaaaaaggtaaccaacattttcaatgaattatgtaaaaataaacttggttctcaatttttttgatacctctatctctaacatatgttgccaatcaaatcgtatttcttatccaatcagagaattataaatattcttgtccatatttattatgcacttacactatagtcctctttttgtgtgtggttagatggatgggcttaagatctaacggctatagaggtgggagtaaatctcacttaattaaatagtaccggaaacacttgataattcattcaaaaatatttcctgacttttagggttttctatcgattgaaattgagttaaaaatccctaattccaaagctactctgattttgtaaagtgaaagctatatgccacagagcactcgaagaagaagctagactatggaacgcagaaggagagattagggagctattcaactccatctcagtatcttgttaccaaatttaacaaactatcttaaaacggaaaacacagtattaatggaggtagatgcgactataaactcatagtaattgctaaattaaaaacttacctataaactaaagttgcaatttaaacaaacaatatacgtagtctggagccttaaattagccaaattatctgtctttagaaacgttattaattcggtatttttgattcacacctcttaccatatttacatgtgacaattaaaaaataaaacttgctttttcagaaaattataaaatctaaatataagaattgatacgtatttataattgagcatattggataagaataaacatcaatcactctttccactagacgaatatcttacgtggcaacagctgtaccgttaataatgacagtttttagctgtgtttatgaataattaattacccgccaaatcactaacgctttaaaaaaaacaacaactttaagaaaacaaataaataaataaaagagtatcaaaaggcgttcaccaaaaaaggtacaaagtcctttgggagaagatatcatcaaagagaaaagccctaattaaatctctcatcaatg

SEQ ID NO: 16177 - DNA, 3000 bp, Unknown; identical to SEQ ID NO: 1363
  misc_feature (1)..( 3000): 2750-1469P.txt file - cDNA_ID_1379170; gDNA_ID_1620392; Annot_ID_155644

SEQ ID NO: 16178 - DNA, 3000 bp, Unknown; identical to SEQ ID NO: 9589
  misc_feature (1)..( 3000): 2750-1469P.txt file - cDNA_ID_1379239; gDNA_ID_1972158; Annot_ID_179496

SEQ ID NO: 16179 - DNA, 1256 bp, Unknown; identical to SEQ ID NO: 468
  misc_feature (1)..( 1256): 2750-1469P.txt file - cDNA_ID_1379239; gDNA_ID_1591265; Annot_ID_150751

SEQ ID NO: 16180 - DNA, 3003 bp, Unknown
  misc_feature (1)..( 3003): 2750-1469P.txt file - cDNA_ID_1379513; gDNA_ID_2214519; Annot_ID_134024
ggtacggtgctcaagccgggtaccagggcggttatcagactcagcaacctggtcagggcggtgcgggaagagggcagcatggtgctgggtatggtggtccttacatgggtcgttagattagccactcaggtaattattttcagcttcttttcatctatttcattgatgttctgtatcagaagactttttttgtagttcgcttggttcccttgtgtatttcaagacatggacttgctgtattttgaccttttcatggttactccattatgttaaactttttgcgttgcaagatcattttgttttcaaagttcctgtgactttgttgtgtttctgaagggtgttaggttttgcatcagtttataaaagtcttctcttaatttcttaattcattgtgcagatattccaatacagtactttttaaaattggcctggtgaatcttctgaagttattaaggagctgatgcaaatggagttgtttagtttttggatgaaatgttactctttcgtgtcttcaaaatacatgactcttcaaacctttcaagaagttttagttttcccctacttgttttctcaactctttttatgatatcccaaatacactgttctgatttaacaactatcgtttctgttttaaacttttgggaacgttttcatttgtaaaacttaaacagtgttcctcatggacacacaaacgctttcactatgtttgaatccgtattttccattttctcttaatcagactcgtttttattggttctcgctatgtttcgcggttttgtggaatttttccatgcacgtaattcctcttaagattttgaccttgtgagagtatgatcacacatcactatgcatatgtacataacggcttatcttgattaccacatattatatctgcttaatccttattcctcttgcaggtaatttaagagcaagctgaacggtcaacacttacgcccaacaaaaatctatggggtaccaaatatttgaatgccacctatctgctttttcttttatatatactgaaaagtgaaaagggatgaatctatgaattggtagctttataactaaagaacgaattaagcaaaagttgttttcttgtttaacttagctaggcatctacctgaatccaaaagagcaacttgttttgttttgtactaataagtatcaacaagtcttgacctgcacatgtcaagtttttgacttgatttagagcagcttgtttcttgtgtgtccttggagttctctactgtttctatagctttgaatgagctttccatttgaccacatctcaaaaaatttggtaatgtgccttagaataacaccgagtttggtaacacagctggaattggtgttttgctgtggcatcatgggagctctgaaatgtcttcccagttaaaggtgagtataactgtttgcattgtgaagatttgtattaactatagaacattgaattgatggtgttaagttcttacacaagcgtgcttctcggtttgaactgtttcttttgtatgttgaatcagagcttagtttataggaaccagagtatctacttagtcattctctaatgctaagtgctaaggttctacctagttgccctctaggcccttatgttattgataacttatgaagctatttgaacacttgattcttaggagacctaagttggtacagccagatagagtgtatgttcttgttctctatgtgacaggatcaagctgccacacatagttcaagggtatgctctgtgtgggtttgctcagattgaggacaaatctatacaaggaagtagagtctttgacattttgatgttgtatgataagaagaagaaaggagagtaataaagaaagagaaaagggaaacagaaacacgtgggagaacatcccaaagaggaagcacacgcggatcttcatgcaaagctccccgattctcccatgtggtccctttctccctttgtccccctcctctttcttcttttctcattttactcctttttttaccattatacaacgaatcttttttatcataattttttggttttggtttattttccaataacaccttcttggttacttcccattctcactttttcatataagaaactcactttgggaaacttatgtttgagaatgacaagtctttttagagaaagtgatgtaacaaatctaaagtgattatataataaccttgcacaatgtttttgattttttgtaagattcgaatattaggtttattattcgtagggaataaacttactttcaaaagcgttcataagttaatactttcatatatgatcataagtacggacactattgttttttgtttgtttgtgtttattctaaaagaaagtagcttttaattgaaatgtcctcagaggcacagtttaaagttcgagtgtaacagtttctaaggcaaaataagctctctttctactatttctctttctctttctactatttctctcctgtggagaaactcaggagatagagagagagagagagaagagaagagagcatgtatgtttggttttataatctctctactcataccaaagatttgtctcagacccaccacttggacagagagaacccaagctcctttctctctttttctcgatctactccttcttaatctccttttttgaaacttgaagccactttcaacatcatccttaaacttttgttcccttattcacaatctcctgccacctctcatttctctagttgagttgttatctgcgtttttaagcactcgaatactgcatgcaaattccctgattgtttgttagtaccttagagattctcgattttttagttgtttagattgaaccaggattactaaattgttattgttttctgtgtaaaggctacatatatgggttctattagaggaaacattgaagagcctatatctcagtcattaacgaggcagaactctctctatagcttaaagctccatgaggttcaaacccacttaggaagttctggaaaaccactaggaagcatg

SEQ ID NO: 16181 - DNA, 3003 bp, Unknown
  misc_feature (1)..( 3003): 2750-1469P.txt file - cDNA_ID_1379513; gDNA_ID_2214519; Annot_ID_184549
ggttgggtttaaaccaagcatttgggcaggctttgttggggacattagggacagctagcccaggagctgtaggtggaatgccaagtggctatggtactcaagcaaatatctcacctggggtctatcctgggtacggtgctcaagccgggtaccagggcggttatcagactcagcaacctggtcagggcggtgcgggaagagggcagcatggtgctgggtatggtggtccttacatgggtcgttagattagccactcaggtaattattttcagcttcttttcatctatttcattgatgttctgtatcagaagactttttttgtagttcgcttggttcccttgtgtatttcaagacatggacttgctgtattttgaccttttcatggttactccattatgttaaactttttgcgttgcaagatcattttgttttcaaagttcctgtgactttgttgtgtttctgaagggtgttaggttttgcatcagtttataaaagtcttctcttaatttcttaattcattgtgcagatattccaatacagtactttttaaaattggcctggtgaatcttctgaagttattaaggagctgatgcaaatggagttgtttagtttttggatgaaatgttactctttcgtgtcttcaaaatacatgactcttcaaacctttcaagaagttttagttttcccctacttgttttctcaactctttttatgatatcccaaatacactgttctgatttaacaactatcgtttctgttttaaacttttgggaacgttttcatttgtaaaacttaaacagtgttcctcatggacacacaaacgctttcactatgtttgaatccgtattttccattttctcttaatcagactcgtttttattggttctcgctatgtttcgcggttttgtggaatttttccatgcacgtaattcctcttaagattttgaccttgtgagagtatgatcacacatcactatgcatatgtacataacggcttatcttgattaccacatattatatctgcttaatccttattcctcttgcaggtaatttaagagcaagctgaacggtcaacacttacgcccaacaaaaatctatggggtaccaaatatttgaatgccacctatctgctttttcttttatatatactgaaaagtgaaaagggatgaatctatgaattggtagctttataactaaagaacgaattaagcaaaagttgttttcttgtttaacttagctaggcatctacctgaatccaaaagagcaacttgttttgttttgtactaataagtatcaacaagtcttgacctgcacatgtcaagtttttgacttgatttagagcagcttgtttcttgtgtgtccttggagttctctactgtttctatagctttgaatgagctttccatttgaccacatctcaaaaaatttggtaatgtgccttagaataacaccgagtttggtaacacagctggaattggtgttttgctgtggcatcatgggagctctgaaatgtcttcccagttaaaggtgagtataactgtttgcattgtgaagatttgtattaactatagaacattgaattgatggtgttaagttcttacacaagcgtgcttctcggtttgaactgtttcttttgtatgttgaatcagagcttagtttataggaaccagagtatctacttagtcattctctaatgctaagtgctaaggttctacctagttgccctctaggcccttatgttattgataacttatgaagctatttgaacacttgattcttaggagacctaagttggtacagccagatagagtgtatgttcttgttctctatgtgacaggatcaagctgccacacatagttcaagggtatgctctgtgtgggtttgctcagattgaggacaaatctatacaaggaagtagagtctttgacattttgatgttgtatgataagaagaagaaaggagagtaataaagaaagagaaaagggaaacagaaacacgtgggagaacatcccaaagaggaagcacacgcggatcttcatgcaaagctccccgattctcccatgtggtccctttctccctttgtccccctcctctttcttcttttctcattttactcctttttttaccattatacaacgaatcttttttatcataattttttggttttggtttattttccaataacaccttcttggttacttcccattctcactttttcatataagaaactcactttgggaaacttatgtttgagaatgacaagtctttttagagaaagtgatgtaacaaatctaaagtgattatataataaccttgcacaatgtttttgattttttgtaagattcgaatattaggtttattattcgtagggaataaacttactttcaaaagcgttcataagttaatactttcatatatgatcataagtacggacactattgttttttgtttgtttgtgtttattctaaaagaaagtagcttttaattgaaatgtcctcagaggcacagtttaaagttcgagtgtaacagtttctaaggcaaaataagctctctttctactatttctctttctctttctactatttctctcctgtggagaaactcaggagatagagagagagagagagaagagaagagagcatgtatgtttggttttataatctctctactcataccaaagatttgtctcagacccaccacttggacagagagaacccaagctcctttctctctttttctcgatctactccttcttaatctccttttttgaaacttgaagccactttcaacatcatccttaaacttttgttcccttattcacaatctcctgccacctctcatttctctagttgagttgttatctgcgtttttaagcactcgaatactgcatgcaaattccctgattgtttgttagtaccttagagattctcgattttttagttgtttagattgaaccaggattactaaattgttattgttttctgtgtaaaggctacatatatg

SEQ ID NO: 16182 - DNA, 3003 bp, Unknown
  misc_feature (1)..( 3003): 2750-1469P.txt file - cDNA_ID_1379924; gDNA_ID_2936585; Annot_ID_143844
gctgtctctgagtatatgatcgagcatggttggaccaaatgttactctacacttgaccatttcaactggttcctctgtttcctctacatagctctctatcttgttttagttgagtttatgatttattgggttcacaaagagcttcatgacattaaatttctctataagcatctccatgctacccatcatatgtacaacaagcaaaacacactctctccatttgccggtatgtcaaagctatatgttctcaatctaaattcaagagcttgtatcaatggtgacttctttacttgatgtttttcgggttttcagggctcgcattccatccgctggacgggatacttcaggctataccgcacgtgatagcgctgtttatagtgccgattcatctcataacacatctgagtcttttgtttttggaagggatatggacagcaagcatccatgattgcatacatggtaacatctggcctataatgggtgcaggataccataccatacaccatacaacatacaagcataactatggtcattataccatatggatggactggatgtttggctctcttatggttcctttagcagaaaaagacagtttcaaggagaaagaaaagtgagaatgttcaatgctcacatgtattcttcatatgttgctcttctcgtgactcttattaaaacctttctaatcactttgttggaattaaaaacatgactgcataatttgatgcaaagtttcagacttttattgctaaaaatctctgatgattattaacctcaattatataattgctggatgaagagtttcaaatttggactaaatctgaagggtttaataggtcagttgcggtgtcagttttaccacagaccacagtaatctttgaatcttccaaacttgtaaaataaataattatactcatatggtaggtgaggttgctcaagatatgatgacatgtaagaggcaaagtttcctcttttgtcggttaaggttaagaatttgaatagcaagaacaaatcaaagtttgaaaacataagaatttacgaaaattaaagacctaaaatttattattatctgaaacgtgtagacgcatactctctctttcatccgccatggaagtataagacaccttttttcgcaaccccacacttttttctttttggctaagcatcaaacaattcaaaaggccgagtcgattctaattcagatataaaagaattctcctttttgcttcttttttttcacacgaagcaaatcgactagagtctggtaaattttcttctgtaattcatttataaaaaaatcttcttttgcatatccatgggggaataattataaaggtcgttactttccacatgggttttttttttggtagatatagcgaaacatttatattgcccactcccacttgtttgtgttgattagattgtccctaggagtcactgttatcgctctttcaattactgtaatgttgaatttgggtttcatctactaactaagatgaagtttcttgtctctttctgtctccctctttcttaattcctctctacttttcggttaattgctcctcttcagctaactttggggctttaaagtgataggatggctcgcttcagttttccttgttttccaaattttgggggttttaatcaggtttgttgattcttgtcaatgattttttttcgaaaagatttataatttggtgggttttacttgaatctctctactttagatttgatgtgttccttcaaggtcttgtttggttttatccaggtccaagtaattaggtgaagtttgcctctctctttttttggatctcattggtctgcaatagtctcaattaaaccttctagtttgcatattaccagttgagtgactcttggttccagattcgtttttggtggtcatagtcgcgagtaagaatctcttttgaatattctctgttattctctttttgtggttgtgtggttcgacttctttgcagataagtgatatcttttggtgtgaatcttataaaacttttgtttccagcttgattaattgaacatgcgactagttattatattaggtggttgatatagaagaaagggctttcagatcttacaaaagcaaatacttacggcagatttagcttaccaataattaagtttagttagcttagcaggaaccttttgctccttttattcagtttatgcaggcatgttttagttgcatccatacattattagattggcttgaattaacacaaacatcatgtttttagccttacatatagccgcagttctataccaaaccaatcaaatcttgtgttatttcaatctaaattgcatctgcaatcaaatcgataatttgcatgttcaatcgagtaaagtgcatttggtcaggacattttaggactggtttttccttaatcttgttaattgactattacggggtggtattctttgtctttccctgttaaacttattgcatgtaagagagtgtgatttcttgggatgatcttaggctgtgacaaatcgggggcctgagatttcagaaactgctgataattgggtctcaccatctgacattccactcatagaacctaatagtaaagaggtacccctaattgtttttgtcttcttggcgagtctagtctatatcaaaacctaatcttgtgttgcaacgagtaccataacttagacatcaagtttccataaatttcctgtttttacacaattttggtcgttattgatgagttgaatctaggatagcactgtgatgcagcaggtaaatttttgtagagaactcaatattatactacgaatagcttttctaatgagtccatgaaactattctgacccacaacagcgatctcttactgattctttacttttcacacactaccaagtacctttcttacttagattgttggcttttccatcattgtgtctgcattgaaatataaagatataaaaggaaaattatttgattatggtgtattttatgcctctaagcagcacaggatg

SEQ ID NO: 16183 - DNA, 3000 bp, Unknown; identical to SEQ ID NO: 9730
  misc_feature (1)..( 3000): 2750-1469P.txt file - cDNA_ID_1379940; gDNA_ID_2213619; Annot_ID_180905

SEQ ID NO: 16184 - DNA, 3000 bp, Unknown; identical to SEQ ID NO: 9730
  misc_feature (1)..( 3000): 2750-1469P.txt file - cDNA_ID_1379940; gDNA_ID_1972176; Annot_ID_180001

SEQ ID NO: 16185 - DNA, 3000 bp, Unknown; identical to SEQ ID NO: 9730
  misc_feature (1)..( 3000): 2750-1469P.txt file - cDNA_ID_1379940; gDNA_ID_2213619; Annot_ID_131953

SEQ ID NO: 16186 - DNA, 3000 bp, Unknown; identical to SEQ ID NO: 3819
  misc_feature (1)..( 3000): 2750-1469P.txt file - cDNA_ID_1380010; gDNA_ID_1620721; Annot_ID_165806

SEQ ID NO: 16187 - DNA, 3000 bp, Unknown; identical to SEQ ID NO: 3819
  misc_feature (1)..( 3000): 2750-1469P.txt file - cDNA_ID_1380010; gDNA_ID_1620666; Annot_ID_163956

SEQ ID NO: 16188 - DNA, 3000 bp, Unknown; identical to SEQ ID NO: 3819
  misc_feature (1)..( 3000): 2750-1469P.txt file - cDNA_ID_1380010; gDNA_ID_2926191; Annot_ID_201040

SEQ ID NO: 16189 - DNA, 383 bp, Unknown; identical to SEQ ID NO: 335
  misc_feature (1)..( 383): 2750-1469P.txt file - cDNA_ID_1380171; gDNA_ID_1563968; Annot_ID_148603
  misc_feature (73)..(73): n is a, c, g, or t
  misc_feature (150)..(150): n is a, c, g, or t
  misc_feature (175)..(175): n is a, c, g, or t

SEQ ID NO: 16190 - DNA, 3000 bp, Unknown
  misc_feature (1)..( 3000): 2750-1469P.txt file - cDNA_ID_1380275; gDNA_ID_2926239; Annot_ID_142832
tcctaatgttgtggctttttcaggcagggtatgtgggggtgttacaaggagcagagaggtttgatcacacaaggggttacaagttttcaacatatgtgcagtattggataagaaaatcaatgtctacgatggtgtcacggcatgcaagaggcgtccatattcctgtttgtgcattttgatttttggccctttttgtctcattttcaacaaagctagaacctcacttgttttcctttattgtttctgtttttttggcagtcatcaataatccgaactatcaatcatatacaaaaggctcgtaagaccctgaaaacgagccatggtataaaatatgcggctgatgaggagattgcaaaactaacaggccactcggtgaagaagattcgagcagctaaccaatgcctaaaagtggtcggttcaattgacaagaaagttggggattgctttactacaaaattcctggtatgtctgtttagtttgcttcaatctttggttttgagaaatgtctatcgaacaaggaccaagatttgattagtttaagtttaaatttggttttttggatatgaaaatactgttaccatcaggtttatcataaagattggttcagtttagatttaagctattctttttgttcagtttggttcagttttgagactcaacgtttgttttccgagtatgcaggaatttacaccagacacaacgatggagagtcctgaggaggccgtgatgaggcagagcgcgaggagagacatacatgatcttctagaagggttagagccaagagagaagcaagtgatggtcctacgttatggtcttcaagactacaggcccaagtccctggaagagattgggaagcttcttaaagttagcaaagaatggattcggaagatcgaacggagagcaatggctaaactcagagaccaacccaacgccgaagacctcagatattatttgaatcagtaaaaaatagagatttttggctccaatgactcttatgtcttctgtcacagtgtgattgtgtaatcttgtgtgtttataatagtaacattggagatcctcgagtgtaaaatgtcttgtacggggttgtaaacttatatagttatattacagtgaaaatagatattgtacaagttataaaatcctaaccacttggataatctacacatccttcgattacttttacaatatagctgtatcaattatcttgcatttgtgcaattattatattgaatttcaattgaaccaattataaaatttattatgtaatttagtattatatattttatcaattataaacaattcatactttttgctattatatatataaaaaaattttaatttttaattttactaattgaaaaagattatatctaaccacctaacgacaactcctttctcggatcaagttttttcttggttcttcttttctcggggtacttcctctcggattctctatgtctcttaactcggtctaacccgctaaagcttagctcacatgcgggtcataaaatccgattaccttttgcgaagtatgaccgagagttgaaagaaattcggatgttccttagaaactcggaccgtgagtccttctttctcgtttaacttggagtgttcaatcgtcgggttggaagtgaatcggatgataatcaccttccttctcgtctttgtcctccgttttaagttttttttcttccgtgaattctttttttctcttcctctttcgcgggacttaacatttcgagttatctccgatctaggcttcccgatctttcacttcagcatacgctatgatatcgtttctaaagtcactcattcgtgctctggacggagatgatgacgtcttcgattttgcttttgtggcctcttcggtcaccgagctcccttattttgctacgaggacaaagattgggaagaagagaattgaggaagtgatagattcagatcttcagggactcgccaaatacgaggagagagcgattaaagctatcaagccgagagtgaaagttaccattgagaaagacatcactttgctacagagggtaagtgaatctttcttacatccacaagacatggttctatgtgtgttgtttcatctttctctagacttttgttgctatttcggtttacaaacttttgattgtggtttgatctttctctaaacattttttgctgtatttggttaaagacttttgagaatcttcaaacagggcttaggacttcttaattgtgcctgaattctcagacaaagaatccgtgtctggtttgtacagtttcagagatttgttacaaaaactgatgaatgagttgaagaggagaagagttaaggagtctagtctaaataagttttcaagtttattgtaatagtaaaacctctataaattaatactcgataaattaataatctatataagattaataattttttccagtcccgagttgggactgtaaaaagtgacacaaattgataaattaataaaataataatttttttgaaaatcctatgtaaatatatgatcccatcaatattataaattagtaattgtataaatataaaatatatatatatctaatatattatatgtaagaaatttctaatatttttttgcttaaactcgtatttgttcttatttgaatttagttataatattttactgtatcaaaacttttgatattgttttatagacatgataattattttttacttgcaattggttttagaaagatattctctatgatgaaaaatatcttgtagaaacttttaaaaagttactacattagaaaactctctatgtaaattaataaattatttattaatttattccttaatttgtagatttctgtttggaaagaaattgctaaaaattaatataaaagcccaatgggccgtgtaataagtagacccaaagttattcggtacagtagtgacgaccggttaatcttcgcccgcgctatcgtcattgcaaaaatctcgaaccagattcggacatctcgtcgaaaatg

SEQ ID NO: 16191 - DNA, 3000 bp, Unknown; identical to SEQ ID NO: 9652
  misc_feature (1)..( 3000): 2750-1469P.txt file - cDNA_ID_1380437; gDNA_ID_1972165; Annot_ID_179741

SEQ ID NO: 16192 - DNA, 3000 bp, Unknown
  misc_feature (1)..( 3000): 2750-1469P.txt file - cDNA_ID_1380526; gDNA_ID_2214633; Annot_ID_188039
atacatatcacagggccttgagagacttgtcttattcccaagggacaaaaacacagagatcaatggtccaataacttgagaaggatggcctgttccatcggagggaaaaatgtcacaaagttgaaatctgtttacaaaaataaggggaagaataggagggtatggatgaaaaagagacttacggggcaacaagcatgagatctcattccctgatgaagctcagaggctgatatcaaaagcttctgcaaacggtactctcctgtctgagactgtcctctattctctgcatagcatataacttgtcgctctctcaggtgctcaaatgcctgtcatgtcaaccatttagaccaccacctttaaaccatggcatctcatgagagctataaacatacccttaggcagacattttgtgcgtagtagtctgaggtatgaaaagaatcgtgtatcgccttatactctggaatacacatggaatctcaagtcattttcatagtggtgccatggtttaaaccaaatttacagattacctttcatcacactgatgaagttgtatgagctttgctccttcacttctaacctcctcatacagaccagaagataaagctccagtacggaacaatctgctcaacaaagatagtgtcaatagatattcccaaggaaaatgtatatgcaacaccgcagcttattatacctctaacggcttccaactttggttgcctttgcatacttgaaagtgctgctttgaagttctcaagagagaggaggccagattccaaattcattaaagaaacagcgcagaatctaacatcaagagatagactcaacacagagaaaatgatatcttaaggaaacatctcatgattgtaatcgaagaacttacataaacttcaggaaactgttcacagtagaattagcattaaacaatgtcttaagtatgtctttaaatctcgtgtctgatgttaaattctgcacaataggttttttttttttgaaattggttagtatcagttgttcagaacaagaatcaacatcatctaaaagctaagcatgtcatagtagtaattgggattggatattagaaccttaatcttatcattgaaccgagaaacatatccactggggaagcctgagtctgctggtagagacagcaggtgtacaaacaaactagaaacatagttcctattagttaaataagttgattggaaaaatagttgactggctattacagaaaagaagctgctcattacccgtcaagttcttccctggaaggaggaagaaacaaaaattttctgtgtgaaaagcgagatctcactcttttctccagaagttggtcggcgtcctgtggtgacagattgcatattataagattttgaaccagagtagtattaacaagaaccaaagtcagctgtcatcaaacataaaaatacatacaagaaacagtttgtaaagcccaaagcacatatatctgtatagcgatgctcataccagtcgagaactaataccgacgacaacagcttgtgaggttacagattgcatagcatcgtccagcamactgtatagcaccgctgctttccctatatatatataagcagataatagggtgagtggatagaaaacaccaatgtccaattcctttgttcatcaaaggttaaaagaaaccagaattcttgcctgtgcaaacatgtcaaattcatcaagcacaaagatgatagtcttatgtgctagtccacatgccctgaaatatctctatcagtttgtctgcgttgaatatcaaaaaggctcatttatgtaaaggtaaaaatactgaccgcaacatggctataatgaattgtgaattgtcatcgaatgatgcctggaagtgcaagagagaaagcaagtcaactgagacattggctacacagcaaagagaaagaacattcggagagaacaatgtcataccattttggagaatagtaggtggtgttccatgcacaactgtttggcaatttcctgaaaaatcaatgtaagacggtgagtgaatgaatagattaggtgtaggaaatgagaatggtgggctctctccctctcttagaccttaaaggcacaattatcatcactatgcaagagtccattcaatctgatctgcaatcacattgagatggtagtaagatcataacgatgagattagatataggagatagttccaaatgtataagaaatcagacatactactgatactgaatcaggaaactgctccaataamtcacctasamcgagatccaagacctgaaatcaacccattttttgaaataaaagaagaaatcaracgccaatgacggagatagagagtagaaggaagcagggttcgacatacagcagctttgccagagccgcgagggccgagaagcaacatcgagttgttgcatccctccgtgatagaggttgatacaatgaacttcaatttactgtgtgttgacaaatttgtttgtactattaggttaaaagcaaattcgtttcgagaaattaagcgacaagtgagtgaagcaatcagacctgtaattgctatctgacgaagcggaaagaggtctgaagacataactaggatcacagagtctcccgcgaatcagatttagggatttctccgccggagtctctttgcccatcggactggcgggaaaactgacaagccaagcgagccctctgtgtgaactgtgaagtgaacacccatcatcactactagtataaacttactctatgggccgtagtaatgggccttataaagcaataaaaggcccaataaagctcctttgctttctcctaataacgacgtcgtttacattgtgttagcaagtttgtgatggaagaaggtttaacggagaaaaaaaaaaggattgggttgttttggaaaatatcaaatgtgggcaacgaaactcgaccggaaccaatcgttccttctctgaagctctctttgcaattgaaaatcaacaacatacgatacgagagaggattcttcgagagatg

SEQ ID NO: 16193 - DNA, 3003 bp, Unknown
  misc_feature (1)..( 3003): 2750-1469P.txt file - cDNA_ID_1380539; gDNA_ID_1621183; Annot_ID_57416
cctccaatctatttccgtttttattttcttattattcttaccatttacacatttttaattgtttttttctatccgtatagagagagatgtatgataaattaaatgaagcatctattattatttctacttctagtccctaaacctatctacgtgggcacacaatcttcgtaccaaaatgataaaagttttccaacgtacactttttgttgttgttggcttcaatgtatgcctatgtggaccattatgcttcatggagaagtaattatattttaaaactggatatattgaacaaattaaatagaaatctaaatgttttaagagaaatctaaaaggggaatgtttcaaagctagttgttaaggtaccgtgaattatctagtattttaagagaaatcaaagtctgcatggatgatggatagagtagaaacattatgatcaagtctttgttatgattctcgattataactctagataaacaaacttggatgtctgcgagaattggaagattatgttcattttttgtagctatttggcttttaagttccgatcgaaaagtgatttatctaaatgcaagttgctaacctttttgatttacgattttaaacaaaatatttggatttgtatttgtatttctgtttagtaattttttttcttgtgcaatatttattttagcaattgaaatattaattttcatctttatatgaaaacaaaacatgttattattcactaaacatcacataacaatattggcgcaaatatgaaaaagttagaaatatgtatcaagcacttgttttataaagccttagttagatattctatatatatatatgcaaaagtaacaaatagtttaaatgatcgaataatgaaaatattttatctgaaaatagcttacgcatgataattatatttataataaaaacaaatgagcttttaagattaatgaagtctaattcatttcttaagttaatttttaaaaatattaaacaaaaaataacggcattacgtggtgagataaaaaaatattgatatatcattcaccattgacgcttattagctcttattctccaaaatcattaaagatgaatttaaagtcgaaaatcacattacgaggcctctcgggtgaaattgatgttgcagatgatacaacagtaataaattaaaaatcgtagctagctttgaccaacataagagaataatcattggacttacatcttagtatattttattaatatgcttaagtagatatataaagttcgattatatgtttcaatatccttgtccaaaaaagaatcatttaattcgtcaatactatcataaggatccatgtgacacatttgaattagttctaccgcaaactgtgggtcctttaagtactataattttcacaaacgtaacatctccttatgtagagatgtcttgttaaattcctaggtgtataatgatttggattttgatttgacttaaatatcatgtgacctaaatacctgtataatgtcgttgattaaatccttagcatcatcaatgagattttgattcctaagaccatgacatgtgcataaatcgatacacacatgcctatacatgtatatttttgactttttgtgcaagtaaaagttttcgatttttttttatgtattgaagtatgaattctcgtggatgtaacatcaattttctaactagtaaagtaatatggtacatgcacgagagttcatactttcgagtttcaatacatacaaaaaatttagcaaactttattagtagactgaatttaacttttttttacaagagaattaggaaagaaaagaatagaggtgagagagagaaattaaaacacatgtacaaaagaatcaaaaaaagaggtacagttttcgttaactgactactgaactgaaaataaatgaatgtgttgttggtaaaggaaaaccccaaacctttatttcataggatttgaaattaaatcaatttggcagttttgtcagaaaaataaaacacttatttgaaaatgtattcattaactacatatgattttcaggtaaatagacagtttctcatttagtgtaaaacccaataatgatgaatatggtatctctacattataattagagttcaaggttgacatagtcataaaacttgcaaatttggtattcttggtaaagtatatatctggtccggactatcaatagatttaatgtgtatattcatgttaaaagatcatgtgtagctgaaaagatatcaagtttacatgaggataatctaattgtattttgttaaatataatctagttgttgattgatctgccaatccaaaaatatggcgaacttgatatacagaatatatagagactacgcgatggataacacataacatgtatttatgtctacccatactacaatattgtacatgttgttctattgatttctccttgtaaatacatgcacaaacatgaatctgaaaattgttcttaataatattatttaaattttaactcactagagacaaacaacaaggactatactatagtatactattggagaagttacacacttaaaatggtttataaacaaactaaaaaagtgtcatcaaataagcaatatttgaaatgctattttaaatatttatttagtaagtatcaggacgtctacttagagtttttcatgcgtcataaattatgtgacatttacttacatgcgaaagaaaaaggagtaaataaaacacgaaaaaagtaacgttaggtaaatggctaaacacgaggaaaagccaaaaatataaataattcaatttcttatctccatcaagatttaataaaagtaaataaaaattaagaaataaataatgaaaagatgctttggggagtggatctataaatcttgttatataaaggaggatagatagtgagggttttctaccttcttctatctaaaggaagtctttactcagagaaccaaaagaaaaataaagagaaaagaacccaaaaaaaaaaagccattgtaaattcagaataaatg

SEQ ID NO: 16194 - DNA, 3003 bp, Unknown; identical to SEQ ID NO: 16193
  misc_feature (1)..( 3003): 2750-1469P.txt file - cDNA_ID_1380539; gDNA_ID_1621183; Annot_ID_174340

SEQ ID NO: 16195 - DNA, 3003 bp, Unknown
  misc_feature (1)..( 3003): 2750-1469P.txt file - cDNA_ID_1380656; gDNA_ID_2926086; Annot_ID_196460
actaaggccatgattgaaacaactaaaacttgaatgagttagcttccaatttaaggagatgatgcgaatatcgttgaagaagagatattactacttgtagttcatttccactgatcgcaagccaaaaaagtagttaggttctggtggtgaggaaaagtgtaaaaatgataaataagattgagaggttctgcttagtttaattaaagtagcatttccaaaatactttttttttgctcgagtcagtagtaatagtcttttgtgttttcttcattagacataatcatgataccaaaccaaacacattcctctttcttcggaataactattattttctattttatttttgtttttttctcctcccacagattgtaacctttatcgtcaagttgtaattaaaaagattcctctaaacaattcgtcaaaaagctgaaaagattcctctaaaaaaaatttcactacacttctagattgtctttagactagtacaatctcctgtgttgacctaaatgcacaatagattgttaatttaaaatgaagaaatgcgaaaacatttttaatctaagtttgtggttggtgagtcgaatgttatgaataaaactcatgacttttatgttaaatacgtatgaaaattactatgaagaaaagtaacaagaaaaatagtgaaaagaaagaaaaagagaagaaggcacaatgtgggaaggaagtgcgacgagaagatcactagatttggtcggcacatcactttctctcttaaactcataaacacaaagcatggcccctaccttaacgtacccactttcttcttttcaaccccacaatttctaatatcctcaagctcaccctctccacatttagtgtgctctttttctttttcttgttcttttacaaataaataaataaattattctaatttattttgtacttttgttccccattggattgcaagtctacttagatcttcaatcttcgtggtcgagaggttgagagagagagagagacgtacaagtttcaagtatgagtaaagacttccaaattaagacattggtttgcaagttgaaattcagtcaccactacttcatcatatactttttgtaacccttctctttcaatacacgtatatacttgatcagtctgttctcatcaaaatatatacattgattacaaaaataatttcaattgatgtgttaatttttagatatattggccttaatcgaacatgaaaaatggacactttgaatacagccaaagttgtgtgttggtaattgtaaggaaacatcgatagtgattaacactaccctaagaccgttgaaagaaatcaaaagaatgaaccctctttgaaaaatttaggagacactttagagaacttatgaatagtttaaaaaaaaaaaaactctattattcatttggttctacttgttcaacttggttaaaaatggaggaaagatgaactatgtatagaatccaaaactacaaaatatctaacaatatttatcctaatctagaaaacattcaaccataatatctagatttttctctgcaaatatatctagatttttcgacatgtatatcaagataatcaaagaataggattcttaaaacacttaaagaggtgatgatattttatgatgtttctagagaagctctagaatttgaatttggtccaataaaggataatcggataatgaaccaataattaagtttgactcaaaaattaattcagtttcagtaacactatttgttgtggtcttgtggacacaaacaatgagatctatacaactatgggtgatatgaatcccaagtaacaaataaaaagggcaatgaactgatagtgatttgagttgaaaattcataaaagttaatatggtgatagaagttaaacatacattggcctttaccgactaactcgaactgaaatcaatctaacaaaaaataggttcgattgattcgattggaattttgtcaagaataagaaccattatcttgaatttgtgtgttagcaatgctacatcaagagtaagatagaaattagagactatggattcgagttagatgtcaataaaccttaacaatatggatttttttctccgattaatctaactaattggcacgttaggtgaatttcaactataattggtctccgtttgcttttgggaaagagagaaaaaaaaaaaaaaaaaaaaggcaaactttaggaaaactgaattttcaagaaacttgacttttaatttgtaagcattgtctcgtttcgtataccgaccgtcaataaagtgtaacttaacgaatctctttttgctggattttcctaaaacactgatcctatgacactcttacatattattttatcttttaaatgtaataaaagcaagaaaacatacataatattaatatatgttcatactatggttcatacaggaaaattcgtatcataacattttttcatcatttatttgttccatagagaggctaaagtagggataaaacgtcacctcttattcacttttcttttatttcgtttaccaataaaaataaataatatatgaaagtaacatggtagtataattggagtgaatatgtaagaacattaattggaatacaaatttactacaccaaaaactatttttaaccaaatatgtcaccaaattcaatagaatttacactaatttttattgggaacacatgttcccatcatggcctctttcctcctccactggttattactgataaaataataacattagacacttaacaacggttgattctctggtattaatgaaaaaagaatttcgaaagtgcacaaaatggaccccaaactccacaaaacctgcaacacactcaattatacgcacaacatgcaaacaataataaacatcactgaccatccaagtatttcttctatatatgtagactctcactcttttacgactcaaagagcaaagagctaaagtccaaaaccaaacacaaaaacaaaaatctaaatttctttcttggtctgctttcaatatg

SEQ ID NO: 16196 - DNA, 3000 bp, Unknown; identical to SEQ ID NO: 2804
  misc_feature (1)..( 3000): 2750-1469P.txt file - cDNA_ID_1380688; gDNA_ID_1620600; Annot_ID_161637

SEQ ID NO: 16197 - DNA, 195 bp, Unknown; identical to SEQ ID NO: 433
  misc_feature (1)..( 195): 2750-1469P.txt file - cDNA_ID_1380819; gDNA_ID_1590981; Annot_ID_150358

SEQ ID NO: 16198 - DNA, 3000 bp, Unknown; identical to SEQ ID NO: 6159
  misc_feature (1)..( 3000): 2750-1469P.txt file - cDNA_ID_1380963; gDNA_ID_1620852; Annot_ID_51001

SEQ ID NO: 16199 - DNA, 3000 bp, Unknown; identical to SEQ ID NO: 13728
  misc_feature (1)..( 3000): 2750-1469P.txt file - cDNA_ID_1381022; gDNA_ID_2214647; Annot_ID_188548

SEQ ID NO: 16200 - DNA, 3000 bp, Unknown; identical to SEQ ID NO: 6114
  misc_feature (1)..( 3000): 2750-1469P.txt file - cDNA_ID_1381119; gDNA_ID_2926132; Annot_ID_138776

SEQ ID NO: 16201 - DNA, 3000 bp, Unknown; identical to SEQ ID NO: 6114
  misc_feature (1)..( 3000): 2750-1469P.txt file - cDNA_ID_1381119; gDNA_ID_1620846; Annot_ID_50938

SEQ ID NO: 16202 - DNA, 3000 bp, Unknown; identical to SEQ ID NO: 6114
  misc_feature (1)..( 3000): 2750-1469P.txt file - cDNA_ID_1381119; gDNA_ID_1620846; Annot_ID_170222

SEQ ID NO: 16203 - DNA, 115 bp, Unknown; identical to SEQ ID NO: 12814
  misc_feature (1)..( 115): 2750-1469P.txt file - cDNA_ID_1381793; gDNA_ID_2214573; Annot_ID_186267

SEQ ID NO: 16204 - DNA, 3003 bp, Unknown
  misc_feature (1)..( 3003): 2750-1469P.txt file - cDNA_ID_1381941; gDNA_ID_2214471; Annot_ID_133100
aattgcaaaaaaacaatcagtttcatattttgtcttctaatgaaattatctcagtaaagcttatagattgtcaactcaagaaaatatcatgcatgctacatcgaaaacatcaaaaaactaatgagtaacggagtcatacaagttctagtccagcagagtgagttatcatcaaaggataatcccgacaacatataacaaaagctactcgccaggaacttggacgccttgcttcatcttctctttcttcatcttcttcttagaaacgggtttcttcttcctcggaggtaaattcttctgtgcgtatgtgtaaaggatgaagtttcctacaaggaatgtcagtagcaaccctcctattacaagaaggacgatcagtcccgggtttagccctttgctttcgatttttccctgttcattgtgttcttattagtaacatatattgaaatctagatgcaagaagaaacaagaagatttgagaaatataatatatgaaacttgaaaggacagaacacaaggtatactaactagcttctcaatcttattggcccgtaagacagaacacaaggtatactaactaccaaagaccattactgcaagagtttggttaagtgacagattactgcagattaactaacactgacaagcacgaatatcatgaaacgaataccacaagttataatatccatagattgtacaatttgggaatgtataaaccatcatattcgttattcaccatgaaccttaaactctgaaacagccaaaaatgaaaaaacttgacattccatggcaagatcaagatgaaagtgatgaagttaaccaaagtcctcaaactcaaaatgtatgaaattctaaagaaaaaacaaaactttaccgatccaattgtgctaggtcctaacccatgctaaatttcagagaatttgatcatccatcgttaagaagcgttacaacaatcatacacgtattgaccaaaatgctcgaacataaacaaaaaaagctcgcaatcgcaaatcttaaaccggaacatcatgcatcaaaaccagaagatcagactcaagcaacacataagattacgagccacgcgtgaaagagtagcaaacgattgtaggaaagcagaattgagacagagtcaaacgcagatctagcgattcatcgtgagtaacgaaaaatttgatctcagacaaggaaacacaggtagacaaagagagatattcagagaggggacagaacttacatcaaattctgcggccatggcggcgtttcggagctacgaggttatcagcaccgctcgccggagaaaatatagacagcttgaagacgagttttgccaagaaaagactcatagccataagtaacagcaaggttggtcaatggggttactttgcaaattataaactataggatttgtttctatcttcgattttggcatgcattttacttctacaactgatcaaccccgcttgacaattgaaatttatttctctttgattttggcaaatcattttaattgtagtactaagtaccaaccaatcctacttgacaaatgaatatttttaaatgtattttcaacccttttaatttggtatattttaaaaaaactttatattatcaattcaaatttgaatgatatcgtttggttaaaataaaataaaatttaatgtgatattagactactagtaaaacgaaaatatagcaaaataataaaatggttgacccatttggaataaacatttttatggttaaataattgaaaatatgcaaaatgataacaaatcaattatacaattcaataaaattattatatcatagaaataatttattctcaaacaaaacaaaaaattctcatatgcaattattaaattagagatttttcatcaaaagtaaatacttgtaaatataattcaagatccaccttgtttcaaaatgcatttgaaataccatctcaaaatatttgtatgactttgaactgttattcacttgatctattaaaacggacacatatgttttcactataatacacaattcataagtcttcaacattacttaaaaatcgtctttcataactttacttaatattgtttttggaaactttttttgtgtgatgttttttactttaataatcgattgatttgtttagtttataagaatgttttttgtgatgttttaagttttcaaaaacaacatggaagacaggaatactaactttatagtgaattcggtgttggtcccgaccccttcaccatggtcatgttcaaaccggattttgcaagactagatatggatactaatattgataatgacacaatttctctaatgatctacatcctcgtggaaatcttgttttttaaaataataatgaaaaattatttatcaaatgcttataatcgtttcattcttttggattcaatgccattaaaaatcattcgacaatttctttttggtaacttcttgatgtcatactacataatcatagttgatgagtttgtacaaaacttgaatagtttgatatcgttattagaagtaacacatgtaacaatcttggagatataaaaatgaatataaaaagtgtattttgtaaaatatttttaagattattattgtgacgaaattatttttgtataaaaaggtttagaatttgatagatagcgttaatatcataaaacgcaaagtattatattattgatcacaccattagagtgagtaaatacatatttgaaagaaaaaattaagaatgttcagactaaaaagaaaaggaaaaatgttttggcttccggataaatgttggggtcaatattaaagaaataaaaggtgtgggtgctgatacggaaattagtttacaggctgtaatttttctttcaggctctctctctttcgtcgccgaaccagttccagaaaggctgtagcgattcaaaatttcacaaattaaagtcttcttcctctccgaatcagagattgtctccttcttagctcagatctgggagcttcttgtgatagatttggaagaagatg

SEQ ID NO: 16205 - DNA, 3003 bp, Unknown; identical to SEQ ID NO: 16204
  misc_feature (1)..( 3003): 2750-1469P.txt file - cDNA_ID_1381941; gDNA_ID_2214471; Annot_ID_183040

SEQ ID NO: 16206 - DNA, 3003 bp, Unknown
  misc_feature (1)..( 3003): 2750-1469P.txt file - cDNA_ID_1382080; gDNA_ID_1620693; Annot_ID_48629
catctgtcatccccggaacatcccattgaacacaaaggcgttcccatcagcattttcagatatctgtagcgccgagacagcctgagcagcaatcaaatcagctgatattcccatgttgttatcccaagcacccctcctcgtgaatggcgaccagttactatctcctagtccatagccatttgacacaaacccaatcccttgaaccgcatagctagcacagctttggcgaggaacgtagttagttctttcatctctaaacagatccattgtgaaacccttttcttcaccaaacttgactcgagatgaatcatcagaatcttcgcccagtaggacgtgcagagcaacagcttctgcaattgcagctccttcttcatctaacctttgttgttcttccaatctcttctgcttcttcttttcaagctcagcccggatggctgcagaagtagcaagagctttctccaaacgtctctttttcttctcagcttgtttgatacgatcaaattcatctttaccatgcttcttcttcgctttcctaacgactggctgaacttgcttgcacaccgtgtgatccattattgcttgactataaatttctaactaaaaaactgcactaaactcgatgatgttgtagaggaactcaagaactacacccactctggtatataggaatacctcatggtgcggacaatacaatcccagaaagaaacaacaggagacaactgaagagagaggttataagaattcgcagacttattcttcgaaatcattcgtccaacattcccgcaccccttagactcgcccattttctgcattgacaattacttgattagtttcaagttgcagaggagtagtaacacagaaatccataacatcaaaatctgaaagccaaaacaatagcattcaaacttgtaaaagctaacagttgtagatagaccaccaaccaagcagacacaattgttctaatgacctcgaaagacaccaaaagtcctaaagaagtcaaacaaaatcagccaccaattagattgaagatagtcaacaacagccaaagagtaaaacctaatgattactcaaaccctaatttcccagagtaggagcaaagttgaagaatacaaagggtatccatccatccacagaaagagttaattccacggcaaatttcaggatctctcttaatcctcagctaataactcaattaagactaatggatacaaattacacaaatacagacaccagatctgccgcagaaactaattttcagatcaaaattaacctcaattcaacaagaacaataagagaaacaatcggatttaatccattatgtaggtctaagatccatgaataagcataagatccgaggaagctaatcaaaaagacttttaacgaaataagtcaattatattgaaaagataaagggaaattgaagataaacggagaaacaaagatgatgatgaaatttagatccaaacctcggcaatatggcatagaagcagctgccttcaaagaactcctttaaattaatcggataatacagagagataaacaaaaacgcagaagtaaagttgctgttttgatgcagagagaaagagagaggaatttcgagagataaaaaagaagagcagacgaagaagacgagagagagaggataatagaaggaattataactagtacagagaaagaaacgcagcgcgacttctaatgaaatggggacacgtgtcgaatgatgtctgacttttttttcaagtgtaagttttcaattgggactttggagacttggccggtgcgacttcgtctactcccagtattttgtgggtcctaatgagggctattagcagccgttagatcccccgataactgttttgagatgtttccggttccaacttttttttttgtcgacttccggttccaactttgcaatatttatcatgtaagaaagaaaatttgagcctttcacgaatatgtacaagtgtcatgttaccttacattacaataaaatataagagcttaatttgcattcaaagtttatcaacttgactaagctttgtttgtgctttgagcatcccattcaagattcatccaccaaaatgagactttgaatacacttttgatataacaaaaaacttggtcgaatttctttggtcctaatttatttcctgaatcccatctgttgtactgggcctaggcccaattggcccaatatgtatgtaccataaaaaagaagtcattaagtttttatgattgacttttttacatagaagcaaaattataaatttggtgtatgaatggatggactaattcgagacgaatcagatggctaacgaaaaccagacttgtgtccgttttgcattttcgaaaattatcggaagaatcggtcaattgattaccctcttttttttttgtttaccccattttttaatagtcatgaatcatcttccttggttgtgtcagattacttaagtcattattttgttatagagatgctttactagtatttttgatttgttttggtaaggacacttgtctagctaaagaaatgttagttaaatgaaagaaaaaaggttcagtagttgacccgtttaatcaactgcgaacaacgttcatactaatataatttgttaccataaattcataatctaaacgcgtgcttaagttgtaaacaaaaggaattaacaagggacacgtaaagtagcaattccgcaggaaaagcgagggtaaaattgtcatttcagtggatccccaccaccaccaccaccgccgcaccagtttcttcttcatctcctacgtctgaaattgagaaatcggaagaagaaagataagtctaatcttgtgcctttagatttcttttcggggagatctagtagttgttggattcgttaaacggagaagtggatttggtacgagtctttaggtttccttcttcaccaaaagctctatatagagagaatctgcgagctctttttggtaggaaattagggttcgtgttgcttggtaaatatagaatcaatg

SEQ ID NO: 16207 - DNA, 3003 bp, Unknown; identical to SEQ ID NO: 16206
  misc_feature (1)..( 3003): 2750-1469P.txt file - cDNA_ID_1382080; gDNA_ID_1620693; Annot_ID_164853

SEQ ID NO: 16208 - DNA, 3003 bp, Unknown; identical to SEQ ID NO: 16206
  misc_feature (1)..( 3003): 2750-1469P.txt file - cDNA_ID_1382080; gDNA_ID_2926187; Annot_ID_140854

SEQ ID NO: 16209 - DNA, 3003 bp, Unknown; identical to SEQ ID NO: 16206
  misc_feature (1)..( 3003): 2750-1469P.txt file - cDNA_ID_1382080; gDNA_ID_2926187; Annot_ID_200746

SEQ ID NO: 16210 - DNA, 3003 bp, Unknown
  misc_feature (1)..( 3003): 2750-1469P.txt file - cDNA_ID_1382347; gDNA_ID_2214605; Annot_ID_187191
gacttgatgacactttgatttcgctttgtagcatataaacatatactacatttcaacatttgttcatgaatcatgatattcatatattgactcgttatatatcctaaccatgtgacggtaattaaagcattttactagttttagacaagttatattcaacgctatagttttactaattatatatttacatgcatataaacataaattcgagacagattctattatttatatgaacttggacctttgttgtatctactaaaaatgaatttgatggacacaaggtggtagaccagtctttcctaaaatggggaggccacaaatggttagtgtatgagataggtgtcgttatatctttggttctttggcaattaaggaatgtccatctatattgaaattgtcctaaaatagaaaaggcaaaccatcactaatcactacaataagtgtgtgctctgtaatttatttcagtgttactttattaacctcttaatggtattgttatgtacaccgacgttcgaattttcaagtattaagttgccctatgtgtaaataatattaaggtgaatcataaatcatggtgaatgtgaatctcagtatttttgtcaaaactttcatatatttgatttcccaattcctcgcgccttataatttttatactttataaaagttttgaatttttattaaagggagcagggaacacctttaagaaataaataaataaacaattgatgctatactaagaaaaattaaattgatccaaaacaatatgctaaatatatatatgatggatagtcggtactattgaggaagtgggaaattttcatatatacttcaacctaaaattggatgattttttattaactgggatattatacaaaataattctgacaaaaaaacaaataatttaaaatagtcggtatatataaaagagagagttgttcgcatcaatttaaagtatgaatttaaaccatcatgtttttcacatgtttaacttttttttggcttttcggattgtcccttaatttggaccatacatgatacatcacctatcgactctcttaaaatgaagattaaatttgtaacgttaaccaaatagtctgatctcttgggatttataagtcacttttgcaacgttaagacattaagtggccgaaaagagaaaattaagagaacttctggggaatataacagtactaaatgattgcagtagataaaacattacaatctataggattagtacgaaacaaattaggttagtgtgtttagtacggttggtggagaataaataaaacaatcaaaatattactccaagtctccaacacttgcatatttcaacaaaagttttaaagctggtttaacccaaaaagaacccatatggtttgtcatcgagtttttttttttatggtacgattttcttattttcaaaaactaattacaactaaaaattacgtacccattaggctattatacaataacaactcaaaatgaaccaaatgtggaattgaagcctagacaggcaatggaattataaaggataagtaatacaatcaaaatacaatttaagaagagaggtagagtgtgttctagtaagttaatttcttagataaaaattattttattttgcgcaaggccataggttatttctagtatacatgaattggtaacatatgcgttaattgtgatagaggctcatgttatttttgtgtttccgtacggaatatagggcagtcgatcaactcaatcatttttcaatgaagtctggctaaacatgattggtttggatcaacccaaacaataaatattcaagcaaatgaatagagatatgcggttgtcgtagttgggacagaaccaccacatttcatttgttgttgttagattcactaacacattcttttttttcttttgaagatattttgggcgaaggcttatatatattctaaaacggtgacacacaataatcattttcttatttttctttctcatataattatattaaatatttttggttagttattataatttaaacaacactctcctaaaaattttgttttggcattttcaaatattcaaaaatatttaaatatatatttttcattaaatgtaaaatttattgaacccaaaaaatcgtgtttatatcaagtgcatagtctattttcttacatattactaaaacaatgaaatctacattcaaagtttgttaacttatttgtcttgttagttctagtttgattgttatctattatctatacttattttatttgctcaaattgttttaagcaaaaatttattgatcttgatatatccataatttctttggattaccttaaatcttaaatcttaaagtcaaaccaacataggttattttagtctcttcttcgttttcggtcctcaaactcgagacatttccaactcttctctttaaactggctaggtgataagtcgggtaggctatcaaaaccggatttttctgctcgttttgattgttttgtactaagttctctgctatcacaatttaaatttttaattagtggaaatcagtcggcaacttctacaacaaaaacgcatccacacaccgtgtcaacaaaagtactttggagtaatattaaatagaatgtgatatataatgaatgtgaacctttttatcaagacattcggtacattgtaattgtatattattggtctccaactaacctaaggaataagacaatttctattctaagttttattttttcttaaccatttctaatctatttattatggaagaatgtcaaactcgtgttataaaaaaaagaatgtcaaactcatgtagccactatttatttattttaaaagtttctttttatgatattactattaggaagcgtatgagctaggtatataccccaccgcccaatattctatatatatgagcaaagaacattcataccaacatcacaacgagaaagatagattcatctttcaatctttttttatcttaaaacaaaactttgtgtgaagagaaagatg

SEQ ID NO: 16211 - DNA, 3003 bp, Unknown
  misc_feature (1)..( 3003): 2750-1469P.txt file - cDNA_ID_1382581; gDNA_ID_1971936; Annot_ID_58570
gtgaattcgttgagtaaggctccgtcccgagggacttctccttctcctactttgaattcgtcgaggccgtggaaaccaccagagatgcctggtttctctttagaagctccaccgaatctgaggacgactttagcagacagaccggtctcagcttcaagaggcagacctggagtagcctcagcaccaggttcaagatctggttccatagaacgcggaggtggccccaccagcggcggcagcggaaatgcaagaaggcaatcttgttcgccgtccagaggtcgggctcctatcgggaacaccaacgggagtctcactggtgtgcgtgggcgagcaaaggcaagcaacggcggaagtggctgtgataacttgagcccagtggctatgggtaataaaatggttgagagagtggtgaacatgaggaaactaggtccaccgcggctaaccgagaatggtggtcgaggatcggggaaatctagctcagcttttaacagccttggatatggtagaaacctctccaaaagctcaatcgatatggccataagacatatggtacgatcacgtctcacaattttagtcaaattttctttgttgagagtagagtagcatccgaaaatcttcgattgagagtttctcacaagctcgctatagattaaacattgggcccaagctggatgatctgactcgcaagaagagtgtttcttaaagttctctggtaataataacacaattgtcgatctttggtgtgtaggatataagacgaggcatgactggaaacctccggccgcttgtgacaaaagttccggcatcatcaatgtacagtgtgagaagtcggccgggtagtgtctcaagctctccggtggccacgagcagcactgtgagctcatctgacccgagtgttgacaacatcaacattctgtgcttagacggaaacgaagccgaaaatgatgatcttcttagtgaaagaagctatgctgcttctccgcggaaccagtaccccaagttcacatcttgacccatattattatgtaatctgtgttcttgttttttgttctcacgcttcgaagcaacttgtttctaagtgatcaaccgtataatctataaacctcaggcatcaaatgtcttttttccttcataaatgttctcccaaagcaattgctaaatgctgtgtctgatattttaaaccaagatatagaacaaagtgagaatcgagaaacagaacaaaacatggaaatagtaaagaagacaaaacagagcatagaagaagaatttaacgagtttggtacctaaatctcgcgggacaaccctctttgtaaatccactaaattacttgaaaatttacagcttttggcatgtaccaaaatggttcattccaatatgaccgatacaaaaaaaaaagttgtacgataagaatctccagatatatatttgaatcttttatactatatgaagggacgaaacagagacatgtaaatgggtttcggttttcttacaagtgtaaacaaaggaacatattcataaacttgtctcgttaggtttataagagagtcaaatatacttgaagaacatgtcgttgtgaggatttggattcggtgaatcgtcttcacgtttagagacaacaagaaatcagacctttaagtgacgagtaaagtaagtagttacatgccacaactccaccaaaatcgtgtttatactttttttttttataaatacttttattactacaattttataacgattactatttcttattgaaaattggtcaaaaacattttagaactttattttactttttttgtcaacaaggtggacttttcaagttttgattttgtggcgcaaataagaaataatggaggattttcgtggaacgatgatgtcatgtgccaactgtaaattcaatttcagaccgcaatcgatagaaattaacaaacgattcgttttaagaaagaaagaaagacgcaaggcaatgtgaaaacaaaaattcctttttggatcattgagttgggatttgagaattcgaactttctctttggatgattgaatgtcagcgtagtgatgacgtcaagtaaaagctcgtttgatgacgttataaaatgttggcaaaaatttcttttttaagagaaaaatataaatgcatggttgtctgaacggcgagaagaacttggtcaaattaaatgtgccgtgtagtttggtcaggtaaacaaaactttattagtaactatcgctcttaattcatacgtatgtacgtatgagtctatgagaacctttcttagttaaacggtacgaggacaattattgtaaaatgtaaaaaaaaggtaggtaagtgatagaatttgtttggcgtatttgtgtgacttaaattgtaataaacaggtctataaaatccattgaagttgaattcttctaaccttgccttagttacaggcagaagaaaataattaaagaagaaatctaatcagtgcgacttttataatagtctcgtcgtgtgaaaaaagtaaaataaaatatagtaataaaagtctcgtcgtcgtgtagctgtcactttcgtttgtcactttcgagcatcagcagccgaacataaacaacaaaataaaattgaataccttttagcgtattcactgttcatgagttctgggtttggtttgctttgtatgctcaacaatttattgacatcttcacgaaaaagtttaaattttaaatcagacaaaagcagtctcatgatttctctttgattaactcaatatagatttcttcttcgcactagcaaataaacacattatcttcttcttcttcttctctcatcgttactttatagatttagtatcgaggagacaggtcgaaattgaggttcttttaaagaaaagttccatttcatatctctatcaaacccttttctgaatattattttgcttgtgaatttgaatttgagcttttttcctctgttcttgggaggaatttttgtctgtgtttgtgatgcgttataattgcttcggacttctagatatg

SEQ ID NO: 16212 - DNA, 3003 bp, Unknown
  misc_feature (1)..( 3003): 2750-1469P.txt file - cDNA_ID_1382662; gDNA_ID_1620377; Annot_ID_155190
ttgagagaggttctagatgtttctattaggtgacaagtggttgaaagacaaaattaattaaaattgaggtgacgaaacaggactttcaggtgggagagacagttagaagtttgccgcactgccatcatatgttccacctaccatgcatcgacaaatggcttcgcaggcatgcttcttgtcccttgtgcagaagacatctttgaattgattttgaactcttctttcttctcttctttgtacatgaggtataggcatacacacacacacatatatacacactagtagtcttccttgattttttttagattacacgttacacagattttgatgcaccaatcattgtaacttcactcatctcttggagatcctgtttatttatgctacttattcttggcttcatcattcaaaaaggacatgctgcacttcccaattttagaaagtttgggatcggttttgcatagactaaatcccaaatgaaaaagcatatatacatacatatccttgtcgtcgaaaacaatgctctactcttaagaactaagaagagagataatacattttacatgaactagtccgagtacaaaaatatttggcatgagatccaacatgtcaatagcttcagttttaaattatacatttcttataccaggaagagtgaacccaaaaagacaaaaaaacataaagaaagaaaaaaaaaacacatatctttggttggataaatataactagaagatggatggagcctggttttaaagtttcttaggtaaagtgataccaccaccacggatagaaacagaaggggttttaagagaggaggctctgctgagcagattggtgtccaggaagaggacgaccacagtgatgtcgtcatggaaatgcctcctgactcctctctcaatcttgttgagatcagaatatctcatctctcttttctttgctgcctcctgcagcgcagctttcaccagtctcctcgctatcccctgcatcagcattctcacatttactctttagaaaaaatcatctatatatgtttagaaactgagagtgtctcatacgtttcttgggtggttctgaacgatttcaacagcctcttggttgctaagctgctcccaaagtccgtctgatgcaaatatcagaaactgatcgtctggttggagatcatgcacggttatcgacggttcccaactcaagataggtcttttcattggctcccgcaatcggtactttgtgtacaaaggttccttgttgaactccgatttcttaagatacacgtctcctatggatcgtgatacctgcaaacacacagacaactaagctttcaagatttgacaagtggccaacaataatagcttatccaactcagtgaaggaacatgacataataatattggctcagattttatagcataagaagatctctttgtagagagcggcacctgaataatgcccttaacacgccagacattgtgttttaagacgacaatatgggagtcatcagggtgtaaggagtgcatttcctgcctcacagactctatgctcacgttatgctcagctgagagctgaagcgcattaacctcacctgtggccttgatgacctttcccaaaaccgcacgggagtccccaacgttagctacgtaaagcttcccatcgcagaccacaccgatcaggcaacaagagccaaccgctgctatatgtggcttcactgcccactgcttggccaccacccctagaaacccttcttcggttgcctcataggcctttcttatcacatccacagacatggaatcctgctccgctgcgaatcctgcagacatgaatgttcagttccaatggttccctagctaaataaaattcagtggtgagtagtaacaacaagtagttactcttgagatggtgaaagagatgatcgttgacaaaacgggaggtctcagggcctccgtggccgtcatagacgccaacaaaggttccatagggaccagaagaagagagggtggtcaaaggaccggattcgacctggctctgatcctcgaggaggttgttggcctggacaacggccatggagaaatcaccaaaaaggtggtgagcagagtctttgtaccagagaaggccgtcttgtttgcctttggaatcagaataagtgtgggaagtggtggaagaagagggccagagacaagaggtcaaaaagttgaagaaaagggataacatcgggcctcatctcatatcatccccaaccaccgattgttatgctaaaatgaatgaatgaagtatgttgaaaaaacaaaagaagagagagtcggaaacttccattcattcactcacacaaagaggagttttgtttagtaaaaaaagcaacagctggatggagatctcaaggagatatagagaaactattaagttgtaagtaacatgtgtggagagagatagagtgaaagaaaaaaagaaaagactctctctgtttttgatttcagatatttattaggaacagaacagaggaagcccttttccttgtatatgagaacagaggaaaagaagagagacaatttatggatcacaagatttccagagcctctctctctctctctcaaataactcttcttctatatttgaccatcaaagaaaggacaagaagacacacatacgtgtgcacgtgcactccttaactcctcccatgtgggatttacaaacatacaatagctgttctcattattattatttccttcttgccttgcaccaccattgttaactctattcaattcaaagtttcaaaccctttgaccaatgcatccccttattgggctttgattatatgggccctttctatttgatatttttcaatatatggcccgttaataaatttaatatatagcttcggccttataagaagaattcaagcccctcaccgatactctagtccaagccgtgggcagaaccaaaataagagaacaaaaaaaaagtttgttttctggaatcgtcgcgatagttgctgaactccgtcgcaacttcaatg

SEQ ID NO: 16213 - DNA, 3003 bp, Unknown
  misc_feature (1)..( 3003): 2750-1469P.txt file - cDNA_ID_1383333; gDNA_ID_2214543; Annot_ID_134507
attttgtaaagtaatagacaaaaaactagctgattctgcggtttgagcatagaaatggtatctttatacttcagtcacaaactatcaactttgaaaagaactacttcaaattcctaactaaaaacatacaaaacacagacgaagatcgaaacaaacttaagttagaccataaactaaacaggagcagatatgactttctccaaccatagatcaagatgtaacttatccataagaatcaaaaaacagaaacttttcaatcttctgcaacttcatagttaaccaagaacaaagcttaatcattgggaccatgttgtaaccaatctcttacatcgagtgatcacacatggaaattcttgagctatacgtgttaggatcagctcaaggaccaacaaaacaatagagactatggatcattaatcatacttcactacaagcaaaagtgactaaaaccaatgtcgacgaaactgataaatctaaacaagtagatgaaaaattagggaaatgaattaagacccaattagaccagaagaaagaagaagtgaaaaatctcacctttctctttcatgattttgagaaacgaagacattacggtagagacaggtttcaactccaccgaagctttccctcgcttctcagcattcacgatcgttctcaatgcatcgttcaatattctcctccccattgatcgaaaattccgatttctaatacaaattctataatcgaatgacaacgaatcaaaaagaatcgataacccctaaagttcaacagagcagcaggaaatgggtttattccaacgtttctcagaattgtgggtatttcgacatttcgaaaaacattaggggtattttagacttttcacgttcacttacatgagctagggttttatttttttcagaggtcatatataaatagctccattcgtcttctaacaaagctccggcgccaccattaaaatctctcgatctctatctgcgaaatttcacggtgagcttagtattactctcaattgttctcagttcagtatgtcttgattttcgtagcttagatgatctgattttgtgtagatattttgattcagcgagctctatagtagtagcctttaggaatcgatctgttaatgtatgtgttgttgattggtagtatcatttttggtgtggtgaaggtaggtatttgaaatggcgacagttccaggacaattgatctgggagatcgtgaagaacaacaactgtttcttggtgaagcagttcggtagaggaaactctaaggttcaattcagcaaggagactaacaacctcaccaacgttcactcttacaagcactctggtaaatttgtactcttgtttacgagattctttgtttctgaacgaaatgatatcttggccatttgagaacaaatgattactttacatctctggttggttgatttagtagaatagattgggaactaaagttgttaagaaatgttgatgtgttaagtgcttttggttctatgaaagattgtggattctcgactattagatgattgtggttgaaacttggctgtttgagatcgtctttatgcactattttattgattctcgagtataagcttattttcttatctgttgcaagttgaccgtgaaatgtagtttctttacatttgaccatttgaatctgtattacaattgtgtatgtatcttctaatttaaagacaaaaatggtagtctgagttgagcagacacttcatactatgtattaggttttgttattgtcttgaattaggctaaagtttgaatcttttgatgtggtttcaggtcttgcaaacaaaaagactgtgaccatccaggccgctgacaaggaccaagctgttgtgctcgccaccaccaagaccaagaagcagaacaagcctaagctctctgtcaacaagtctatcctcaagaaggaattccccaggatgtcaaaggctgttgctaaccaggtattactcaatttttattactttagtgttttttatatgtctatggtgtgcttataggtctctatatctagttttgtgtgttattttcacggctatgatctacaattggtttttatgttcttccctctacctgtgagaggagagttaatatgttatggtaaaacgatatgatgcatagctgtgcaaagattaaaatttaacttcatataaggctcctttttgtggcatattgatgaaatattaattttacacttggctattttcattgatctgcttaatgttgctgtttattggtttcatacgtgaatacaatctaaaccaaatgattgtgtaaatgtttaggtggtggacaactactacaggccggacttgaagaaagctgcacttgctagactcagcgccatcagcaaaggtctcagggttgccaagtccggtgccaagcaaagaaacagacaagcttaagcttcttctttcacaatctgttttttttgaagtaaaagattttgttgaacaggttttatttaagttgttgctttgaagttgaaccataatgctattctcctttttcattatccttattataaaggagttagaagtttatcttgttatgcttgatgtttctggtgtgcttgtgttacattttgttagatccttttatcgaatcaagaactttcttaaaatctctattctagattttattagcaaatcaaatgtaatcaacaaccaagtccttatatattatgacttttgaaagcctaaattgactcaaaatagcaaacataaatgtttagatttgttgcatcaaatgtgatgttcttgtggactataatgttgacattttcattagatcccatcaaaaaccaacttgagaattccatcttagcatgctctatacttatccaaaagcccatcaggcccatagacggcccaacttatagcatacggaaaggtttatattagggtttcttagacatgaattaattctgttctcttgctgtggccgtctccaacaccatttcgaagaccagggagatcgaagcaaaatg

SEQ ID NO: 16214 - DNA, 3003 bp, Unknown; identical to SEQ ID NO: 16213
  misc_feature (1)..( 3003): 2750-1469P.txt file - cDNA_ID_1383333; gDNA_ID_2214543; Annot_ID_185291

SEQ ID NO: 16215 - DNA, 3000 bp, Unknown; identical to SEQ ID NO: 10435
  misc_feature (1)..( 3000): 2750-1469P.txt file - cDNA_ID_1383349; gDNA_ID_2213649; Annot_ID_132443

SEQ ID NO: 16216 - DNA, 3000 bp, Unknown; identical to SEQ ID NO: 10435
  misc_feature (1)..( 3000): 2750-1469P.txt file - cDNA_ID_1383349; gDNA_ID_2213649; Annot_ID_181560

SEQ ID NO: 16217 - DNA, 3003 bp, Unknown
  misc_feature (1)..( 3003): 2750-1469P.txt file - cDNA_ID_1383434; gDNA_ID_1621088; Annot_ID_55451
ttcgactcgagtaataatggccaaaatatgaaagtaaattagaaagaaaaaaaaagactcaatttaaaaaagaaaagcaagagagaagaatgttttaagatttttcaaaatgaagttttaagttacaaggcttaacttatcaaagaaaaagataaactgtcgaattagagacatatgattaagaatttggatgatgatatttatatatgtgttagtacaaagcggatttacgatatggcttggggacaaatgaatactcagggttaaattattgagaagggaaaaaatctaaaggagatgacaaaaaagggacaaaggggaacacgttaatgtacaaatatagtaaggagtcaggaacttaggtacgatgtccatacgttttgcggtccaaagactttccatttttgtaaatctttgaaattaaccccacttggttcccaaacatccttcgacaccgacgacacacacaaacacaatttatttcttttaattaagttttactttttaaccttttttggtactatatatcgaaaccacacccaaattttagtacggtcccatttgcaataattcacgttagttaatggagggaccaacgaattattccgacttttcaagttttcatcaatatgggaatcatttccatttttcactttaatttctgctttaaaattgtttcgatgtttcagacaaaataaattaatttataagatgatggacgataggtcgggcctaactgaggcttaggtaagagatacattatgattcttcggtttcaagcttgaagaaaatatctcattatggttagttgacaagaaaacgacagcgtttgatataccattttattttttagagtacatattattatagtatgaaagcaccaaagactatatagtctaatttttagttgatctatagattttttaaaaagtttgcagtcaaaactgttgatatcggaaataagataacacacgaaaccccgaacgttagtcatgggaatctattatcaccaaagtaaaagatggaatgaagtttagtcggaatgatagacactgagacacccaacgatggtattataatagattaagaccttgaatgttttgtacattttgtaagagtttttgggttttgtttttcaaaaacttattttcataccaatcaagattttaaaattttggtttctctatagtttagaaaaactattttgttgtaatttttcattcctcattttagttttttttgttctcttaaaattttgaaaatctagtttatactcaatcaacgttatttttttcaaaaccaaaaatcatttttttgaaattttttaaacaaaaatataattacaaaaatctaaaactaaaatctaaaatctaaatccaaaaactgaatcgaaaatcaacctccattcagggcctaaattgtcctcttacaatacatttttctttccatatgtgatatcataacggataggtaaaaatgaataaaataaaaactttggtaaatggtaacaaaatatcatcaaaattttaccatttaccataccccaaaaagcaacatagcaattaaaaaacaacaaactatcatcaaaggcattataagagaaccctttgagtacaatgaaaggttcttgaatattgaatgcacgaatcaaaaggacaaaatgctaagtctatgtaatttttatgtatttacatttaagtttgaaaacatatcgttaataaaagtattttgtatgataaaaaacttttagataaaaaatataatagcgatttacttaaaactttgaaaaagtttaaaattaaatttaaatacgtgaaaatatgatgaacttatgacaccacaatacttacggaccaaaaggacgggatgctaagtctaaccattttcacgtatttaaatttaacatttaaatttgaaaatattttttattttacaatattaattaccaaacagcttttatttattttgaaactgaaaatttaaaacaaaattattatttttagtaaaatcaattgttatctataacgttaattaataaagaaaccaaaaaaaatatttttaaaaaaaagaaattaagaaaggaacatacctcgtgaaatagggagacgtttgtcatcagggattgttgtttgctaaaaagcccatacgctgttttgcgaagcccatatcatattgggccaagattgcaaattgtagatgagagatctgagtcatcttcatcttctctcctagggcgagtccttaacggtctgattctgagtcattgaaactccaaacctactcgtcggttgttgatgagagtttctttgcgcttttcagaaagaaaagacaggtccgcataagatgcatccatggttggctagaaatcaacatcgattgatcaaacacgagagaccactccaagtggcgttggtatggatatgatctctaaccagtaaccttgtcggattaatcctccatgattgatcagagattgtgaaatattagagagacctctctcgacatggcgttggtaaagatcggcgacgtatatggatcatcaatttcacggtttcgaaatcgacgatcgtctttgtaaaacagtagcagagaaaagaagaattttgtttttttgtctcttaaagaaaaattatgatttcccaacacaagacagatgaatatttataaggaaaggctcacgcaaagaaaaaaaggaaacatcaggttgttttccttttttcatatttggaccttaacaaaaaaggaaattgaatcgcacaattaaggagcgtttacaacggtcttatttttctaatctcaatttgcagatttcgttaaaaggccacgtgttcgatttttttttaacgcataaattgtattgtaattccaaaactacatcgttttgaggtttagccattaaagtcacagtcacactttcgcttttcccaatacgaacaagcggtgacgcatatctcctgtatcatcactcttttacttccggcgatctctctccgacggccaatg

SEQ ID NO: 16218 - DNA, 3003 bp, Unknown; identical to SEQ ID NO: 16217
  misc_feature (1)..( 3003): 2750-1469P.txt file - cDNA_ID_1383434; gDNA_ID_1621088; Annot_ID_170588

SEQ ID NO: 16219 - DNA, 3000 bp, Unknown
  misc_feature (1)..( 3000): 2750-1469P.txt file - cDNA_ID_1383434; gDNA_ID_2926212; Annot_ID_142032
gactcgagtaataatggccaaaatatgaaagtaaattagaaagaaaaaaaaagactcaatttaaaaaagaaaagcaagagagaagaatgttttaagatttttcaaaatgaagttttaagttacaaggcttaacttatcaaagaaaaagataaactgtcgaattagagacatatgattaagaatttggatgatgatatttatatatgtgttagtacaaagcggatttacgatatggcttggggacaaatgaatactcagggttaaattattgagaagggaaaaaatctaaaggagatgacaaaaaagggacaaaggggaacacgttaatgtacaaatatagtaaggagtcaggaacttaggtacgatgtccatacgttttgcggtccaaagactttccatttttgtaaatctttgaaattaaccccacttggttcccaaacatccttcgacaccgacgacacacacaaacacaatttatttcttttaattaagttttactttttaaccttttttggtactatatatcgaaaccacacccaaattttagtacggtcccatttgcaataattcacgttagttaatggagggaccaacgaattattccgacttttcaagttttcatcaatatgggaatcatttccatttttcactttaatttctgctttaaaattgtttcgatgtttcagacaaaataaattaatttataagatgatggacgataggtcgggcctaactgaggcttaggtaagagatacattatgattcttcggtttcaagcttgaagaaaatatctcattatggttagttgacaagaaaacgacagcgtttgatataccattttattttttagagtacatattattatagtatgaaagcaccaaagactatatagtctaatttttagttgatctatagattttttaaaaagtttgcagtcaaaactgttgatatcggaaataagataacacacgaaaccccgaacgttagtcatgggaatctattatcaccaaagtaaaagatggaatgaagtttagtcggaatgatagacactgagacacccaacgatggtattataatagattaagaccttgaatgttttgtacattttgtaagagtttttgggttttgtttttcaaaaacttattttcataccaatcaagattttaaaattttggtttctctatagtttagaaaaactattttgttgtaatttttcattcctcattttagttttttttgttctcttaaaattttgaaaatctagtttatactcaatcaacgttatttttttcaaaaccaaaaatcatttttttgaaattttttaaacaaaaatataattacaaaaatctaaaactaaaatctaaaatctaaatccaaaaactgaatcgaaaatcaacctccattcagggcctaaattgtcctcttacaatacatttttctttccatatgtgatatcataacggataggtaaaaatgaataaaataaaaactttggtaaatggtaacaaaatatcatcaaaattttaccatttaccataccccaaaaagcaacatagcaattaaaaaacaacaaactatcatcaaaggcattataagagaaccctttgagtacaatgaaaggttcttgaatattgaatgcacgaatcaaaaggacaaaatgctaagtctatgtaatttttatgtatttacatttaagtttgaaaacatatcgttaataaaagtattttgtatgataaaaaacttttagataaaaaatataatagcgatttacttaaaactttgaaaaagtttaaaattaaatttaaatacgtgaaaatatgatgaacttatgacaccacaatacttacggaccaaaaggacgggatgctaagtctaaccattttcacgtatttaaatttaacatttaaatttgaaaatattttttattttacaatattaattaccaaacagcttttatttattttgaaactgaaaatttaaaacaaaattattatttttagtaaaatcaattgttatctataacgttaattaataaagaaaccaaaaaaaatatttttaaaaaaaagaaattaagaaaggaacatacctcgtgaaatagggagacgtttgtcatcagggattgttgtttgctaaaaagcccatacgctgttttgcgaagcccatatcatattgggccaagattgcaaattgtagatgagagatctgagtcatcttcatcttctctcctagggcgagtccttaacggtctgattctgagtcattgaaactccaaacctactcgtcggttgttgatgagagtttctttgcgcttttcagaaagaaaagacaggtccgcataagatgcatccatggttggctagaaatcaacatcgattgatcaaacacgagagaccactccaagtggcgttggtatggatatgatctctaaccagtaaccttgtcggattaatcctccatgattgatcagagattgtgaaatattagagagacctctctcgacatggcgttggtaaagatcggcgacgtatatggatcatcaatttcacggtttcgaaatcgacgatcgtctttgtaaaacagtagcagagaaaagaagaattttgtttttttgtctcttaaagaaaaattatgatttcccaacacaagacagatgaatatttataaggaaaggctcacgcaaagaaaaaaaggaaacatcaggttgttttccttttttcatatttggaccttaacaaaaaaggaaattgaatcgcacaattaaggagcgtttacaacggtcttatttttctaatctcaatttgcagatttcgttaaaaggccacgtgttcgatttttttttaacgcataaattgtattgtaattccaaaactacatcgttttgaggtttagccattaaagtcacagtcacactttcgcttttcccaatacgaacaagcggtgacgcatatctcctgtatcatcactcttttacttccggcgatctctctccgacggccaatg

SEQ ID NO: 16220 - DNA, 3000 bp, Unknown; identical to SEQ ID NO: 16219
  misc_feature (1)..( 3000): 2750-1469P.txt file - cDNA_ID_1383434; gDNA_ID_2926212; Annot_ID_202694

SEQ ID NO: 16221 - DNA, 3000 bp, Unknown; identical to SEQ ID NO: 12061
  misc_feature (1)..( 3000): 2750-1469P.txt file - cDNA_ID_1383470; gDNA_ID_2214529; Annot_ID_134240

SEQ ID NO: 16222 - DNA, 955 bp, Unknown; identical to SEQ ID NO: 412
  misc_feature (1)..( 955): 2750-1469P.txt file - cDNA_ID_1383473; gDNA_ID_1590839; Annot_ID_150136

SEQ ID NO: 16223 - DNA, 3003 bp, Unknown
  misc_feature (1)..( 3003): 2750-1469P.txt file - cDNA_ID_1383514; gDNA_ID_2214704; Annot_ID_136943
atatagaaacgtgagtgtgtttcctgtgacacataatcatatcttgctgtggaagcaagtggattgccgtgaagttagaggagatgagtctggtgacgagaaggttgtggaggaagggactggttatgattatgaacaatggggacttgggaatttcttggagagttggcaattatctgacacagtcttccttgttggtgaagaggaaatggatgtccctgctcacaaggttatattacaagcatcaggtaattttcctttgagatcatctgatggggatgtcattcaacttcgtggagtgtcgtacccgattcttcatgctcttcttcaatatatctatactggacgaactcaggtaatttctcatatcctcttcccttgacgtaattgtcccttttgcctggtgaaatgctttgttaggaacctttttatttatttattagtaaacatggagattctatatcttcgtcataatttccttcaaacttttgttttgatgtagattttggaatcagaacttgctccattgcgggatttaagttctaagtttgaagtgatgtcattggtgagacagtgtgaagaaagtatagaccattttaaattgagcaaaacagcatttgactcctgcagaaaagtcaaactcttgtgtcctatttctcacccgttatctggctttatgttcccaagtgctttccctgttgatgttgggaagctggtaaagttgtactcaaccggcgaatatagtgacataaaaatctacctcagtgaccatagtctcactttccaatcccacaaagtcattctaagtctttggagtgttgcatttgcaaaggtgagaatctcttttagtgtcgcagttctgatgtacatgaatatattgattctcaattttcttatttattctctatgaacatccagatgtttacaaatgggatgagtgaaagccattcatcaacgatttacctaaccgatgtatcaccagaagcattcaaggctatgatgaatttcatgtatagtggagagttgaacatggaagacactgtgaattttggcaccgagttgattcatcttctctttctagctgaccggtttggagttgttccacttcatcaagaatgctgcaaaatgctcttggagtgcctctcagaggtaatttttttcttttcacaatcctctagagtaaatgatacgtctcgctgtcattatcatgtttcacttcttttccagtacatctgttacaatatggtttctgtatgatagagagcttaatgagccgtgaagtgggttgcggtttcaagccttctgaaactaaaagagaaaagaaacgaaataccacattcaaactacagagtaaaaagaatattaatattgtgtcatgtatatattacatgcagggatggcgttccgttttggaagaaggtcatacaacaagaataattcttttatgcgagtttattgggcgtgggagcagacaaacttgagtcttttctcaagctaacctctgaactttgttgcaggattctgtatgctcagttctccaagtggtttcgtctatctcatcatgtaaactcattgaggagatgtgcaagaggaagttctccatgcacttcgactattgtaccactgcaagtttggactttgtcttgttagatcagaccaccttcagtgatattcttgaggtgtgttttctctttcgctaacgtactatttcttataagaacatctgaacccgcttggagacttgcccaaataaactgctacaacgtgttgctcatgcactgaccagtgattagttatcgtggaaatatatatgaacaatggaattgtaatggatatcaccaagagtgatgaatgacgtctcctttcgttatggcatgtattaaatcctggaattgcagtctgcagatctgacggtgacatctgaagaaaagattctgaatgctgttctcatgtggtgcatgaaagctgaggagtcgcacagttggggagtaatagatgagatgatgaactatgctgaccccaaaagtttgttcaaagaaaggcttcagtcacttgatgacctgttacctcatgtacgcttctctttgttgccatatgagttacttaaaagggtaagtggatcctgaccctgtatatgctgaatgaactttgtcattttctgttaaattaatttcgctgatgccatctatgctttgatgatgacgcagttagaaaacagcaacctaagcaaagaaatcccagtattcaatcgtcttgtaagttcttaacatcttctatcgatttggggattatttaatttgtcatttcaagactgattttctctccaagccctcacttattttgtcttgtgtacagttgaaggaggctgctagcttcctaacatccggattgatatccccaggaaatgaaccgatgtatgaattacatagtcatgtatcttaggattgtaaacatctccaggtttatatttccagacttctcaattattaaagcttttcacctctagttcaagattccaacatcggagatcgagtttcaaggagcttcagtacatacgtgatggggacagcaatggggtgctgcactttgtgggtacatcttatggtagtcatcagtgggtcaaccccgttctcgcaaaggttaacctcacttttatcttactttctttattcatattgttggaaatccaattaccatgacaaggaattctgctggagaaaaatatttccttatttgagttctttatgttttacagaaaatcaacattacatcgagtagtcccacatccagattcactgatccaaaggctttggcttcaaaagcctatgcggtatggtccacccaagttcgctcggattatatgactagaatttggcttgaactacaaaattgacgaagcataaaattaattgaagtgaaccttctttcctcttagatacagtatttaaccatatgatttcatttttttggcaccagggtacttcctttgcagggcctaggatg

SEQ ID NO: 16224 - DNA, 3003 bp, Unknown
  misc_feature (1)..( 3003): 2750-1469P.txt file - cDNA_ID_1383545; gDNA_ID_1620743; Annot_ID_49652
gttctatctgaaggtaaatcaagcttgatgatgataactaggcaaaaacacgcttgaagcatcatcatatgatgattaataatacagtttgataatagctatctgttgttaacttcagagtctgtcttcctatactaactggtcacaatctgactttcagaaatcatggatcagctcgtgacagaaggtgttctttcgaaaacggggaaggacatgtacattaaaaagagagacaaggtgattcttttatcctgactcctactttggtttcatttacttatgactttcgcctttgcttttaaattttattttctacctacttaccccaaaatttcagacaccagagagcgaattcacctttgtgaaagaggaagccgatggtcaaatttctccagggaaatctgttgctcctgaagactacttgtacatgaaagtgagggagactctgacttcttactctatgtttaacacactagctcaaaggatagatgaatagagatggtccggagatccatgattgacacttggctttttttgttaggctctttaccattctcttccgatgaaatatgtgacaattacaaagcttcacaacatgctggatggtgaagccaatcagactgcagttcgtaaattaatggacaggatgacccaagagggctacgtggaagcttcgagcaaccgcaggctaggtttgctacctcaattcagacccttctctgttaagttatgttggttgttgtgtcattttttcctcactgatgcaatgtttataaacagggaagcgtgtgattcattctagtctaactgagaagaagctaaatgaagtcagaaaggttcttgccaccgatgatatggtaataatacttgaaaaccagaatacctctttggaacagctttctaatgtgaatggtttcacaggatgtggatgttaccgaaactattaacaagacaaacggcccagatgccaaagtaaccgcaggtacactccttatttgcactttgcaacccaagttttaagctgttttaatcgatctgacatatttgaaacaaatagatgtatctacctgtggaggtatccactccataggttcagacttcacacgcacgaaaggaagatctggtgggatgcagcagaacggctctgttctaagtgaacagactatctctaaagctgggaacactcccattagcaacaaggcacaggtagtatgaaatcaccactgagagtgatagacatatcttactgtgtatatgactcttttaagtgtttgctaatttggttattgttgctcactcagcctgcggcttcgagggagagctttgcggtacatggtggagctgttaaggaagccgagacagtcaactgtagccaagcctcacaggacagacgtggcaggaaaaccagcatggtatcttacactaaaccatataaactctctctacgtttttcaactttttagttatttgctgaaagaaactgacatggttcttgtgattgttattcctacaggtgagggagcctattctgcagtactccaagcgtcagaaatctcaagctaattgaagacaccacctctatcagacaccataaccaccttcttcagtggtgatgatattaacctgaaacactcgctttttattgctttatttctcctctgcattcagactattttcatactccatgcttgttattatctctcttaaagtatcatatcttatcgcacttttgggaagataatttattgcatatcaaactttaacacttattagttattactgtgagtattattcactaatgctctacatgcttttatggaacaagtatgaagtataggactatcttcgttttaaattcccctgtcgatcactttaatccaaaaactttaactttagatactaacacgtgttgaaacgtgtactacgccattccacgcgtcaggaaatcgagcaccgccgaattcatctcgccggagcatcaccgccttcgatcagtcaccgccgatccgtctagtagtgatggatagccttctccttgttgtcgatctcgaatccaaatccaataaacgtcgaagatctgccggatagaacaaagaagctgcttcaaaaatctccaagaaacaccagcgccagggaagcttcatctataacgacacccatattggtgaagtcgattctttgctcttcctgagcaaaaggaattgatgaagatattattccttgaacacaacggtgaaaactaagaggatttgtgaagaaaacggcgacatcgacagaaaacatggatggagatctaaaccagacagagccggttacaaaagctgacctaaagtcagattattcaattcgccgtagcgaaatttacagattccgattaacggaaaacaaaagaaaaaccaaatactaatctccgatggagatcggagaacggaggttctctctctctgaagagtacgagaggggtaaactgggccgcttatttcgcatgtacgttattgggcttctctttgtaattgccctaatggactgttttaatgaaagtatttggccgacaaaaaataatccaaaaactttaacgcttatacgttcactactcaatggaaagtatacacgtgttcgtacaagaatcccctagaatattttcgtcattccgagcccacagcttaaaagtccagaaacatccacacacgacacgcctttctagaaacgattctttttttaataccccacacaccctcagatctattatcaaccgttggattacgtggacaagtccaatgccactcgtatttttaaccattcctcacactcctcaacgtgatgtgaagatactttgctgtttcataacgtcataaagaacagtgacaggcgaaatttctcaagaaagcaaatcggaagaactcacaaaaaaaactaaggtaagagattattatcatcacttttgttcttccttcactcaaaactacgatcaaaatcgtgatttcatcgtctttggtgtagatg

SEQ ID NO: 16225 - DNA, 3003 bp, Unknown; identical to SEQ ID NO: 16224
  misc_feature (1)..( 3003): 2750-1469P.txt file - cDNA_ID_1383545; gDNA_ID_1620743; Annot_ID_166526

SEQ ID NO: 16226 - DNA, 3003 bp, Unknown
  misc_feature (1)..( 3003): 2750-1469P.txt file - cDNA_ID_1383728; gDNA_ID_1620721; Annot_ID_49202
atatcaatatgggtaataatgctaaatcccaatttattggcccaaataatgagacatgactcagcccagtaaagtatgcaaaatacatttaggtattgaacatatcggggggagatatgtttgtgaatgtccccaaagcatatcttatgaacgattccaaaatcatgtttggacattcattcacccgaataagttaatttagcaacacttttaaatctagactattacatcatttggagttttcgtagaaacttcaaattacgtgtcttaatattcctgtctcttactctacgtcacattcatgtctatggcggggctttgaatagttgttcgactaactatgagttttggttttaaggctttgtgtgaagacgtatttcttcattggattcaacatgtgtcaaggactgtttctatgttcttttgactattaccttctaatttaattataaaataatggaaccgaatttttgatttaagatttttctctgattggttgttactcctatcagatcacgtttacttggaaaacaaaacagatttttctcgattggtgtattttaagaaaatactcacagattatttagtgtcgtctcctcagcaattacatatccaaatattagtgccattatttcatttcttttgtggaaaagacttctctaaaatctctctttgttgtttttacttgcatcacacactttaagctataaagagaaacatatgcttatgtacaacaaacagtacctccaagaaacattaaacaagaggataatgttgatcgagtcctactgaatctggacatcgatgactttgcgttcgactttggtcttagggatagtgataaagaggactccgttcttgagctcagctttgatcttgtctttctcacagttgtctgggagctgaagtcgtgttccatatgagctaacgcttcttccagaccaagaatcatcactgtcttccttcttctgctctcctttgatcacaagtacgttatcttctacagagattttgacgtcttctttagagagaccaggcatgtcgaaacgcatcttgatctcgtgttcttcctctttgatgtcccacggtgcacgaatctctgacactccacttcctcctctgtttcttcctgagacaggcatagtgtcctcgaacatcctgtccatagtatctaacatttgtcgcatcgtcctcattggtgacaaaggatccaacaatcctgtggttagattaaaacagaacattgtttcagttcaaagcagaggaagagattttcgattgacaaaagctgagttcataaaaacagagcaatgttttaagtaataagcagaggatgtagtttttatttatacaagtgaagtccgtttagttagttgaacgtaccgaaaggagagacgtccatggttaagcgttgttgaggtcttttttcgacacttgatccttggttccctttttgttgtccttgctgaacaacatcaatggagttttctctctggtcttgagccctgatccggctagggatcttccgtgggaacgaaaccgagaacggtgtagcggacttcgatgagacagaaggagatggagcaagaggtgaacatagagccgatgcagcaaatgagagtgtagaagccatttgtttcgagtatgagccaaaaatatcgctgagtgaagattagaaaattctagttctgagtttgttgagtatctactacaattgtagaagtgagtgtatatatgtaggtgaggatgagaaggctctaagtgacaaaaggagaggtcttgaaggttgaagatttgatacgaagtttctcgactcgttttgttttctatctatctattttactatttgttaacctttgtgcgttttctcgtgttttctcatcttctcccgaaccatcttctttttttccttcttgccaatcagtgtttatttgtgatgaactaataaaaacaaaataaacgaaaaaaaaagactagatttctacaattagaaaaaccacgattacgaaaaaaccatgattagatgatatattgtttaaaaaaaataaaaaaatcgaagaaagcatatcatattgaaaaagagagagaaaaaaagcaactcaccaagtcaccattatgtgtgctaacttgcagaaacatatgagaaatggaatgcccaagtaaactaaaaatatatatctacgggagaaattagaaaattttgtctagtttgatcatatcagctacacgtatgtcatatacagtatcaaacaggcttattagcttacgtataaactatctatagcatgttgaattgttcaagtcgttttttttttttttttctttatcacagaattgttcaagtcgttttatataataattgttgtacataaattatacaaatagcatgacatgactctatattaattttgattggtataaaattatacaaaatttaagctctaatctattaatccgcaatccgatcaaatgttcaatgatccaaaagactttatgttttgtgtatagatttggttttagaaacattgaatgatttttctctatattttcaaaaggctgctagaataagatcagatgatgtaatagactaaaaaagaaaaaacaagacacacattgaactgatataagatgatgatgatgcaatagtacctacaaaatctagtggacgccgaacagtactttaattcggttttagaacattctgaattgaaggcctattaaaggcccttcttgacacaatctagttacacgacttacgacggtgcagctaaggctatttcggtaatttcagcttctcctttcctcgatctccaagtattcgagaaacccccaccaaggcaaaagctctgtcgtcgtccacaagaacaaccaaatttgtttccgtcttctgctaacatatcctctttttcatctgggaaccctaatttcttgactaacttagggttttatttatccatttgagatactctgtaattgaaaggttgaatttttagaagagacatg

SEQ ID NO: 16227 - DNA, 3003 bp, Unknown; identical to SEQ ID NO: 16226
  misc_feature (1)..( 3003): 2750-1469P.txt file - cDNA_ID_1383728; gDNA_ID_1620721; Annot_ID_165828

SEQ ID NO: 16228 - DNA, 3003 bp, Unknown; identical to SEQ ID NO: 16226
  misc_feature (1)..( 3003): 2750-1469P.txt file - cDNA_ID_1383728; gDNA_ID_2926191; Annot_ID_141052

SEQ ID NO: 16229 - DNA, 3003 bp, Unknown; identical to SEQ ID NO: 16226
  misc_feature (1)..( 3003): 2750-1469P.txt file - cDNA_ID_1383728; gDNA_ID_2926191; Annot_ID_201060

SEQ ID NO: 16230 - DNA, 3003 bp, Unknown
  misc_feature (1)..( 3003): 2750-1469P.txt file - cDNA_ID_1383836; gDNA_ID_2936565; Annot_ID_194605
ttgagtgtaacgcaaaactcatattaatctgtgaactgtagtattactatttacctgggaacatctaattaaccgtaccataaactcttactttgttgccatttacatgtagtttaaccagattgctcttgaaaataggaaaaactcatgtggttaaacggtccgactatttatgattaacaactgcgattaattatatcttaaggatattaattattattagctgtcataccatatagctaggtgtacaaaaagctttttgtccaaacaaaagctgttgatttcttactcgtcatttcctcatttagcactatcatcatcactcatcatcgattcatcatcttcttcaaattatatactcacgatatgtataatattattattcataagaatactcatcataaatagctttagaaaaccacattcatttaacctattttagaaagttaaaaatatttgatcctttcaaactttcccactgtatatactcccatattcaaccagctgtgtgtagggtttatcagttgtacatttaaaaacaaacaaataatctactcataaatatataaaatttcataaaaaaagaatttgttgtaacacattgattctccttgaaaggtttgtgtcggctgttccaatctatgacaaaaccgaaactcaaccaaaaacaaaaaaaaacattaaagaataaaagaaataaacgaaatatacagaaattgaaataagaataacatttattaagatggacacaaagccgttagcttcgttccgttaaggaacgtctctacgaaacaaattggcgtccaagtctttcgtttttggccactttcaccaacttcgcgtccgacacagctaccttatttatttcatttttcatcatcttctttcgaattctactttttctattatttattacacaacctccttagatcctttgggacatggaatcgacccatcataacttttcttttcattttattgttttgcgtataaatacattttcttcatgtaggtcaaatgaatcacttgattatttaagaaaatatgtttatttgttagtcaactaattggattttttcgttccaagtaaggaaattgggtagtcaccaactggttgttaaggtcctttaatccctcaattaagcaattgagcagacacaacacttcttcctcaaagcaacatttctggcaaatcaaaattctctaggcctagggatactttagtaattttaattactttatattcaatatattgatttgttgacaattctacttatatctttatttttaatatgtaaataataggaagatattgaaaaaatggagttaattagtttcctcttttgcacgtcacttaataagagtatgtgtgtccaatgtattacgcgaagaaacaagtatataacgtataaacagtaggagacctcaaaagatgtttaattttaattttgatcacaatctttttagagagttccgtcgttataataatttaacaattatacatcaaaacatcatagattagttatgaagtatcatgtcacgtaacacatgtttctcgttcgcttataaccagggatctgcaattatgtaaagaaattaataaaagcatctgttggttcagactaacccatgattttatcatcacaaccacaactaatttgagattgcttgagttaatttaatctaacaaagctttggtggaaaattttaatagtaaaaaatttcaacggttgcttgaatttatgtccaagctattaattaaactttataaaaacatagaatacgaaaactcaactcttttcttcattttaaaaaacatactttatttttaattatatttatttgaatataagcaccaagtcaagtcaatgacaacactgcacagtattccttctggttccaataatattcttttgttttatcagataacttgaaatataaatgcatataaaaagtcgcatttgtataaatattctccattatctaacaataatcctatcagagaaaaggaaaaaaaatatgaaaatttccgctcacgcgtgttattctctaaatggttggcacagaaaaaaaaccaacaaaaaattattaattttaatatagaagcttcggttggaatagaaaaacaaacaaaaaagaattactggtagagaatagagattgtcaaatttctccataggttagtgatacactgatattttattaaacattaattaaaaaatctgggtttgttgtcgaggttccaatgataagatggtttggttctgttctttgttagtgaatgccaaataaagttttaaaatagtatcggaatttaataaaaatcgtctcttgggattgggtgtcttctctttctttctctctctttttgtcatcgactgttcgaagttcttcttcttctccctttttatctctctgttccctgattcagccacatccacaatctctctttctcttttgtatagtttatcatctagctctttctcaggtttcatttctttaactataataattcgattgttcttattagtagcttcttgattcaaagctatatgattgacttgttgtactctgtttctctttttacaaaaagatttcctttttcgaattttatcatcatcttcgtctctgttaaattcttacaaaagtatgaaatcatcagaacttaaaaaaaattaactttatatctttcatgatttcaaacatcatcctctgtttttgtttgcgtcactgaattgaagtggaaactttacctagggttttgatatcttcttgacctaaattgagtatttcatatttttttcatttcttgaattcatctgtaattgcggcgtatatagagattaagatgttttaacctctttaaagaattgttcttttatttatccagtttcagtttcaaactcacacgtctctctctctctctttctcttttttcagacaaaacatcaatcggatgaaactcacttaaacaacaaaacactttcgatttattatccaatg

SEQ ID NO: 16231 - DNA, 3003 bp, Unknown
  misc_feature (1)..( 3003): 2750-1469P.txt file - cDNA_ID_1383941; gDNA_ID_1972120; Annot_ID_178930
catgcgacggtaacggagaaggtatcaacgagaacgtgtccgccgtgatctcagtcaatgttttggtgtgataatagaaaaaggagccgtttatttgcgagtgggatccacgcgcctggtcgttgggcaaatatggcgggtaagttttggcggggaaataaagaagaagaagccttatagagtagttaccgtgactttctcgaaacgtggaccagaccaaaccgtcgcacgccagatttgtcggaaggtaattatagtttacttacttggaaaacttttgcactaataaaattaaatcgtgtaaaaatttgttaacattcgtaaaataggaatattaatttatccaaatgaaaaagagggaatataatttttgaaaaagaaaaagcaaaaggttttctagtggttgcaaccacacagacgcaatcaatttattattatgtgtactatagttttcttttgtaacgttacacgatatccaattaatatttagttgaggatttgttatgcttatagcttttgactatgtccattgtccagtgcataacctttgcttttctttcaagttgttaacagcgattctctaggctgaaaaaaccctctaatttgcttactaatttcaatattgacggtctactagtatattagtatgtaagatccgttgaaaattatgtaacaaagaaattgaacctgaaccaccaaaattaaatgttttgtatgattggttgtgagattttcggctaaactgatcgattcagcttgacaagtctgaaaagtagaagccactcatgcaggttttgatatgtttcttgaagggtgttgacgtaaagaaaataaaccatggatgtttggtatatgtaagaagtatattttgtcttcattttaatggaagaattgatctttcctatattcataggagccacctttttggtacgagtttgagtttcttgttttatgagcccatgtgttgatcgtccaattcttgttgtatgaaaagaagttggtgtcggtcaattaaatctgagagactttacagaaatgtgtgtttcgtctagctccaggccggaactattcttgcatagtggaagaaacaaatcctcgtattattaagtctccttgttcccgttattaataagtttcatgtggtatatatcatctcaatattattagaacaatagtataatataactaagaaaatctttccatatgttttatcttgatttgttcagttgttcatattcatgaagattgtatactccactttttatccttgtgatggtagtgtccattttgcctctcaaatatttgaatctctgcttctcacgatttgaatgggtactgtaattttgatttgatgcatgaagatcaaaagctctatattttctcttgattcagtctaataatgctgcatgcaggcaaatactgatgctactcatgtggatagtaagatttttattaattatagcggtcttaactagtttttgaaatgtatcactttaatgtttttttacagttttggaataaaatccaaaattgaaagaacaactaatagcagcaaaccactaacgtgatttagtgatgctgcgtaagtaaattattctttggtaatctcattgtttgcttttagtaccctaaccatatctaaaaccacttggttgttcaagatgtggacgatcatgatgactcattcttgacatgtcttaacgattacttttgtccacaaccacaaaacaaaatccttatattgatattaaaaaataacattggcaacttcatttgaaatctcaattaggcaatgatgcaaaaccaaattgtatttgttaaagaaactttatttttgtataacatttgagagcagttactgtaattgcacaagagttgagacctggtaggtcgacttaagggccattcaagtcacacacagactcgcaagtcacaagaaccacaccctaatcttctaaatttgcggagagcctcatagtttaactttcaagttgcctctatacacaaaactttgtcgtgtattgatgattcaagtggcatttggttggccacataattcaaaaggtatataccggggaccagtcacttttgtgatatgtttgaaggcagatattcatcggggtttggcactctattccaaacaaccggtctgaggaaattatatgtcttatagaaaacgtagttagataagatgtaataggtttatgtcttttcacgtcatatttttagtattcgatttaacataacattttacaatgacaataaatattaatttttaaatttaataaatttataccagatgctattatatgtaaccaaatcacccaattcggtttggtttagactactgtcagttttcttgcaataatttctcgtaggaccgacaaaaaaaaatgaatttaagttttaaatttggttggttcaaaacttaatatcaatttttatggtttagaagaagaattatagctgccaaaagtattttgtccggtaattactaattactctttgtaatctcatttaacttgcccgtttaaataaacagacaaaattaaagaaccctaattaaagtttggcagaacctatgtcccagaaagtaagaaaaaaacaaagtaaactgagaagtcatagtcaaaagacaagttagttccaaccaaaataaaataaaatgtgatatcaagttgaaaaagtgacggatagagaatctatcctttggatcctctcctctatttttagcccttcacttggatctctcttggataactcattaaatgacactatccaatataaccacatgtgtatctgcgtatgtatatgcatgtgtatttatatttagaagcttcctagttttgtctaagaaaatatcttcttgttttgttcctttcagcgctataactcataattctcttccaaagttcttggatttgttccccaaatcaactggagatctaagaagaagaagaagaagagcgaagatcaaaggataaggaagaagagaggaaaatg

SEQ ID NO: 16232 - DNA, 3 bp, Unknown
  misc_feature (1)..( 3): 2750-1469P.txt file - cDNA_ID_1383985; gDNA_ID_1592314; Annot_ID_152243
cgg

SEQ ID NO: 16233 - DNA, 3000 bp, Unknown; identical to SEQ ID NO: 4799
  misc_feature (1)..( 3000): 2750-1469P.txt file - cDNA_ID_1384329; gDNA_ID_1620733; Annot_ID_49426

SEQ ID NO: 16234 - DNA, 3000 bp, Unknown; identical to SEQ ID NO: 4810
  misc_feature (1)..( 3000): 2750-1469P.txt file - cDNA_ID_1384329; gDNA_ID_1620733; Annot_ID_166141

SEQ ID NO: 16235 - DNA, 3000 bp, Unknown; identical to SEQ ID NO: 4799
  misc_feature (1)..( 3000): 2750-1469P.txt file - cDNA_ID_1384329; gDNA_ID_2926179; Annot_ID_140454

SEQ ID NO: 16236 - DNA, 3000 bp, Unknown; identical to SEQ ID NO: 4810
  misc_feature (1)..( 3000): 2750-1469P.txt file - cDNA_ID_1384329; gDNA_ID_2926179; Annot_ID_200055

SEQ ID NO: 16237 - DNA, 3003 bp, Unknown
  misc_feature (1)..( 3003): 2750-1469P.txt file - cDNA_ID_1384565; gDNA_ID_1620409; Annot_ID_156226
tgcaaaagaccgtgccaggaaccgcacctgataaaagaaagtgaagcgaaatcataaacatacatttaaagatgtaatttcggaaattcagccacaaacatgaaatgtctatataggcatttttgagaacatgccttcaagaattactaagttgttgaaactaatagccaggaaccaaaataaaaaatggtgaagagagtaatgtacctgatcaccacaaaagttttctaaaaacttccgtgtgacaaagacttctccagcagcttgctggtaactctttggagcaaccctttgaattaacctcgcgaagaaatcagcaacctaatagtgtatacacgcatacaacagtagctcagtatgcatgttattcagaaaacaaaaccttttgaattcaagactcgagattcaacaaaaaaagtatgtgttaccttaggtaaggcgagcatatgagctgcctttgtcgagatatctccatataaaaggtatctgtagaaaacaagaccattactatccttcatatatgaaacaaaatgggaaatgacaaaacaagaagaaatagcaccaaacctcaaccaaatcatacctctctggagatttgaaagggttatggagaccatgtttcgggcactgggataagctgtccacaaatggctacaacatagaacagaggaaaactgaaagttagaattgacacggataaacaacattgtgatacgatcaacggtttttgataggctcgtacctgagttcctgattcatccacttccgcaactttgataaacggttctccatttagaggatctagaagcgtgttatgatttgacgatcctatccactttccctgcactatagacataacaatgaaagtagaactcagagacttcacaacagcatttaaccaacaagctattactcatttccatagcgtcaacgcacaatcagtgagaagtaaagacataccaaagctctgtacttcagcaggatgagcaccagagagctcctcggcatctacggtagcaaaaggtatggaatgattcaatctgcaagatccataaacacaaaaattaaggcaaaggaacactcttttaaatggatcacattctcagacatcaaagagtaatcagaacacaaatacataaagtaccatttcaaactctaatcagctaacactctcttcattacatagagactgagcagatgcggctactcgatgatctaaatctcaaatttttaatacaccaacttgctaaagttttctcttttatttatttatatatatatacaaatggaaagtctattactttaggcaaaaacatgcaaccccaaaagacgaagagcaatgtttaacacaaaacaagaaataatttggtgagatcaggacgtttgaaaaacctggagagagtcaaagaagcaagcgaggtggatgatttgtcacagagagacttagctctcagtgctcggctcgcaaaaactctatacattgcgtaagatccacaagtaacggagaaagatgagaatcagacgattggatgagaggattcaagaagattggtgataaaatagcgaattctcgagtgatttgtgtttagcagcttattaaagaattaaatgtttttcccctgattgacgagaaatacattaatgatttaaagatatttacagataatttcttatttctaggttattatcttttttaccccatagtttctaatggcttcttataaaccctgatgtgatgagtcatgactcatgaggaagaagaagttgagcaaaaaataaaaataatagtaaatctcttttaaagacctcctctaatcaattcgactaatggaatagtaattagttaaatatcaagggaaactaataatgaaaattggtacaaaaaaaaaaagagatttatgattattatctactgttttactcttttgaaatttaaattggaaaatcaatagtattagtgatatttgacatcaaatccagggatcaaccaaggaattttgtaagatgaacacagatgtcaattacaaaatagataaataaatcttgatagataaataagtattaaaatggtgatagcttgctgagtcacgtccgcttgggccattggcccattgagtaatagacgtatacgtttgtcttttacacgaaccgacaaataaaaaataataatattaaaattgtattaaaattataaaagtcttttttcgtctttggaagaaaatatatatatgtttttttcttctggcaagttttgtattttattttcttaaaatagtatatgattttttcattttaaactttctttgtgttttcttcttctcttcctttatttggtgaagaaaaaggaaagaaaaatctcaactttgattctctctccctctatatatactttatttattctccactcataatagtttcatcatctctttcggtctatgaaaaacattggaaaaaccctaattcctagtgttgcgaatcacttttcattgcagctttgaacttcaggtaattttaggttaatcgagctttttcatttgatgcatgacatcggaagatcaaatctttcataggtgattgtataatctaatcctaaggctcgttgaaatcgataattgtactcttgatctacttaaattcagaatttaaattcagaatttatacacagctactatcgttgagtcgaacttaatttgctagttgaaataatccaagcttcaagctttcttgtctagaagtttggtgattcttgttctctgaccttttgggctatatggttgttgaagcttaagtctttgttaaactatgatgataggttatagaaatgtagatcttggtctctgcttctactttttttgggtctgaaaaaaaattgaaactttaatcagaaatttaaagcctagttcatgcaattgctcttactttgtgacttatgaaatgagtttgtaagagtaaagttgaaatctttcatatttggatgcagtctgtgaatttccaacagcaatg

SEQ ID NO: 16238 - DNA, 3003 bp, Unknown
  misc_feature (1)..( 3003): 2750-1469P.txt file - cDNA_ID_1386598; gDNA_ID_1620704; Annot_ID_48826
gagcaggattttactttccctttacatttttttcagccaattcgtaaacagcttttctctgatttatcttcacaggatttattcactcgagtggacaacatgtctgcggttacaaagcaaccaacttgtaaggaggaaagactgaatgctcttcaggtgccttaactacgtcgattttagttttctttctatttaatatctgatgacatttcattgaggatgtttttgaatctccttgtttttttgtctttgatagcttttattgttaccttataaaacagatagacaaattttgtggaaatgtctgctaggatgtcatagactgagaaatttcttatgaagaaaaatattttagtgagtaaaatttctgaggttgtcctgattactcatggtttcttgattctttcaggccttactatcttgtccgacgggctctattcgcactcaaactccacctgctgacataggggaagctcaagagacctttccacttgtagtggacaaagacacacttcctgtactttttaatcccttaagctttcatttttttaggatggttattaacaagtcaactaactctgattagatcattgtaagcatacgtaggttttgaatagatttagatacaatgaccttaagttcttaactgatttagctccactgaggactcttactaccttgttcttatatgttgtctgctgtccttgaggtttataaagtttgagatttgcattatgctcagggcgtttttcattgtggatttcattccaagaaatcgtatggagcaacttcttacctgatccttcatcgtgagggaaatatacttgttgataggtatatacccttgggaggaggcatcatgaattcttattttctttgttgtttagtatcttatacattgttgatgcaatgtatttcttgatatacttcgttgtggctattaactctacacaactgattaaaccaaggttttgctgtttgctgcagtcctaggtacgtggagaaacttgctggaaagatcgagatgaagggtggtgttcgctacatgtttttgacacacaggtagaattgataacacctaaaggagaaaatccgtgttttctcttgtaatctctgttaatcaggataagcgatttcattgttcagggatgatgttgcagatcacaagaaatgggcagacagattcaagtctaccagaattctgcattctgatgatgtatgtccttgaatttttcacacctctctgcacattcttgataggttttttcaacatctagatttcgtgaaaaatgaaaaagcttgcttacatagttacaagaaccttgggctgcttatatgctctgtagaaaatagaaaaagattatgaggttggataaaagtaaaaagtaaactagccacgcaaacaattttgttactaaacccatctctgatcgaccattaagggaattttttttttgttaggttgaaccttcgacctctgatgtggagttaaagctggaaggaagtggaccatggagtatctatgaagatgtcgaacttatacacactcctggtcattcagaagtaagtttgtccaactgcaagaacatacataaaaacaaatgttcaatttttgttaaaaagaattccatcatgatcttgggataagagcttcgtacaatttgcagggatcagtgtgcatgttccataagtccctcaaggcattattcactggcgaccatgtaataatgaccgaatctggattgagcattttagagcagtacaatcacggttcaggtaaagactcatctgttgaatgtctttgggttaatgtttttgaatattcattcaagaacgtagaaagattgatctaaatgttttttttttgtgtctctggcagtgcctctccagctcgagaacgtagaaaaattgatcaacctggatttcaattggctaataccgggttagtgcactttggctatatatatctgctttactactgaaatggacattttggatgttgatggcggttttgtatatcaggacatggaagaagagtacatttcaaagatggagacgagaaggcgaagaatctggaagcacttgttcagaagcacagagagaaacaacttgtttcctttagcaaatccgggaaagcttaagatatgtatgctgattctaaaccggttaatcaaactaaaccagaccgaatgtctctacggcctgactggtctatgtgtcagttagttcccacgcgagtgatgtatttatttctacgtaacattgtgaacctgcttaaacgcttactagattgaaacgaagaccgtgagtaataaagtctcctctttcctagtgcaagtatgtcagctaaagtgttgctgtgtttttttacgatatttttcatgttattcggaatgtcttaaatcacaaaaaatattcgacttttcacaagcatcggatgcatagttgtttatttgataagggtatctcccatagctagttaaaaatgttatttaatatattcgttttggtaccatatgctacaataatcatattatgcagagatcatcgaataacatcacataaggtaagaaagttcatgtaaaaagaaaatgcactaataatcattcacaaacttagcagtagattagcgatcgaaaattgatgtcaccaaatttaacaatctttaaaatgacatcttttaattaacgacgttcattcggagacaaaatgaatttcatcaaaaatgagtcactaaactatttttcaaccactccactaaaaaagttaaacctcattcaaaaactgccacgaaacattcccaccaacaaaagataacaaataatatagactccctcgccttgttgcttcccactacaaaagtaacaagaaaaattgttacaatactaagcatagtattaacgttatgctatatatacaaatctctcgtcggaccaaatattcgcattcatagatttcattacaaattaacgaactattcacagaaagaaataaaacgagatg

SEQ ID NO: 16239 - DNA, 3003 bp, Unknown; identical to SEQ ID NO: 16238
  misc_feature (1)..( 3003): 2750-1469P.txt file - cDNA_ID_1386598; gDNA_ID_1620704; Annot_ID_165181

SEQ ID NO: 16240 - DNA, 3003 bp, Unknown; identical to SEQ ID NO: 16238
  misc_feature (1)..( 3003): 2750-1469P.txt file - cDNA_ID_1386598; gDNA_ID_2926204; Annot_ID_141663

SEQ ID NO: 16241 - DNA, 3003 bp, Unknown; identical to SEQ ID NO: 16238
  misc_feature (1)..( 3003): 2750-1469P.txt file - cDNA_ID_1386598; gDNA_ID_2926204; Annot_ID_202074

SEQ ID NO: 16242 - DNA, 3003 bp, Unknown
  misc_feature (1)..( 3003): 2750-1469P.txt file - cDNA_ID_1387356; gDNA_ID_1620775; Annot_ID_50264
acggcgatcaaactcaatcttcttcttattcggttagggctcgtttcgagaaaatgataagaactgctcaagataaagtctgtgaagccattgaagcagtcgaagaaggtcctaaattcaaggaagatgtttggtctcgacccggtggaggtggtggaatcagtcgtattttgcaagacggaaatgtatgggagaaagctggagttaatgtctctgtgatttatggtgttatgcctcctgaagcttatagagctgctaaagctgccacgtctgagcaaaaacctggtccgattccgttctttgccgctggaaccagctcggtgagttctctctctctctctctatcagtcgacattgctgttgatatggtctctgagttctttgattgagcttgatcctacattctaggttttgcatcctcagaacccttttgctccgactctgcatttcaattaccgctatttcgagaccgatgctccaaagggtaagaccttaatcctctttgagaagtgtaaagttccaattttttggttggatgaagcatttgatttcatcacttgtagatgttcctggagctccgaggcaatggtggttcggtggtgggactgacttcacacctgcttacatctttgaagaagacgtcaagcactttcattcggtcgttaaacctgatccattgttctgaaagtttgaagctttgtgattatggagatgctgattgaaatatctttctttgtgtaggtttaaaagcaagcctgcgataaatttgatccgtcgttctacccttggtttaagaaatggtgtgatgactacttttacattaaggtctgcagttcctttaacgctattctgattgtttggtgagatcttagcactttgtggaactaaaagaccttagttttagagtcatgtatgtgcaagaatagatttagagcctcaaggttttgtttaggttgatacagtgataagttgtcgcctaggatttgaaaacactaaaaactttacggtcttgcctgcagcaccgtgatgagaggcgagggcttggagggatattttttgatgatttgaatgactatgatcaagagatgcttctgtcattcgccactggtagtgaccaagatataacttgtgacattttgttttaagaaacttcctagttgacttatttgaatactgagatgaattttgcagaatgtgcaagctcagtgataccagcttctatacccatagtagagaaacgtaaagacacaccatttaacgagcaacacaaggcatggcaacagctgcgaaggggcagatatgttgaattcaacttcgtaattggatactactagctttgtttttctttctgtataaatatctcttgaaacctcgtctcatgttttgttgctgatggtaaaaataaaggtgtatgaccgcggaacaacatttggtctgaagactggaggacgaatagagagtatccttgtctctcttccgctatctgcgagatgagaatatgaccatgtaaagtttcttgattcaagaaactaaatcttgtttcatcttagctaatgaaacttaactactgatggtgtttgtctcttgttgcggatgcagaaacctgaagaaggaactgaggaatggaaactattagatgcttgtatcaatccaaaagagtggctttagttaattaattgtggttatttccccaattagctcttttattagttttgtctttaaaagccttaaaagagtaaagagtctaatgaaaagtgagtgagataaagaaattgtaatttggcgtcatctcatcatgagtcactgacaaacaaagatcatgatggttgatgatggagtatatagtaccaatcgtgatgatgatgataaaagtaattaacttttaattttttttactgacacagtaaaaataagagccgttggctcaaatagccgagcctctcggtgcacgcacgcatgccacttgctcggtaactgttcactagacagaacacaacaacactcaaatagagtgataacattgaatctgatgatttggtttagtataaaaatcgtttccaagtttcaacgagtgggacttgtgttaggttaaacaatttcggattaagtaaacgtcactgtctcatttgtcttgatacaagaaacgcccgtgatattttttcttcgatgtcgtccaatggggacaaagaaacaatttagtccccggatatacacacacacacacaaataatacatgggtgttgttattatggcttaccttacacaacacaacttgccaatgtttttaaatttactaaaaaccaaagccagaagatattttattgccacaaattgacgtcacacctgcccatatctaatccatgtctgcaacacaaaaaacaaaaaattgaattcccccaaaaagtgaggagagagatgtaaagactgtgtaccaattcaatatctttttgagcagagtaaaaaaaaaagtttaaaaatttgagcttctgacacaaaaggagccaaatgtaatagctggatccaatccaatgcaatgaaaacatcttagctgtaaaatggtccaatctctctcttttctttctacattattacttccacagaatcaatttatctctcgaaaagcaataaagtctctatatttgtgctcaaagatagacagagaagcataaatacttgtcctctgtgtagtacaaaagtggagccccactgagtgatgccctcacagtaacggctacatttttcttttatctctctgtctctctcttcttttgagtgattttttatgaagatgggttcttttgtccacttattactgtcctgaatcacacgtcgaatcctacgtggcatctctctccattgtatgccagctcactctcactcactcactcacctcccgcctttataaagccttacctctctctcttgtctccttcattgagtcaagtgctcgagactgtagagtgaagtttgatttatttagagagataagttaaaaaaaaaatg

SEQ ID NO: 16243 - DNA, 3003 bp, Unknown; identical to SEQ ID NO: 16242
  misc_feature (1)..( 3003): 2750-1469P.txt file - cDNA_ID_1387356; gDNA_ID_1620775; Annot_ID_167676

SEQ ID NO: 16244 - DNA, 3003 bp, Unknown; identical to SEQ ID NO: 16242
  misc_feature (1)..( 3003): 2750-1469P.txt file - cDNA_ID_1387356; gDNA_ID_2926205; Annot_ID_141690

SEQ ID NO: 16245 - DNA, 3003 bp, Unknown; identical to SEQ ID NO: 16242
  misc_feature (1)..( 3003): 2750-1469P.txt file - cDNA_ID_1387356; gDNA_ID_2926205; Annot_ID_202135

SEQ ID NO: 16246 - DNA, 3003 bp, Unknown
  misc_feature (1)..( 3003): 2750-1469P.txt file - cDNA_ID_1387372; gDNA_ID_2214568; Annot_ID_186074
atcattttgattcaatcacagagctggtaaaagaagttgcaagtagtgattaagaacaatcgccaaatgatcaagtaattcttctctctatcacacggcctcatgtacacaaatgaagagcatagtctatatgcatgtaggttcatatccaatcttcacttcgttacaactgatgatagtaggacatgccttgtaaacttgctgatcatgttatattttgctgtgtgaatgaactatggctagtttcaaaattgtttgtctaacgtgaaattctctaaaacggtgcaggggaaattagagatcagtgagttgtttatagttgagctgatcgacaactatttcgggtttactctcaatttcggttatgttagtttgaacgtttggtttattgtttccggtttagttggttgtatttaaagatttctctgttagatgttgagaacacttgaatgaaggaaaaatttgtccacatcctgttgttattttcgattcactttcggaatttcatagctaatttattctcatttaatacaaaatccttaaattaaatttgtacagtacctttgttttgggtatagacaattacattttaagtcagttgatctgtatcaaatactacacttacaaaatcacaaagtaaaggcagcaattaattttgctttgaattgaaaagctttgagagagtaatcaaatgcttaaatcacgaaaacttacaaatttcaaaattttgtctctccataaattctcttaataaaggctgttgtttttccaatttgaaaattctatttttcaaaatcaagaacaggctatggaatttcaagaagctggttcatcatcaagtagaatcatcttcctctgtttcctctcctatctaaaatctctttagtcttcagaaactgattatactttgtgcagcagcaagagtaaagattgactttgtgcagccgatggcacacaaagagagcaaatggaaccatcgcaaaagcttggcctgggacactgctttttccaccaaccctggtttcttcctatttcctatagattggttttgtgtagaaacaaaatgttaaattatatgattccaatgattttaccactttggtttgtaggagtgttagatcctgaagaattgtttgggagcttaaagattgacgagaatgagattgaagttgaagtaaatcataatcacacacttccttcgaaaaccgatgctcgtccaagttttgcttgggacaatgctttttttaccgatccaggtctcatctttttacttcaaagttctttaccctacttgattagtcaattatttcacactattccactattcctctcatatataacaatcaaaccttataatttagctttgactctgtatattcaaggctgacattgtctatatttatgctaaggtgttcttgatgctgaggagttgtgtcttgtgaacaatggtttcaccagtaacacgcagcttcgtaagtctgctgatacgacgacaactcaaggaagcagattttctgtggccagcattgagtttgatctgttccacgacctgagagcctctttacgtaattcaccgaatgtgaagcagacagtaactcaagagacccatcgtaagttaccagatggtataaaggtaaacggaaaacctcagaaactgtttcaatcatttgctttcatctaaattttacttattaattggttttgtttgtcaagaggactaaaggatacaaacagaaagttcaacctttgagtctcattcctcaaccaaaagtgtcttcttcttcttcttcttctttttctttatcatccatctccaaatctttgactcctagtcaagctatacgcgagaagaaatgtgttgcaagtgaactcggtgaggacatgattgatgatacatcttattctttcttcaaaacgagaagaaaatcaaaacatctttaaaagttgcacatctttgttttattttgaagagaggaataaggaaaaacacaagaatcatggttttgaagaacaatctggatcgaaatctaacataaggtcatcgtattcaagttacgcagtcaaggacttgacatcatcctactctggtctgaggttaccacttccaaagatgggatttttcgactcggtatgcttcctaagaaattcgttttattgaacctagcaaatatcttgtaatgtaagattcctgagatgatgaagaaaaaacaaacttttgttacagcaggagaacggagagaaagaaaacagagaaccaaatgctcttgaagcaaacagaagaagaagacacaaatccaaacttgagacttcttctacaccagaaaaccgcagcattctgggacaacgcaaaacacgaaagtgaaacgggcaatgatatatatgtcttgggtgcgttacaaggcatcgtttgcatgttgagttggataagtcaactgtcttcttttcttttggttgtagtagctgccttttttttcctttgttgctttaagaaatagcccgaaaaaaagaatgttctacatttcggagcagaaaactaaccgaatgagtttttggtcggatcatcggatcgatcagatatattttgagttacgaactgttataaaaaaagccataattttgtgttgagtttgcaaaataccttataacttgttatttgagattgcacctccatatatattaattcgtaagagtatttattaagtaagctttagtataaatccttttttcctttaaagtaagttaatgttctactaaataatagtaaagttgaagaaccgctccgttttacaccatgcacgtgttatctaacaaagaaaatatggtacacctaatggctaatgcaaaggacaacacaatgaaactaacttgactctgtgttatacaaacccatagacatctgcatacatcctagtatttgtataaattggactcaaattcctgaggacaatcatagcaaacaatcacatcatcgcaatatacataaacaaaagaggaagaaaaatg

SEQ ID NO: 16247 - DNA, 3000 bp, Unknown
  misc_feature (1)..( 3000): 2750-1469P.txt file - cDNA_ID_1387497; gDNA_ID_2684225; Annot_ID_191938
aactaatgtatgtaagtaaaagcataaataaaggagaataagtatgcatcatatttgattaaacaaatactgaaagtgttgctgttgataaaaataaaaataaaatactgaaagtgataaacaaccattttggttttaaacagtattttgctctaattataaagtaaaaacatatatttatttccatttgactcctatataacaataaacatgtgaatgccagattagactaaagaagctgtgaggatcattatacatcctagctagcctcataggcctactacacttattattgagggtcaactttgggttgtttgattaacaaaatgtatggcatctttttaaacaaatatatatttacattcacttatcttcttacaatgtgatttgtcccttttaaggaatcttgtcccccataaatcatttgggacaaaagaataaatgaaaaatttctcacatttaaacaaaaatgttaacactaacatatatttaaaatcatattcttattacattatttatttttaaaatcatactatttaaaaatgtttttcaatataaatatattcttattacattatttattaataaaaccatactacttttttttcttttagtatatgatctctttagtttttacttttttgtcttttatgttttgtttaattaataatctcgagttttatactaaactgaaagtgcacatgaatatgatatgtattaagttggatattgaatcccacaaaatcaaaagatttgatgaactaaaaaagttcacgcagcaaatttgtttttcatttgctgaagtttttattgactaattaattagttaactaaaacctgaaagaaaagaaaaaacggaggtaatagtttagggtactgacgtgtgagcttacgcaattttcgaattaggaagtgagctagattctagggctgtgatacgtgaatgtatatactttctgtttcgtgttcaagtcatattttagtttttgttttggtaaaagaagtcatattttagctgtgaaattacaaatatatttttgtgataacattataaatatatattaacatgtggaaccctaattctcattaaactgctcacgttaaagcacatgcagtacaccaaccatttaaattgttttgcttagcacgattttgtttcattcatgattcaaaacttcaatttttcttcgtctgtttttatataaatattcgaaacatttatagaatttttttgtttttaatttgtaatttggatgtggtcaaaaatcatacttggatctatattgatgttatacatttcacgacttcaaaagaaactattgctcgctctatttctgtcattaattaactcataacttaacttacacaaaaattgagatgatgacaatcatgaaactatttaaaaagaaaaagaccagaccggccaatgttagactaggattagtggctattattctagtgacaggggtgcgatgagtaccattgtttttgaacatgtctctttgtcttcgcgatgaaccaagcggtcccaaaagtattggcaatagatagagcctcaatacctttaattaattataaatttccctgaatttatattctccaaaaatgaatgttatttttttcatcaatcaaaaaaagttgttgggttttagtccaccaaaaagatgtttgagtttcgattgtttgtgttcaaaaaatcaaattacataacaaaagccagaacttttttttatatcaaaaagtaaagaaaaaataagaaaaacaaaaaatcataactttttttattgaggtgataaggaatgtaatttattgacgtcttgtgaacccgatataaatctaaaacttgaagtagctaatgaaacataacaggaaatgttggagtggtatagaaattacctttaatttacctttaattgtatagaaattaaagataaaataaaaagataaatctatgaaacaattattttgtctatataccaaaagggttagttttcttgtgtttagttttttggaatggaaatatattatttaaattggaatatttttttggttgaacacaattggaatatgtaaaggttgatttcatgtacttgaaagattatggtcagaagccttctcacacggttaagaaaaataaaaaaaatatgttgtctatttatttggttcaaattaagtttttgtgtgggctttgtgggctagctatttagtatgggcctagatctggacttctgtaaatcttaggactacacttaactctattactctcatagtatgccactatgtggggtctatggccactattgctatcaattattacatatttacattacttacgtacattttcgtatttctaatgtaatttttttgtttagaaacttatataagtgggaagttttagagctaaatctgaattttctcaactggggagaaaaactcccttgtctcatcatcccattccactcaccacgaaaactcaatttgttacattaacattatgtgtaaccttttcgagaatcgcgtttcacaaaaatatctattatttgaccagagtcaacggttacgtgaatctgattccaattgcgttccaacttccaagttccaacacttcacaaacaaaaacaaatatcttccctcaaatctcaatcttcaaaaaaaaaacaaatatctttcacaaaatatgatgacgtggaagaagcgagtggttgagtaggctagatattttctcggaatatcccctggtgacgtgttacaatcgaacaagagtagacttactttttttaaacatacccctgatatatccttttaattacgaaaattgccaccaactcctggcgcgaagacttcttgcctcgtcttaaatataaagggtatattcgtcaataagtcaccaactaagccaagatattttaaaagtttaaacagacacaaaaagaaataaaatatcataaggctgagagcttatcagagaagaagaagatatttctgtaagcgagaaaaatg

SEQ ID NO: 16248 - DNA, 3000 bp, Unknown; identical to SEQ ID NO: 16247
  misc_feature (1)..( 3000): 2750-1469P.txt file - cDNA_ID_1387497; gDNA_ID_2684225; Annot_ID_137551

SEQ ID NO: 16249 - DNA, 133 bp, Unknown; identical to SEQ ID NO: 31
  misc_feature (1)..( 133): 2750-1469P.txt file - cDNA_ID_1387605; gDNA_ID_1201; Annot_ID_144877
  misc_feature (16)..(16): n is a, c, g, or t
  misc_feature (26)..(26): n is a, c, g, or t
  misc_feature (41)..(41): n is a, c, g, or t
  misc_feature (60)..(60): n is a, c, g, or t
  misc_feature (67)..(67): n is a, c, g, or t
  misc_feature (74)..(74): n is a, c, g, or t
  misc_feature (86)..(86): n is a, c, g, or t
  misc_feature (111)..(111): n is a, c, g, or t

SEQ ID NO: 16250 - DNA, 3003 bp, Unknown
  misc_feature (1)..( 3003): 2750-1469P.txt file - cDNA_ID_1387628; gDNA_ID_2926150; Annot_ID_198025
tactcaaataaagagtgtacaaatcaagacatgtcactccaacatgatcaaacacatttacacagtttctagaaatccaaactaaaaaaaaaactatcggatagagtctcacagcaacagtgcttcatcaaattcaccaggcagatttggcagcttcttgcaaacgtctttctcgctcaaggatataagaaacttcctcgtgtatgtaattcttggtttcctgaaaacaattgcaactgcagctgagaaatgtacaataagcagcaaaacagagacatggattttacaaaaaacagaaaaaacatacttttccgaatcatcattggtttcgacaagttgatccatggcaaattgttgttcatttgctatactcatcatacaatgcacaaaaatcttagctgattgaggccaaaaaacaccagtatctcttcttaacgccttaatcaagtaactctacagtagttgtctatagtaaataccgtgaaatatgattcttcgatattacagtaaccaccaataatatctcaactagcaaaacttaaaccacgattcaccaccacgcaacttcatcaggatctagctatatgtacagtgaaagatttcagagaagagaaattacagctcaaagccaaagaaaactagctcatcctaaactcacaaggctttaatctctcgtatcggattctctcacccaaccaaaataaataaaaacctcaaatcgggaaaagatgaaaacagattataacatttctgcagtaatctaaggtcttcgacagctagggtttttagcgctaatggggaattacatggattccagaatccatcagaaaaggataattagaaagaaaaaaaagtaagagtcgccgattctagaagaacaaaaggagaacggagaaaccaattagggtttcgatctgcagaaagataattttgctgttgctgtttgttttgatcgattgatgatgaaaaagagaagatcgaaaccaagtcttacaaagaagagcgatttctctcaaaggggaaggtaaaattgacaaatccacgcgctagcttttcacgttcactcacgcgctacattttgtataatccacaaaactttcaataaattacagaaaaaccttgataaatttttaccataacaacaagatccctgatattattttcaaattgactcataaagcattacaaaaggagatggtttttctgaaacatgaaatggttggttacagaagacgatacatacaataggcagctatgttcatcatctctttccttttcctttagcatcaaagtgatgagactttagtttcttcttccgcactatcgcgcctgtgctgccaccacctccttccctgaaaggcattcccattagagccaatagtttctgtccttcttgatcgcttttagccgttgtgctgatgcatacatccattcctctcgtttttccaacggcatcaaacctagagtgtaataaaccaaccaaccaacatagagtttagttgctcggttgtaaacaaagagtgggactaaagagaaaccatgcttgatcttgttgaaccagcggataacaagttagtagttttgattttgagggtagatacaatagaactaacctgatttcagggaatacaccttggtctttcacaccaatactgtagtttccgttcccatcaaagctactgggactcacaccttggaaatctcgagttctcggaagggctaagttgataagacgatccaagaaggagtacattacctgtcacaacagtcaaaatcacaaaatgttaatacataaataactcaaaaggaaagtttgattagtcaagagaaatatagctcacatctcctctgagagtgacagcaatcccaagaggttgatcttccctgatcttgaaagtagcaatggaagctctagctcgtgtcttaataggtttctgccctgtgataagcgcgatatccttcatcgcagcctccaaacccttgtcgttctgcgccgcatctccaataccacaattcactacaatcttctgtacctttggaacctggtagagaagatgtccaagcagatatacaacaatgatgagattgacaaattcacattcacatttgtaaatggcacatcccaacagcacgattttatcaacacaacaatcttaaatctaggcttcttcactacattttctagaagaaatcaattcaaacttatcattaaaagcaaattaggtttaacattcgctcaaaaaattcgaattcactgagaattagacttcaatcaatcgcaacagaacaaaaactaggtttgagctcagaggggaaggatttggggttacctggtgaatattaacgtacttgaactcttctttgagcgcagggataatcctctcgaggtaagcggttttgaggcgttgagttttctcggcttcagatttctcgaccagtacagttccagacgccgagactttcaccacgtttctgagcggcggagagagcattcgtgcggaggatggagccgctaatggtgagaaacgtccgtgaaacgaagaagcggaagactgcagaagcgaaggagacgccattgtcgaagctccaagtggataaagtgtgaagtgagagctctcggcgttcgttgttgattaaacccaatggcaccttcgtaatttgttgacagtttgaggataaggagttttccgtttagcccctttaaaacataatatttcaactaaggccccaatatttgataatatactattatacttagagattttagataaaatataggggttgtttcatatgggcctaaatctcagcccgtttactatttgggcttctaaggtataacccgtacccgtgtttttgttgttttacatatccacaccgacctgagaagagtcaaaaacgaaaaacctctcttttgtcgttcctctgctttcttcgatttgcttctgctttcttcgatttgcttctgctttcatcgcggttcaggtcactcttttctcagccatg

SEQ ID NO: 16251 - DNA, 3000 bp, Unknown; identical to SEQ ID NO: 7659
  misc_feature (1)..( 3000): 2750-1469P.txt file - cDNA_ID_1387628; gDNA_ID_1621155; Annot_ID_173455

SEQ ID NO: 16252 - DNA, 3000 bp, Unknown; identical to SEQ ID NO: 12489
  misc_feature (1)..( 3000): 2750-1469P.txt file - cDNA_ID_1387805; gDNA_ID_2214555; Annot_ID_134745

SEQ ID NO: 16253 - DNA, 3000 bp, Unknown; identical to SEQ ID NO: 12489
  misc_feature (1)..( 3000): 2750-1469P.txt file - cDNA_ID_1387805; gDNA_ID_2214555; Annot_ID_185672

SEQ ID NO: 16254 - DNA, 1082 bp, Unknown; identical to SEQ ID NO: 212
  misc_feature (1)..( 1082): 2750-1469P.txt file - cDNA_ID_1387935; gDNA_ID_29778; Annot_ID_146765
  misc_feature (1)..(2): n is a, c, g, or t

SEQ ID NO: 16255 - DNA, 3000 bp, Unknown; identical to SEQ ID NO: 2558
  misc_feature (1)..( 3000): 2750-1469P.txt file - cDNA_ID_1387960; gDNA_ID_1620555; Annot_ID_160434

SEQ ID NO: 16256 - DNA, 3000 bp, Unknown; identical to SEQ ID NO: 14455
  misc_feature (1)..( 3000): 2750-1469P.txt file - cDNA_ID_1388438; gDNA_ID_2684120; Annot_ID_190920

SEQ ID NO: 16257 - DNA, 3000 bp, Unknown; identical to SEQ ID NO: 14455
  misc_feature (1)..( 3000): 2750-1469P.txt file - cDNA_ID_1388438; gDNA_ID_2926250; Annot_ID_143017

SEQ ID NO: 16258 - DNA, 3000 bp, Unknown; identical to SEQ ID NO: 14455
  misc_feature (1)..( 3000): 2750-1469P.txt file - cDNA_ID_1388438; gDNA_ID_2926250; Annot_ID_204342

SEQ ID NO: 16259 - DNA, 3003 bp, Unknown
  misc_feature (1)..( 3003): 2750-1469P.txt file - cDNA_ID_1388444; gDNA_ID_2936554; Annot_ID_194155
agatcagctgctggaaatatctccgagcagtttcctcgggcaatcgacctttagcaaccgtgttgaacaactcgccgcctccaacgtactccatcacaaagtaaatcttggacttcgtcgccataacctcgaatagatgaacgatgtaagggtgacggacacggcggaggatagagatttcccgtttgatgtgagcaaccaaaccactcttcataatcttctccttgtcgatgactttaatggcgactttatctccagatttgatgttttgagctaaataaacctttgcaaaggttccgtggccgagaagcttcccaagctcgtacttccccatgagaatgttgtttcttgggctcctaggactcctcggactctgtgggctgatgttaccatctttgtctgtatccattataccaatccggccaagaagatccgccatgtatcgtagagcatacggctttgggtgcggtggtggtggcggcggcggcgggtctgggacgacggtggtgaccaccagtggtggttgagccaaggcttgagccatccgtgtccaaagaaagagcttctgattggtttgggttttgtattcggggggttttggttggtttgtttgtttcttccgtttgagtctccttgtttggttggttgggcaaacgtgaaaacgaccaaaaagccaaaagaaaacagaacgaaaataaaatagggtttggttgttttggccggttgttgatgtttggccttacctaattttgtcttgttttataacggttttggtttaaattattacattgaaatggtctaatagtctttattggaaaatttaatatatcatttgacttcgaaattatcataaatccgttttttgttttgccagcatatttacacgtgttctaattaatttttatcattatagagaaatataaatgttacctaaacacgctatatgcctattacctatacagtatacaccaagacaacaactttaaaataaaaatggttttattttgaatataattttagtagtatatttattcagtgagaaaattaaatttatttctaatgtttgaatatttaaaactgtagaaaataaaataaagatattgaaacttatgatggtgtcgtcttcgttatcacagtacaatttgcaatgaacaatgggttttgtgattttcgctatgatatttctacctccagcagtttattcagtgccagataatagacagaacttatcagtagcaaaaggaacctgatcgatcagcagatcatagataggtattcataagaagttgccatcgtatgacacggtcacgctttactgagttaaattttatttcttttgtcatcacttttaaataatatttataactcttttcttgtgacgacaacctatatgaatcagaaatgtaacgaatggtattgtgggaaccaggtgttgctgcgttggtgcttacgtgagttcgtggacttcacatcgccgaccaaatccgagttcatttttccttacaataattccagttctttctataatattatttccaaagttatatccaaatttggttttctaccttctatatataattctttttatcatgttttctaaatggaatattcttttctacactaaaatccaaatcactaataacatcatatatatattcacattagtttagttttaatgaaatgtacactatttgaaaatcatctagtaaacactaccctagtaactgatataaataactatcgacaatttgccaccaaattaaaactacctttttcttataaccaacatattaattggtgcatgtagatgttgatgttatataaaaatgactaagaaaaaagatgtaatatcaacaaaagaatatacatgtttgaaatcgacttgtgatttggactaacaaaacaaatagttatcgagtaaaagtaaaactaagtcttgttgaatagcttattatatgggttgctatcatttgattatctcaaggaagtgctatttatttaaccctatccataagcacaaggaagaaacacataagcgaaagtcactactaacttcaaacgactctttacaatctataagaaaagaagaaatagttttctaggtatgactacgtaattactgagtatatattatactttgaaattaaatttattcaaaataaggcttttaattaatttaacttgtaacttttcatagaagctactgttcatattttctttgctagtcttaggtctattatattattgactcacaacttaaaaactagaaaaaaattgtataaataataattacaattcagggcaattttgcttaagaactagacaaatgcaaggtagtatgaattaagttgcaaccaattgcaatgaaacaaacaaaatttaacatatttcttcaaattactattatatttttttaaaaactttagaatgtaaagacattaaattgtaaacaaataacaatttttttcctgttttatcatctagttttaggagtttgtcttacatttgaagattaaaaaaaatatccaaaaattaaaagcaatatcatatagcaatctcgcattgttttggactcattgcacaataattttagttattgggcctttagtaatagataaacgatccaatttataactacgtcgttttaaaaatataacatcccaactgggttctgattcggtggatccaagttcgggttgcaattcgattcagaatcaaaccatttttgaagaaccctaaaagttctcttcttcccccaaatttgaatttgttcttgcaatcggattcgaaatccgaaagtcttagtctcgaatttgagctcaacagtttcttatggctccgaagaagtctgaaggaatcgctttgctttccgtttacagtgatgaagatgacgaagagatggaagacgccgaggaagaggaagaagaggatgagaagcagagaaatcaggaagagagtgaaaaaataattgaagaagatcaggtagaagaagcgaattatatg

SEQ ID NO: 16260 - DNA, 904 bp, Unknown; identical to SEQ ID NO: 375
  misc_feature (1)..( 904): 2750-1469P.txt file - cDNA_ID_1388444; gDNA_ID_1564514; Annot_ID_149582

SEQ ID NO: 16261 - DNA, 3003 bp, Unknown
  misc_feature (1)..( 3003): 2750-1469P.txt file - cDNA_ID_1388464; gDNA_ID_1620413; Annot_ID_156325
aatggtggttgtgttgaactggattggttatgttgccgaatataaagtgagatttgatttaaaatggattagaagagttatcatcttaaaaactaagacgaagttaattttgagacgaagttcatgaacattataactaaccttaatctgtttctgtttctgtttctgaagatgattacctaaaatcctaagtctcatacttgatacttatctaaagtatactactagaaaacaaaagtttaccctttcaatgaagatagagttataaaaacgttttcacgagatatcgctttgatgtgagatagcaaagagtcttaagacagtaactcttttgagaaattcctaaatgcctttcgagataatgatttttttggttcatttatcttagagattgaaaacaaattttactttcttgtttgatcaattatatatgtttggtttttgtgagatttgatatcaatgtcatgtagagaatcacgcattccaagttttcaactaagaaaaatacagatgggcttgtgtccataatattctttggacttggaattcttgacactatatctatgtttgtttttaatatctatatatacatttttgcagccattttatgaaataaatcttgtagttgggacttatttacaatggttgccattggattttaatatttgtttttgataattagaagaaaattcttcgaattaaatatttgacatttaacaattttcctaaaatctctctacattaactacacgattggttaataaaataaaactttcaaaatatttaatatcatttaattactacaaaattatcattattgatattgtttttctgcatgactattacaattcaattataatcatcaaaccgcagagatatttgatagcatttaattactacaaaattacaaaatatttagacaatgattcataaacatatgataaataagatcaacattaataaaataaatgaattttttttacgggacgggttagcgggacgggttagcgggacgggtttggcaggttgttacttaataacaattctaaactataaaataaaaatattttataaatagttacatagatagttacaaattgtaaacttttatatatactacctttaaaatataaattgtctccgcggtataccgcgggtaaaaatctagtaacgcctattatggtttgaaatatgattcatcacatattatatatatttttatttgtttgtagttttgtatgttttggggttttggctatgtttttctataaaaatcaacacaatactaagttgagtaaaataaattattgaaccagtcagcgatacaaaaatatctaataaggaagaccaaataatcagcatgaaaggtcgacaattaatgaagaaagtcattttgtagaaatgcaagccttttgataccagcatagcatacgggcttctaaattctaatgctcacataatgtcatttattgtttaagaaatatctaatatcgctcgaaatatgagatttgttgttgtcgaaaaaacataatccaaagagttatcaagaatctaaaatcttgtgttatcaataatctataatctcgaaggaagtatgctttggttcaatcaagtaacacacgtcaatcttaatcctattgaaacaatggtatagaaatatgcaaatacgatcatatcaactaagatataccgaaaccaaatatattgggatctttcaaaaggacacgatcgggaactctaactactgtttgagactttcctaaagttatatcgataactaacggtcaaatacctgcaaattttggatatatataaagatatataccgagtttgtgtataaacatgttgtttctcctaatcatacgttattggaaacattaacgcggtttgctttatgcaactttgaaacatttgctaatttgttgatataaaatttggctatttatactgtttagtttagtaaggaattaacacaaatgttttagcgcattattgcacatttgtgtgaaataatatactattttcgggaaaatcataatcgaaatagaattccaaaatttccacgtggcatattatgaaaggaatattccagctcgggtaagctggcctccatcaccggttatgatgaaaggtgagccgaaagtggagccaacctgagatgccccgcatgagagccatatgcttcttcgacctttcattctatattctttccttttaaagatagcaactattgatcaaaaaaaagaagaaaaaagataggaactatagaactatagtctttttttttcaacgaagaacaaatatatggttatgaactattcttaatggatggtcaaacagattttttgatttttttctaagaaattttgcatgtgaatacataactacagttaattccattcaactgttacttttctttgggtgaaacaataggttggcaacttggcatagatatcaacatcagagttttgaacaaatctatcatcatttaagaaatgatagaaaatcaagtattgtttttcaaatcaagaaatatcaaagaagaattctgtattaagtttagttctcatggaagccatagaatatatcagaagtttgaaacaaacagcaaatatatggaataaaaaacatagttattggaataaatagaatagttatttttttttgtttggcataaaataaagaaaattatttgttcaacaaattgttacagatttcacttatgtatattttgaactaattcttatttttatattaattaaatcaagattttacttttgaaaaataattaatgaatttatgaaacaatctctatgtaaataaaataaagcaaattaaaacgctcacacatgtttacttattcggactagagagcttccgcataaagctgaggaaaaaaaagagagaagacgcacaccgaagaaaacacacaagactccattattctcctgcttcttcgtctcttcaattattttctctgagactagctttgattcaaccatg

SEQ ID NO: 16262 - DNA, 3003 bp, Unknown
  misc_feature (1)..( 3003): 2750-1469P.txt file - cDNA_ID_1388571; gDNA_ID_2926059; Annot_ID_196165
aagaatagtaagatgcgaaccggtgatgaacttcaaggagatcaatctttttcaccattctatcaatttccatcttcagctcctacacaataatacaaccccaaaaatagtcgattaccatctgaattaatacatactgtacattttttttttaaataaatgaagaaactaacataaagaatatatatgaatatagagaatgaacctgcaagtatcgttctacttgaggcctctctgccacatagaaggcattactaaacttgccatatctatctataatcttctccatcctgaaaagttaattcacaagaagatatttgtcagtgatgaatgatgatgacggatcataagattgaaatattatggacgaatattcttaatatatatatatctacatgttatcttttataccgacttagcttctatgatagatttgtccaccaatattttgattaatgtagatgtctataatttagataacactcatacaatcgaatacttttaatttttgcaatcaccaaacctagtgaaggaaggtttttgctgcacaaagattgttaaacatgaaatgaaaaatgaaacaaagggaagttatacaaaataaattatactctgtaaagattgtatagtactaatctttaaaccaattctattaaccacaaaacaaaagggatttataaaatgaacaatgtaccgacctcatgattgtaaatctagtgaaaaagtttggatgcccgagatattttttaaatcttctcatcatgcattatatttacaatttctgtacttaatgtaactacattttcggatattcatttatgctggatattctaataaaaccagatgccaagtgggtgtgtgggtaacagtttaagttccaaggaatacgaggttcactgttcaagaaactttttttctgaaaaccctaatacaatccacttgctcgtgcttgaagaaactctcttaagtagtaaaaattcttaagtttgcttaaataaaatccagaagctaagtacttacaaaacttaaattctaaaattagaatgtgacaaggcattgttgggcaaagtcaggaactagctagcaccaaaagaaagggggccaaatctttagcgcctatattattgcaaaatctctagtacgatttaaccagagatatattatactattcactacagaagttctagatactcaacaaatctatgtgtagctagagaaagattttggaaatagacatgtgtaaatattttgaaataatttgatgaaagaatatcttactgggagctagagtattcgtgtaatcttccgctctgagaaaagacaatggcggctacttgagcatcgcatagaaccgaaagctcatgagccttcttaaatagaccgcttcttcgcttcgagaacgtgacttgtctgctcgtcacgttctcaatcttcttgatctcgatcttccctctcaccattgttcctgcgatattcattccaagattcatcagattgaaaccctaactaaatccggaaggaaattttcactcagacaaaatcaagaaatgatttcttgaaaatcgagaaggagatttcaaagccagaagtcaaagatgataacttgaataatgtaagaaactcagaagatccaaaaccagatttgtctagattcacttcaaaagctacatagaacatacttttttccagacgacaatcaaccgacaaagttaatagttttagagaggggtataatttgcacatcttaactatcaagaaaaaatatatttgcacaaagaaagaaaaggaacaaaagcttaataatggtgaaaaagaaaccctagaactaaaattccggaaagaggcatgagctagatcttatgatgataaactctgtgtttacctctgtgcctctttgtacaggagccacaaaccctaagtctaagctttgctttttgtgttctgattaattggacagagaaaagggaaaaaaaaagaagaaaagagatttttattttcttcttttggtgatggtagttggattaataattgaacaacaatagagagagaatcattcaaaaaaacacaaaagaaaacaagtgagtcccagattctgattaaagaaatgtccatgactttatctgtttttggtaaaattaagaatagagagcagaaggaaaaagagttgattagctaaaaaagaaacgttaattgaatataatcaaggactaatttctaagaaaccggtgattatttgttttttaatttggacagaacacaaagagtgggtgggataataataataataataatacatctaaaagaatagtgttcttcgattggcgtgtcgacatcatcgtacactgacgtgcattgttaaccaaatatatgaagacacgtatgttttccactttccccaaaatcacagtcagcttctgtgcaatgtgacctcgtcttcatcagacaacacacagattcctttttcctcttttacatggttctttgttatgtttagtaatattcctcttttctgttgagtgttgaaagaaatatgataaagagtatgtgtctaaacataacaaaaagggaattcaccattgtgtcctaaatatctaaatcgtgataagggaatatgaattcttctttctccattttgttttggtcgtgggacttgatcaacattgattttcttttatactagatcgtaagtcatgttctttttgttttttgctaagccaaaaccaacgctttatcttttgcagtcatgtaaagtcaaacatgatccataaaagaaacacccttgtagttgggtcatatataattttattgggcttgaatatacaaggttgggctttaacaaacaattaataattgggtcttgagaatgatttttctttttgtcaaaatatatatatttgtcattttgaatttaactaaaataaattattataaatgaatttaacaaatttaatttccctgaatctgatcttaaatcctcctcagaaacccagaaacgcgaagatg

SEQ ID NO: 16263 - DNA, 3000 bp, Unknown; identical to SEQ ID NO: 6726
  misc_feature (1)..( 3000): 2750-1469P.txt file - cDNA_ID_1388618; gDNA_ID_1621102; Annot_ID_55902

SEQ ID NO: 16264 - DNA, 3003 bp, Unknown
  misc_feature (1)..( 3003): 2750-1469P.txt file - cDNA_ID_1388618; gDNA_ID_1620702; Annot_ID_165104
ctgaaccaccagagaaaagaattaagaccaaaagcaaaagaggtacaagcattagatgcctatgttggttccctttaggacttaaagtaatcaaaatcagtaaaacacacaagaagaagcttaaccattttttagcatataccaacacagaggattttaatattcaaaatctcaactttgatcaaaaaaaaaaaaaaaaaaaagatacaatggtctcaggaaagaaaagttgcagaaattggttggctaaaaccacagctggtttcactagacaggtatgtaaagctgattgtatataaaaccccacaagtctcagctaatggggctttaagaaacatcacatgtctaacggtagactgaaacagggatcatctgaaactcctttcacattttttacttattttatcagaaagaagtaaagcaaccaaatctctttctttttttctgtagtccctcaaaccaacttgcatcacttgattagacaataccaactttgagtatctagattctagaagaattaaaaaatgaacaagaaacttcgcatgtctaatggtggcatgaatatagtaccatttttctccccaaattcctttttcgctttccctaggtgctgtgatctttctaacgattcaaacttagccaaatggacaacaaccttgagcattctctctattcatctctcaaagcgtaggtacaaaacttaatatcaggaaaccatatcaaaacaaaaaagaccttgaccctcataagataaagggaaatcagtttgaaaatggtgaatcatgtggcgattggcgaaaacattatttatatccttcaatatctatctctcatttaacacaatcctgatcgagctcttaacattattagaaggtccagagaacaatatccaaagcaaatggaccaaaagaagtaaaagaatcaggacctgacttcttccaatgttacaccctcaaacctcagcaggagtctttgccacaatagagagagcatgtaacccgctcttcaactcatcttgcaacaagtcatatatcagcctatgtctcttgaccaagcttttaccttggaaagcatccgaaacgattcgcaagttgaaatgtgtttccccatcatcaccagcactacctctaacagcggcatgtcctgcgtgctggtaagaaacatcttcaacttctaactcaacaggatctagctccttctccaatttctctcttatcctcatccctctactccctaaagcaacaacatttgacccactctcagaatcatcaatcttttctgttcccaaatcctcaactagatcaggtttagactccaaatccacctccggaacattagcttcgtccttagtctcaggaatagacacaaagctggattctgaactctctccagaacttgaatcttcctcacctttgacttccaaatgaagagcctttttctgcatcagcttaagcatattaagtaatccattgtttctagaaggagacagactctgctgcaacccgagaagaacagcgaaatcaggtgttatcctcaaaatctcagggacaggtcttccagataaacccttgactaatagagcagctaaccctttagtgagaaccgaatcagaatcagcttcatacacaacattacgttcctcatcaaagaaagccctaacccaaacctgagaaacacatccttctactttattctccctcgtcttgaattgagaatcgagaggtgtcagattcttcccgtagaacataagctgctcgtatttagcctttggctcttgtaccgattggaaaagcttgacgatctcttgtagcttcggtggaagctcttcgattggttgaaggtctccatagctcgacggagatgatgaagccgatggtggaggaacaatcccggttgaaattttctggaaagtgatgatcgtccggcgaaaggaaggaacttccgacggttttagtggtcgtagaagaagggttttggccggataatggattgaagaaaacaaggtccgtttgaatgggattaaacgaagcgaggaagcgcaacaagaagaagacatcgctgctgccatagtcgcgaacttgaaacttcgagagagactgagatgatgatgaaagctctccttcttcactttttctgagtcaaaaaccaataccgccaattaggtagtaaccgggaattaaaccgggaatgtaccaaaatccaaaaattagatgtaaaatcaattgtggggttgattatgaataattagaaagtatacgactcttttcataaataaggaaaagaaaaagatatctagattttttttgttttgttttgaagcatcgtcttcctggttcttcgttctcttgcgttcgtcacctcaaacacgctccgccattattatatatcaaatcaatcatgtccgaatccagcttttaccaatgtaagcaattaaattaaattaaataaaaacacttttatcaaatttaatcaaattaaaaaactgtccctttcttatctgagattctattgtttctgtctacttccacagaaagaaactgcatctccgtttttttttctgatttgaggctttccttagatccttgagagcaaaactgaatctgggtaattttaaaaatctcatttttacgacttatctcttttgaacgatctgttttttcatgtaagtacgatttcacctcgagatgatcgatcattgctcttctggttcttccatgtttgattaaatgttataacttgagggttttgtttcttttggattgttctcgcatttgttgatctatggttatcaaaagagtttggatttacagtttttggttgcagctgaaatttttcactcttttcttctctgttttgctggataaagttggatttgattcacattgttgtttagaatctagatgaagttgtaagattccttgtattgtgtttgcttatgcatgattgtgataaagatttaagttattttaccaatgtacaatgtccagaattgtcgtcgggatg

SEQ ID NO: 16265 - DNA, 3003 bp, Unknown
  misc_feature (1)..( 3003): 2750-1469P.txt file - cDNA_ID_1388618; gDNA_ID_2926189; Annot_ID_140936
ccgggaatgtaccaaaatccaaaaattagatgtaaaatcaattgtggggttgattatgaataattagaaagtatacgactcttttcataaataaggaaaagaaaaagatatctagattttttttgttttgttttgaagcatcgtcttcctggttcttcgttctcttgcgttcgtcacctcaaacacgtccgccattattatatatcaaatcaatcatgtccgaatccagcttttaccaatgtaagcaattaaattaaattaaataaaaacacttttatcaaatttaatcaaattaaaaaactgtccctttcttatctgagattctattgtttctgtctacttccacagaaagaaactgcatctccgtttttttttctgatttgaggctttccttagatccttgagagcaaaactgaatctgggtaattttaaaaatctcatttttacgacttatctcttttgaacgatctgttttttcatgtaagtacgatttcacctcgagatgatcgatcattgctcttctggttcttccatgtttgattaaatgttataacttgagggttttgtttcttttggattgttctcgcatttgttgatctatggttatcaaaagagtttggatttacagtttttggttgcagctgaaatttttcactcttttcttctctgttttgctggataaagttggatttgattcacattgttgtttagaatctagatgaagttgtaagattccttgtattgtgtttgcttatgcatgattgtgataaagatttaagttattttaccaatgtacaatgtccagaattgtcgtcgggatgggttctaagtccgttgttgacatgatcgaagctgcctcgcgggcacatttttctggtttacacgtgaatgggcacatgaatgggttggaaccaagtgcacttaaggaaaccacttctgcatcagaagatatccaaagacagccttttgtaataggtgagttctgcttttgctttcatttttgattaatatatggtcgtggataaaaaaagcttgacgaatggtcttgattgatatgttgtgacttgaattggttaggtgttgctggaggcgcacatcgggaaagactactgtttgtgatatgataatccagcaactgcacgatcagcgtgttgtacttattaacctggtaattttgttttgctaataaagtttcatagagctaagtgataaccaccggtttgatttgtgtttcgaatgtatatgaagtcaattgaattccacacaatttagagatctaaaaggagaatattaccagctaataacttatatatggctgaagtttaacattgttcaaccttgtcaccattgtttagatatttatgtcagtctatttatctaattctcaaattcctttggcatcatgataaaccacaaattgctcgacttaatatcctatgataatgatttttggcaggactcgttctatcataatctgactgaagaagaacttgctagagttcatgaatacaactttgatcatccaggtgagaatatatttggagtgtaattgctttctgtaatctactcttgtcaatacatagtgtcatcaggagtaaaaaatctttcctagcttctttggccattttttttttttttataatacttctttgggataattaaggcataactaacagccatattattcagtgatatcttactaattgatgtattctcttttattaaagcaatttcatccctgacagcacattactagttgctgggagttatgagaaaaagtcttgtgcattactctttgtcatccaccgttaatttctttttatccaggattctaatgaattgttgttgtttctgtagacgcatttgacacagagcatttattgtcttgtatggagaaattgaggcaagggcaagctgtagatattccaaaatatgattttaaaacttacaggagcagtgttttcagaagggtaccaccttccctctcagcatcactcattatcatattgttacttgatgtttataaatttgagattcctttttcattttctcactgcctctttctgtaacaatagcaatttcttagatgtcaccactggcttttatctggttggggatttaaggggagatcaatttaatcttatttgatgctaggattttgaaaaacattctgcaggtaaatcctacagatgtaataattcttgaagggatacttttgttccatgatccacgcgtccgaaagttgatgaacatgaagatttttgtttgcacaggtaatttgttgcctcttcccgttataattattgtaaactcttgtttcgactacattccatttcccttttgtagattcacttggctttttttttctacaaaatttcacatgatggaacaacttcttatgctttaagattttgctgtttcacattgcttattttgttttctgcgtagatgctgacgttcgtttggcaagaaggataaaaagagatactgtcgagaatggtagagatatcggcacagtacttgaccaggttagcccgtcttagtattgttactgtatatattatcatcaagaacaacaagaaatggtttacctcttgcattttaaatattacattgctctgatctgtatgtttttttctcatattagttcggcgttttcaaatctatatgtttctacccatattttatatgatgtcaaccttttgatgcagtactcaaagtttgtgaagcctgcttttgatgacttcattcttccaacgaagaaatatgcagatattataatccctcgtggtggggataatcatgtagctattgacttaattgtgcaacatatttgcaccaagctgggtcaacatgatctctgtaaaatatatcctaatctctacgttatacactcgacatttcaggtaattgatatatcaatctcatctacatacgagtaacattctcttaactaccaaacaagatccagaaaattgatttctcttgcagataagagggatg

SEQ ID NO: 16266 - DNA, 3000 bp, Unknown; identical to SEQ ID NO: 10669
  misc_feature (1)..( 3000): 2750-1469P.txt file - cDNA_ID_1388785; gDNA_ID_2213667; Annot_ID_132720

SEQ ID NO: 16267 - DNA, 3000 bp, Unknown; identical to SEQ ID NO: 10659
  misc_feature (1)..( 3000): 2750-1469P.txt file - cDNA_ID_1388785; gDNA_ID_2213667; Annot_ID_182147

SEQ ID NO: 16268 - DNA, 3003 bp, Unknown
  misc_feature (1)..( 3003): 2750-1469P.txt file - cDNA_ID_1388793; gDNA_ID_1971893; Annot_ID_176878
atgtctgccgaaccgaaccaaaccgagaaccgaactccaattataattttgccgatcggtttagccttcccttcatagtcggtaatcggaaccgaaaaaatcggtttgttcggttcggtttgttcggtttaatccgaaatcccaggcctaatgagctctatcaaactcatatcttcctcaacttaagagtccgagtgattacgctaccgttttgtaagtgggccgttattgggctttgagatttaatgtgatttgagttcaactagatttaggatttgcgtttactcgatctctacgtttctctaataatatccacagccatgaacggagaaaagtcaccaccgattacgatgacgtttctaaatgataatggtttctcacattgttttttttttcgatttgtgttacatattttcattatcccaaaccaccttttgtattcgattgtatctttgttgcatgtttcaagagctcatctcgataatggtgtctttgttgcagattgtatcagtcaccaaacgacgcagcgcccaaagctgatagaagacaagtgattggtgtgaaagagtgtggtgaaacttatgttctggcagagtataagcctatatatgttcatcagctcgtccttgtccttgcaactgctatacagctgggattgtgtatgacattgaaggatgttgaatatgaaggaagattagatggaatctttgtgatgttttgaatcttgtttgtagcttcatataaaattatgattatgtaaagtcttatgtgtaatcaaatgtttaactttttcctttattcaacaaaggatttgtatcgataatattttactagttacagaagctgaagaagaaagtattgtaacaagttagggtgtctgaaaccataaaggttgtgtcttgctagttaatttatatataacaaaggctgaaacatgaactttttaagatgattccactctcgtttgcagcattaggagacatagttgataagaagcttgatgaggattatgtaaaggaagaagttgaaatgatgatacaagtatctctgctatccacacaagcagcaccgggagaacgaccaacgatgtcggaagttgaaatttttagaaactcctgcttgtgctacataaactggttttgcaacatcatctccataatatattctaacagtttgcttttgaggattgattcaggatcatcatctatatctgttgtcttcttagtttttactctgtctcgggttatccaaacagcagacttgtgtgagtacacaaacacagaacaacagaaccaaaatctctaaacaagaccggctctctaacaagagacataaccaccaagtagactcttgtctcccttgcactgcattaattagtaatcaccaaaagtctattcctgttttgcttcttctcttataatcatcaaacacacaaaaaccaaaaacgttgtagtagaccatcagctactggaatcagaagcaacgatagagtttgagggtaaccaaaatgtgtttgggagtaagcagagattaaatatctccatcatgtcactatgttgatgggaagaattcgattgattaaaaaaggaatctctgtacaaaagcccatccaaagaaaaggaaattaagatcaagacaaatatctgcttatgtcaaagtcattaaccgactccaacggctatattgaacaaacggttatcattattgatgaagacctaattaacactttgcttataaataaagactcatacacgcagcctcttctaattcttcgttgagagaaaaaatcaaaactctctgattcacattcacgcatcttcttcttcttctttaattttcttcttgagagaatctctttatacagagactctgtgtgaattccgatgatccaattagtagtcattgatcagaagtgaaaagcggatgatgatgatgatctcctctgcaacatgatgatccgtaagagttgatttcacttttttccgatgagtcgcagatggagcaacgacggatgttaacggcggctagaccacgtttgtcctcgacgatccgtacgattacgtctcacgtggcgttctcagcaagccgtctcttgaaaccttatgttgcatatcggcttggattggaggtatgagtttcgctagcacgattgctttgggagataggacgcgaatcagaggaaaacagagaacgaatccaccggtggagataaagaaatcgccagtgattagggtttcacaacctcgaggtataccacttggagagatactagtggtttgtgctgaatagaggaatagtactataaactttcaaaataacctaaaaaaaaattactcatatacaaacaaactacaaaagtttagggaaaatggatcattttgaatgcatactactagtaggttacagatactgaatcactgatccaacacataaggcttagttagagcagaaaatgtttttaccataataggcccaaatcttatatgtgcccgataagagatccaaagaaacccaattatcactgatccaacacattcaatattttactaatctcaaataattatcgttgttttggccttttcttacatttctactacattataatccctataaaaaagacatttaattttgatgctttttttcttgacatgtgatcaccgacagagagagtaactacaagtctaccattatccagctgcaatcacgcaaacgcaccgcctttttctctctttgccaactcgtttatttccaatcataaaatgccacgttaacacactcttgcagttaattgacggaaatacccctcttcacatactacaattacgatattaatgtgttaaaaattaacggtgtgggctaatctcacgcgctttcatcatcttcttcctagattcgctcctccactgtcttaaatttcactatcttcttcttcattttccttccttctcacttcaaatccataatcgctctacttctctctctctctctagattcgaaaaaatg

SEQ ID NO: 16269 - DNA, 3003 bp, Unknown
  misc_feature (1)..( 3003): 2750-1469P.txt file - cDNA_ID_1388852; gDNA_ID_1620488; Annot_ID_158537
cgattcccgaggctcgaaaaaaccctaaatctcttctccgttcactcatccaaccgaagatgcgtgagattcttcacatccagggtggtcaatgcggtaaccagatcggcgccaagttctgggaagtggtttgcgccgagcacggcatcgatccaaccggaaggtacaccggagactcagatctgcaacttgagcgcatcaacgtttactacaatgaagcgagttgcggtagattcgttcctcgtgcagtgctcatggatttggagcctgggactatggatagtctcagatctggaccgtacggtcagacctttcgacctgataacttcgtctttggccaatccggtgctggtaacaactgggccaagggacactacacggaaggagctgaactaatcgattccgttctcgatgttgttcgtaaggaagctgagaactgtgactgtctccaaggttattcttcttcttcttatagatctgtttgattttagtgttgataatgctttactagtgttttgaactgtgagatttccttgtgtagggttccaggtttgtcactcgttgggaggaggaactggatctggtatgggaacattgttgatctctaagatccgtgaagagtacccagatcgcatgatgcttaccttctcggtgttcccttcaccaaaggtttctgatactgtggttgagccttacaacgctactctgtctgtccatcagcttgttgagaatgctgatgagtgcatggttcttgataatgaggccttgtacgatatttgcttcaggactctcaaactcactacccccagctgtaagatttcatttcccaattatgctctccaccaatgttaagatgagttaaactatgcttgaaatgcttggtctacatggtgtttatgttaataattggtatcaagttcagatctgcaagcatctatgtaaagcttatagtattgttactgtttccattggtttgctctttgactatgtcactgttttatatcagaattctgatttgcaagtctctgtgcagaacttatacttttgttactgtttccagtcgttttgtacatatctttagcctcttgttttgtgtgatattgcttctgtttacctattttgatctcatcaccgaagtaggtccttaaactactcttattggaacaatactttctggttaagttgcaagtagaaatctgatacttgatgatcatcagtttgttgagtttactgtctgctttgattcttttctcatcgtactgtttggatatgtctaaagcttacacatacttggattttcttctgtgtgcagttggtgatttgaaccacttgatttctgctactatgtctggtgtgacttgctgtctgaggttccctggtcaactcaactctgacctccgaaagcttgctgtgaatctcatcccattcccccgtcttcacttcttcatggtgggttttgctcctctcacctcaagaggttctcagcagtaccgttccctcacagtccctgagctcacccagcaaatgtgggactccaagaacatgatgtgtgctgcagacccaaggcacggacgctacctcacagcctctgccatgttccgtggcaagatgagcacaaaggaagttgacgagcagatgctgaatgtgcagaacaagaactcgtcctactttgtggagtggatccccaacaacgtgaaatcgacagtctgtgacatcccacctactggtctgaagatggcatcaactttcattggaaactcaacatcaatccaagagatgttcaggcgagtgagtgagcagttcacagctatgttcaggagaaaggctttcttgcattggtacacaggtgagggaatggacgagatggaattcacagaagcggagagcaacatgaacgatcttgtgtcagagtaccagcaataccaagatgcaactgcggatgaagaaggtgactacgaggatgaggaagaaggtgaatatcaacaggaggaagagtactgagaataatttagttataactgctttaaaaacaaaaacaatttagtcgtttgctacttttcttttttttaaaaggaacacctcaactaccagttgtagtttttttctctgcttgtatttgacatatctggttgatgtttctgtacttttgttcttaatcttgttattgcctgtgatgtttctattaatattttccagttgtactgtcttcaatctttggtcttctatcctcatctttctgctacctgactacctcagtacctacttaaggactttaggtttgatctgtttggaaaatagattaaggttcgggatttgtgacctcagggcaagtgcagctccatattagaccccaaaacaaatttatcactgttctgaaatacaaattccccaacatgcctagctttgaggattgattgtttctaagctatttattttctttaccaattcacataaatactttaggataaagtggaaattgtcaatattcaaacacgttctcttccctttgttaacaagcaaaatatgaaaataacatgtgctcttccattatttcattttttgcaacccttatgaatgggcccaaagcctgccacaaacatgtgcacaatattagaaaagaaactctaaaaacaaaaacaaaatgaacattcttttttttgcaatttgtattataatatcaaaataatattttaaaactcaatttaatattggaaaataaaataaaatttggaaactaaacagttaccatagagaaagaaacggaccatttttaaattttgaatttcgagaaaaacaaaatcggcgcctcttattagagataattgggggaaaaaaacaaaaaacaaacacagagagagcaataataaaaactcactcactctcacttttttcatttcttcaacaaaaaaaacctaaagctctcttttctctccagatttcgattcccgaggctcgagagaaaaccgtaaatctcttctccgttcactcaatcaaccaaagatg

SEQ ID NO: 16270 - DNA, 3003 bp, Unknown
  misc_feature (1)..( 3003): 2750-1469P.txt file - cDNA_ID_1389239; gDNA_ID_1620835; Annot_ID_57960
ataatcttgttgaagagtcatctcccaaaactaatgagcatgtataggctcttgttgaagggtcatttcccaaagctggcaaatcataattacataatcttgttgaatggtcatctcaggatcacagtttgtcaaatagaaacaatgtcatctgggttaagaaagttgaaagtggacatgattgacttggcttagatgattgtgtctctatggttgtactttgtgaagccttctttatcattatttgtactatgtaaccttttgtttgtgtatttctttttcatatcttcttgacccgtttttatctcgttcattcagaaactgaagacgcgtgtgattaataataactgtaatccagtgtggaacgaacaactgaccctttccatcaaagatgtgaatgatcctatccgtctggtaagctatcgtgtctattacaatttacgacggtcttctaaagaaaccgattgttggctcatattatggtctgtttatgcagacggtgtttgataaagatagattctcgggagatgacaaaatgggtgatgcagaaatagactttaggccgttcctagaagcgcatcaaatggagttagatttccagaagctccccaatggttgtgcaatcaagaggatccgtccaggcaggaccaactgtttagctgaagagagcagcatcacttggagcaatgggaagatcatgcaagagatgattcttagactaaagaatgtggagtgtggggaagtagagctcatgcttgagtggactgatggtccaggctgcaagggtctgggacgcgaaggtatgttaacaaatcctcggtttttgacttgtgcatatctatgattgcgattaacatgcgagcattggttcttttaggatccaagaagacaccatggatgccgacaaaacgattggactaagatgcagaaatgttaaaacagagaccgtgaagatgtgatggtattttttcgttatgttcatggaaagacgagtttgtctttgtctcatcagagtttaaattgacaaaaaaggctctgctttggtctttagttgtacatgtcgaataactcaacccttatatatattgtatctgtttctactaattgaagaaataaagcaaaccctgaatttctagaacctctttcaatcttatttctctggttctggtaacattagaattagctcacctatatcagtatgtatacaaaattatatttgcagggtagtaccttcttttttgtgaaatgtaatgatgatatttctaatgtcaatgtcagaaaaagacaggagatatttcttatgaatagaatctagaaggtatttgtgtgtgagtaacgcgtagatgataattaaagtgagttagcaggaaacaaaaagttggaaaagagaccttttgaattcacctttccttttcttttttgtttctttcttttaataagctgatttaagtagcatcgttgaatttgagtcggtgattgtttgtaagtgaataagaaaagtagtagagtcaggagacaggtgtgctttctcttcaaagctcagaagcaagatggagaaaacagaggaagaggttgagatgaaggaactggtagggcttgtgagaatcctagtgaagagagggatcgatcttgctcgtcgagacgctctaagcagcgacccttttgtcgtcataaccatgggtccacaggtactttttctctctttctgattctaatctgatttggttctcttctgtttgatgtttctatttctgttcttgagatgtatggtttctctgtttactttcttcgcagatggaagaccaaagaatcgacctttaagaaacatgattaataatcatttaaaaagattttacatttcatgctacaaaatgaaaacaatctatagctataggatgttgtgttgcattcgttctaactgaaattggttgtatctttgaattgcaccagaagctgaaatcttttactgtgaagaataactgcaacccagagtggaacgaagagttgactcttgcgatcgaagatcccaatgaacctgtgaagctggtgagtactagtacccgtcagtaactaccggaatcatgaattttcaactcaaaaccaactgatgataagtggttggttccatatgtttttgtttcgtatgagtgcagatggtgtatgataaagatacatttacagcggacgacaagatgggagatgcgcagatagatatgaaaccgttcctagacgttcacaaactcggtttgaaagaacttccacatggaaaagagctcaagagaattgtgcccaccagagataactgcttgtctgaagatagcataatcgtctccgataatggcaagatcgttcaggacatgattcttctgttgaagaatgtcgaatgcggcaaggtcgagatccagcttgaatggcttaaaaatccaggtggtagtggactctgaaaaaacagagatgaagtagctttatgattttctgtgtgtaataaaaaaaatctcagttaataaaatagaacagagtactactactctgttttgtaatggaaatatatttggttttagatctaaccgaaaccgttttggtttcccgcgagttttctcttcatcacaaaaaagaaaaagtgatatttatgttttatattggtttggtaaacatgttcttggaaaagtcaacggcttaaaccttttgtccatagtcagaaaaaaagaagaatcaagaagatattattaccaaagatgttcgtgagagtaacgcgtagatgagaataatatagaaacaaacacctggaaaacgaaacctattatatagatggtctttattttttgtttctttattcgctctatcgtccattgataagccaatttttaagtggtcctcgttgaatttgagccggtcattgtttagaattaaaaaaaaagaaggtaaaagagtcagagccgcctagagaaatcgatcacaaattcagaagaaaagaacagagaaaacagaggaagaggtgagatg

SEQ ID NO: 16271 - DNA, 3003 bp, Unknown; identical to SEQ ID NO: 16270
  misc_feature (1)..( 3003): 2750-1469P.txt file - cDNA_ID_1389239; gDNA_ID_1620835; Annot_ID_169838

SEQ ID NO: 16272 - DNA, 3000 bp, Unknown; identical to SEQ ID NO: 13825
  misc_feature (1)..( 3000): 2750-1469P.txt file - cDNA_ID_1389401; gDNA_ID_2214654; Annot_ID_188729

SEQ ID NO: 16273 - DNA, 3000 bp, Unknown
  misc_feature (1)..( 3000): 2750-1469P.txt file - cDNA_ID_1389713; gDNA_ID_2684204; Annot_ID_191351
ccaaagtcatcccttttcctcctcctcacacctttataaacaaacccagagaacaaatcatccaagctattgctattatccttctctagggaacaaccatcatcatgacattgaagaaccaaatttgtggaaccatcatcaactaaacccaaatcacgatttttttcatcatcctccttaaataaagcaaacgagcgattctcatcacttacctcgataaaatcggagtcgggtctccgacgagtcatcatcactgaactatcatcgtccctaccaagtcgccgatctttccttcgcttatacttataaattatgggaggaaccatctcaatttatacacagagaatctcctcaaactcttaaggaactgaaacagagaatccaatctcttcttcgccgatacttttgtgagtttgtcgataaattatatccctttttgccgtcagtgtgtaaatttagactctttttgtgtcaattacgtttttgttttacgaattaaattgtggcaaaaatctaaaaaattatggtttttttttttttaattataaaaagcttttgagaaagaaaaaaaattagggttgggaaacgcagtcttcatagcttctctcgcttgtgttttcctcgttaagaccaatcttgcattgcggtttcgttaccaaaggtaaatccttatcatgttttagactcggaatagaaattactacttatcatgttttaggtaacagagtccaatctttgttgttgatgatcatacacattctattcttgattttagtatttggtttgttttctgaatgcttttcttggcagtaaatcatggctgatgaaagtaatgagaacaagaaagaagtgaaggatgatgagcaagaagtaagtttggcttttgacattttgtttttgtctacaaggactccttgattaattccctaaattaagacaatagattttgtttcctttttcgtttggtttgattgttgttgttgcccttttacatcagctatcctttgacccaaccaaaaatgaaaaccaagtaaacagttgtacttcaggatcttgtattaagcatgcatagttggtagatgattctctttggttactagaacgtgcgacttatataaatattgctttggagcattctttccttaagtcaatgcatacttcttcctgcttgttttttttctttttctgatgggaattatatgtacagattcttcgtagggtctttaatatcctgcgtgaaaatagtccggagcttgttggaatttggcttcttacaattatatggccaccacaagttcttcgtgaagagacagcgaaaggcacaaagaagacagtctttgtcaactttatggactattgcaagacgtatgaagaaattaccatatctctgccccttcaaacttttttacttttacttttggaaccattgttactagaacgtagtgagttttcatgtttgtatttggaactaaaactttttcaggatgcatcgaaaccctgatcatgttatggcgttcttgcttgctgagctgggtactaggggtaaacttgatgatcagcaaaggttggttgttagggggagatttacacagagggactttgaatcgttattacgaggatatatccgtaagtaacatttcctctcaagattaggattcaactaaacatccttctgttgatttcttaaagtgatttctctaattgctgttaatttcagttgactacgtcatgtgcattccttgcaagagcacagaggcaattctttcaaaggagaatcgtctcttctttttgagatgtggaaaggtaaaactctacccaattagcttctcttgccttggacaagtttttattttttgctttctgcgtgattgaataggaaagctgcttaagaaaattctcttctcttgatacttaacaagccaatgcctatctttgatgattgctgtttcttttacctagtcaggaatttgccaacattagtgtctgatattacgtagttaagagtgatacaaaactcattcggaggcttactatattgcatcatcttgatgtgatgctgatatctttgcctacgtactgcatgataaaagctaatttggttgagcaagtaaatgagtaattactgtctgaatactagtatttaagaagtatccaattttgttttgctattctgcaaatatgaacgtatggggtttgttttgacagtgtggatcaggacgacctgtggcgccaatcaaaatcaattttggtcgcaggtagctcaagtgattgatatattggtagctcaagtgagtagagagtagtcgtcttttcttgagatgtctaattactaaagaacatgttttggagttgtgaggtcatgcttttcttcttctccttcttattctgctaacttgctaatgctttgacttgacttggattttgccggcacatttatttttgagcaattagcttccctttgaataaacatatgtttttccaataactaaccttctctaaattttctttacaccatataacattcatttaattcgataaacaacattcttaaaagaatatgacccttttattatttataatgtaaattaccataaaccaaaatctatatcaaagtaactaacacattaaaatattagtgtaaattttttaaataattgttggtttccaaatgaaattaaaatgtctattttgctaaacttataacaaaaaataatagtgccggcttagttgggttaagatccggtggagtcgggtgggtaaattagtaaattgggtaaagctgtaagtaaaccaatgacgtctttccagaaatttggttcgaatcggttaggccggttaaggaacaggtcggtgttgtggctcgaccttgtagcgaaaggcaaaatcaatccattgcgtaagcaaaaacttcaaagttaaaaaccttaaaagcggcgagggcaaccgtaaaaaactattctccgacacaagaaacgaattgtctctaaaaagaagaagatg

SEQ ID NO: 16274 - DNA, 3000 bp, Unknown; identical to SEQ ID NO: 16273
  misc_feature (1)..( 3000): 2750-1469P.txt file - cDNA_ID_1389713; gDNA_ID_2684204; Annot_ID_137290

SEQ ID NO: 16275 - DNA, 3000 bp, Unknown; identical to SEQ ID NO: 13823
  misc_feature (1)..( 3000): 2750-1469P.txt file - cDNA_ID_1390897; gDNA_ID_2214654; Annot_ID_136485

SEQ ID NO: 16276 - DNA, 3000 bp, Unknown
  misc_feature (1)..( 3000): 2750-1469P.txt file - cDNA_ID_1390917; gDNA_ID_1971821; Annot_ID_58328
ttctaccattaaagatcaagtatgtaattgtacagactcggaagagctgtgaagagtcgccgcacttgaagctcaaggccaacaacgctatcttctacatgggtttcaagggcagtggtgatcatcatccgagtggtaagcatgtcgagtaccaaacaatagtacggaaagccatggatggaaaaccgggacacattcgtctagaagttgactcttggcaagccataccaagcgatttaattggggaggatgaaccgccctagagtaaacctgaaccggaatgctcatcctctgctgctcaataaaaagttaccgtagggttgacttcaagtcctttgatgacgactatactgtgaatctgtgattacttgttctcaatgcaataactacaagtctcttcttcttcctctttttaaagcttgtcttctacttgtgattacttgttctgaatattgtgatatcaatcaagacaagtatgaaatcaccaagagctctaagaatatatttttttctatcattttattccttggatttttgaagagtaacaaaacatatatgattttcatgagaagttgaagctgagagaataatatttagagttgtattatcgtgaattgttggtaacgatgatggaggctcctgggactagggttgggagatgggagttcacttctattgagagcaagtcggtgaggaggagtttctttgaaacaatgtgataggcggcggcgattttgtatgtgggagacggtgaggggtcttcttcaccgtctcacggtggatagccacaacatcatcaacgtagacattaggttgaaaaattcgacatcttatggtatttaatatgacgattaaaaagagagaaacaagtctatttatcctttgaattgttaatgatcctttttaatttatttttcaaacttataaaactatgaataatagcatcagaaataataaaaaaaaaaccatgtaactttattgcttatgagtcaatcaaagtatatatttattcatgttgtagcttttcaatattattaaccatgtttgttttcattattttatttttacataagtaacatattttcatgccattaaaattttacaacataagataattttattttataatattcaaatttccaatttccaatttcctctttagtcttaagtcttaacatgtcaatttttgtattaaaaaaaaaacatgtcaattttttgtacaaaaaaaataaaaccatgtcaatttaggaggaaaaaaaactggaaaagcctgacaaagaaaaaaaagctggaaatatcaaaaataaaatgataacgtcgcctgagagattcgaactctcgcggggaaaccccatgtacttagcaggcacacgccttaaccactcggccaaagcgactttattgatcatgaatcaatctaaaatatatatatatataaacctatcgttttgaatttttttttttggcaaacagcttttgatactattatatatatatatatatatattatccccacatatctttagctatgtctttttcgaaggaaattttgaagtattaaattaagtgacgatttacacacatatggagtaattaaatcgttttagcatatcttgtaatgttgtctctcttatccaactattctaaagaaagtggtgactagaaaatatagattatatactatgtgaccaactttttagtatatctttataaaaacgcataagatatgtcatatgtgtttcctctaaaacttgttaaagaaatgaaaaatctgttggtagatgtgaatagttatggactagtttggctttaaaaagaaaattgggcccatgtatttctattcatgcattggacatgtacaatgtacaaatatattcatgattgcaaacatgtagtatatatgctgactatacgattgttatttattcaaaagttaagaaaatgcacaagatacacatggacgaaatcgaaactaattgtacaataaaataataattattagtattacgaagggaaaagggaaatggtccgtactagttgtccgaacccgaagaagccccaatcgctgatgcaactgtctaggagccgccacgctgcgaagaagctctagggtttgttcgtcttcttcctcggtttcatcaggttttcatcttctcgattctgatttcggcttctgttttagctttattcggcttattgtgatttaatttgagctgatttggcattattgctgtgtagttaggggtcagggttttaatctgatcgcgtctaggttatgattcttttgatgatttcgatctttagaaagtcaattgatttgtttcttcgtatgtagctcgtttagctgacagatctgcatagtgtcttatcagttactagatctttgtgctatctctcactctgatttctggattttgattccttttttttttttgttagctgacatacaagtgtgagtgatgtgtgtctttgctttgtttccattttagtttagtttctcaaaatggaaatgatgaatattgggggttttcagaacctaagttgtagaaatggtctttttttgttatcacagaactcaaaaggtacttggtaggagcgagaagaaagtttctggagaattgctgaattgtttctttcaatggttttgtttctaaggtactatccgagtccaatgtttctgagagttctggtagcttgttaatttgttatactgaatactaggattgattttggcaaagcatgtgatgtttgttgcaagttcaagcagatgtgtttctttttataaatttagaagaagtttacttccgcagccatctatgattctcaaagttcttagctttgcgtttgattcttttttctagaaaccattggttagctttggataatgagtccttttctgcccatgatgtatttttctcagatggtaatcaagattgttgacggtgctctgaagatctgttgacctgctcagagtttgcttaaaaagtttgagaaaaaatg

SEQ ID NO: 16277 - DNA, 3000 bp, Unknown; identical to SEQ ID NO: 16276
  misc_feature (1)..( 3000): 2750-1469P.txt file - cDNA_ID_1390917; gDNA_ID_1971821; Annot_ID_176165

SEQ ID NO: 16278 - DNA, 3000 bp, Unknown; identical to SEQ ID NO: 16276
  misc_feature (1)..( 3000): 2750-1469P.txt file - cDNA_ID_1390917; gDNA_ID_2926193; Annot_ID_141166

SEQ ID NO: 16279 - DNA, 3000 bp, Unknown; identical to SEQ ID NO: 16276
  misc_feature (1)..( 3000): 2750-1469P.txt file - cDNA_ID_1390917; gDNA_ID_2926193; Annot_ID_201252

SEQ ID NO: 16280 - DNA, 3000 bp, Unknown
  misc_feature (1)..( 3000): 2750-1469P.txt file - cDNA_ID_1391092; gDNA_ID_2213639; Annot_ID_132230
gtgtagcttctgtgttaagccacttaactttctgacaagtcctacaggtacaatgaattttaagtcaaacctaagctttcattctggtcttaatcttgaaagcattatttttattatttttgtttctcgaaaagcgaaagcatttgtttgctatacatcaacaaatagaagattccgaagaaacgtatattttcttaaatggaactttgaaagtaaaaaatcgatctttagtacttggaacttgctagctgcatattacccaattacgaaaatgtaaatatgggatttgacattagaaacagcactagtgtttgattgacaaaatataaagcacattaacgcttaagtgatcggataccatcaccaaactggaaacctaaaccaaataccaaatttcaacaactttcaactaacgtttttggtctaacaaattaattattatgtaccaattaaccataatcgaagacgcttattaaatatttttatttatcgtgcgcgccatctatatatagttggtcatttctttagttccaaattaccttgaatttatattatttcatgccactgtttatgaaatatataatgtgactcagtcctgatattttaaagaaatctagtttaaatattaatgaatatgatatatagtgtttatttatttataatcatttagtttgattcaagataagagtaactaaaaacataagaaaaaactagattagtaatagagaatattaaatttaatctttgattaacttgtttgattaagttctacataccgcataatgcccaaagataaaggaaaatataattaaaatcatttagatttccccaaaagcaatttttaaaaggaaaaaaaaataaaacctattactcctacaagaaagggagaagttacagagtaaccaccacgtggataggctcataaaatatagagatctcgggtctatatatatataggagagtagagaaagtccataatcatcaagatttagtgttaaagcataataaatattttctttgaaatttgaagagcttgaaaatgagtacagccactttcgtagagattattcttgctatcatcttgcctcctctcggcgtctttctcaaatttggttgcaaggtacactatttgcatttttactgcttcttttcattagaaagagtttcttttttaaaaaaatctcataattactcgaattttcagatttttgacttttctttttttgcaggttgagttttggatatgtttgattttgacgctgtttggttatcttcccggaatcctttacgctctttatatcatcaccaagtgatttttcctatctcctctgttctttcctcttgctcctcgtaagctctctttctccacgatctctccccctcaatgtatattaatctaatcatacaaacatacatgcgtagctgtgatgaatatagaacgagatttaagatgaaatatctttgattaactatatatgttttccacaaagaaattacgaatatcttcttaataaaattaaataaaaagaaaaataaattaatgttaggtgaaccacatttttagtgagatattgttataacgattcactttgtaacattttcagaaaattatcgaataattatcaattaaaaaaaaaaggttaaaataacactataagattttatcattttgatttacatttttattagtaaaaggaattgaccaaagttttaactttacatttgttatttgtgtaggaagaacagctgtttcgtcgtgctcttctccctttgggactgattcatcatttattttatgttatgagcaattgtattctcattgttgtatttgcattattgtatactttctgctgatatcaagaaaaaatcgttggtttatgtgaggaatttatttatttcgtttaatttgtacaattggtaaaatgttgcaatgagcaggtttggattccggaccaccattaaaaaaatttaaaaccaacgttatataaatccatggtcacatgtctcgtctcatcaccaacaaatttgcaccataagtactcacgtggtccatgagaaatacaagagaatcatccccaccggttgttaataacccaatgttgataatatacgtttttgtcatctaatagttgacatgaatcagttgaatcgactatacaattaattaaggtcatatctttatttttggaaaaacactagtgaagaaatagagtttttcaaacttaaaagattacctaaatttgatgaatacttaattatcggagacggatacaaaggaaagaaattgtcaggaggcaaacaacacgtatatatccggagatcagtgggatcggattttgatctagattactgttgatatcaaaacaaaacatactatgtggaatgtgaataattatcatatttacgcatgaaaagatatatacatcaaagttttatctatctaatatatgttttgacccaaaaaaaactatctatctaatatgttgtagtcggttaagttacgtaaccacttacgataaacttttgacgtataaaatttgaaattgataaatacatgtattatcgtcgatatcacacgggtacggacctgtgacgcacaaagaaagatgatgatatatggggaaggcaacatagcataataataattactaaaaatgctatttatttccttacattttttcaacacgtaacggatgctcctaatgctaattagtagtggttacgaaagattaagtacctatcttgccaaaaaaatatccctttcgccttgtatgtagaaaaaagaaaagaaaaacaaagtcctcatttagcttaaaggtaaaggaaacaaataaaataaaaagggtaaggcaatacgtggctcaaaaatatctaaaaagttggtctctatataatgtgagagatatatcacaagaagaagatagagtaaagaagataaaaaacacaatttgaagcttttataatattttctcagaaactttcaaagagcttagaaaaatg

SEQ ID NO: 16281 - DNA, 3000 bp, Unknown; identical to SEQ ID NO: 16280
  misc_feature (1)..( 3000): 2750-1469P.txt file - cDNA_ID_1391092; gDNA_ID_2213639; Annot_ID_181159

SEQ ID NO: 16282 - DNA, 3003 bp, Unknown
  misc_feature (1)..( 3003): 2750-1469P.txt file - cDNA_ID_1391361; gDNA_ID_1620316; Annot_ID_153193
agaaggacccatcacagcagaaacacgtccaggtgatagttttccggtcacacatctcataagatgtttgttttttccttttaaagtaattgaaagatctttaaaagcaacttcaatcataggtctctttcttatatcaatatcattagccatagagataactccagagaaagtcaagttcttgttctgctcctgcattgctttttccttttcaatctggccataagcgtacctgaacatctggctctgtgtatgcaaggccttgccttttggagcatgttttttaatgtttttatcaccaatctcaagattaaacccttcaggatcttcagggttttgttcaatgtcatgtaacatctctgttagtttgttcttctcctttttctttccctttttagtgtctgagctgcttcctagcattggtggtaaagcagcatctgatccaggttttgcttggcttaaacctctcatcaaatcaggctgtttcatagatttcctcctcgaaaatgttcgagaaaacgattgttgcagctcggttgcatgcttctttgcaatatctttggcagatttccatttctctcgcgattgcgaatcacgcacactctgcactgctttttctctggattttgcctgccttctttctctcgttgcaagcacttgatcagagcagttgtataagattatgagcaagaaacctagcccggcctacacagtacaataaccaagggtcaaatgatcagaaataaccaacaaaatagatgaaactaaggagagatcaattatgactcacgaaaagcatgattccatatgctgtgatattctgatttgttgatcttggattacacgttgccaacttaaaacaatctgcaaaatattcatcagagaaaagacaccgtaagttctttgcttctccttctttatctctgatataacaagtagtgttgtttggacaaaatacatcacttactcagttctgcagtagaacctgtcctgcagtaatgtctggagaaaacaaaagattagtctacctgattagagaaagatgaatcttcaaagaaagtaatgaaaatcattcttagttagttaccctttagtacaaggaagcttgtcgatagtggaaggacaaaaggatccagctgaacagaaaacttcactactactaccaatatcagcccaaatatcagctccaccacaagtatgatttggctgaccagaaggaagctggtaatgatatctgcaaaaacaataatcctgcagcaatcttaccatatgttcaagacaaacttagaaaaatgagcaaaaacaagacttacgggtcgcataatcctgttgttctgttcagattagcttctggacaataagctcccaaaggacaagcttcacatcatagtgaggaaacaacattagaaatggatcaacaaccgaatctttcatcgtttctgaatgtttaaaggaggttaacttacggatcatgcaggtgataccacgagggcagaagaaacctgcgcaacaaggcgcacattgctgagttctaacaggaacattcttgtcgtctttaaggtcaactttcacatctttagcagtacgacaagcccatccaggctcacatccagacatccatgaagatagattgcagttcttgttcggtttcaagtaattagtagctctctttgcacctcctaataatccattgaagtatattctcacttctgcagccgtacatatcctctgcatcatgtcacctattctcaaaccaaaaacatcagcaaaattaaaatattatttcggcttctgtcaatgaaacagaggatgtataaatataccttttgtggttttaccacatgcgtttaagaaatctggctttgtagagaaattaaaggcttcgttataatcttcttttctgaaacaaagacaataacataaacatcttcaatgctataggataaaggttaatgccattttgaaactaacacattggtaatgcagaatccgagctctcttttgatgtcatcctcaaaaacttcggtgagattcgatattttgtcgaaaacgaattggttatagagacgattagccgcgggattatccaagcttctatcttcttgacaaatcactctttcttgctgaagaatcaacacgataaacacgaagaacaatggaacaaaattccctggaaaatatgaatttctccttcccatccctgaaaattttccaagaaaacaacgttgcaaagaattgtcttgagatcaggatggatcaaggagacattagacaattgaaggagacagaaagagagaattagggtttgtttgttttttctttttttctttttctttttggggagagagagattgttgtgtatcttgagagtcaagaaatggatgagaggaaggcatggcgatatatgaggaggaaagagacgaaaacagattttaatttgaccgtttgactttctctaactcgtgtcatggtaatagattcttcaccaaggaatcatactatgtaatttacagttaaggctctgtattttgataatgtttctactgtgacctctatagttttgacatttttggtgcaatatgtcaaatagaaaagatttgtttttctgaaaaatataaaaataaatttaccaatgtgttctgaaggcaattcagctataaactataaaaggataatgaacaaattggtttattcatcaataaattggtttattttggtttaaacatcggttttgttcgatggtccggttaagacggattgttaattattgtcgttgaaaattcaacaacttttttttggtgagaaaaactgaaagacacaaaatcagtcacgaaaacccccaaatccacagattaattagggttttcgatttctctgatgaaactgagaagaatctctcattagggttcttcattcttcagagggatttctcatatctctctcattgagcttgctaaagctgaaatctgagtttgaaattggaattcagattcccatcccatg

SEQ ID NO: 16283 - DNA, 3003 bp, Unknown
  misc_feature (1)..( 3003): 2750-1469P.txt file - cDNA_ID_1393284; gDNA_ID_1621198; Annot_ID_174793
gctcttaatgctcttcttgcctatataattcaaagttaaatccaaaacctgtttgattactaattaatcaaatgtagttaagggagaattttgctcaccaaatagcctctgaaaccagtttggattacaacagctgcgtaatcttctcttgcggtataagtacgtcttgtaagatttggtaactccttcgttgtcgaaggaggatgagtttccgatgcggcggagacggtggccggcggtgtagatgcgtcgtacctctgttctgtaacagaggataaaacggttgggttgatgatcgtcgttgtttctgtggatttctgcgccggagcgtcttttccgacgccggaggtcttcaccggagagtcatgattcgtagattttctaaataaccaacgtctcttctctttcttctgcagaaacagagcatatgaattatagtaatatacaaaacagagaaacaagaaacagagcatgtgaataaaaaaacaagaattaagaagcaagatctcgagactagagaaagtatacgaaccttgtcttcatcttcgtcgacttcattaccatgagcattgttgttgtgttctttcttggtgggagatcggaaagctcgtttcacggcagtgagccaagaagaagaagaaccgctcttcttacccattggaggttaggtaggatttaagattctcaacagagtcaagacatggtagtagtagtagttatgttcctgttttgggacatagaagagaggatgagagatttggtttagattcttgcgcagaaatgaggaagagagagaggagagtggtgggtggatcttgggaaacagaaatgtcaataaatttggaaggttgcttaagggagacttctgactctgaccacctctttaactgcgaccatgacagcgatgactcttcctcttcatttactttctccacttcatttattttgttatttttgtttaactcatttcactaaactagttatatcacattattattattatatcatgtacctacttgcatttgttgtacattcaattctagaagatttgttgctgttaaattgaaagatagagttttgttgttttgagagttaattttaaacaaatacaatataaactaattctatttcattatgcaaaacaattcttctttcccttggttcgattatgcaattatatttcatacattctaatttttgggttttcttaagatatgcatgaatattattctacttatatatatatatatatactagataaggcccgcctaagatataaatttattcaaatatgtattgataatatttaaaatttgaatggtaaatagtgatccacacttttctaatgttaaatttagtaatttttgaattaaataaaatttcaatcatatacattcaattttactatacattttaactatttcttttatcataataaactgccttttaactctatacactccaacttattgatgatatttgaattttaaatagtaactcatatttttttcagtatttaatttagtatttctttaaaataaattttaatcttacaacttcgattttacaatacaatttaaatattattttttatcataatagaatacaatttaattcgattgtatacaattcaaatacaatccaaattttcaatacaaatacaatttaattctatacactccatcttattgttagttttcctttttaattaataaaattataagttaaatttttagatatagaaatataaattagtatatgtaaatatgtttatttattttttaaagaattttttttgacatatgtcaacatctcaatgatagacctgacacgtgtcatgatctcgtgagttagtaactttcaaaactgtactttatataataagatatatgcttatatgtttcatatatatatatatatatatttattagatcgacaataacattaaactatcattactagtttacttttttaaatatgattttaataagtatcatataaatgtacaaagtgtatacaatacatgtttttatatatatatatatatatatattttttttatatataagcataaatatatagacgaacaaacaatgtagacagacctaggcacctagctatgatctatgcatacggacgaaccctattatacgtacgcatgattattgaatataccttcaaatataaacttgtgagcgtaaggttattatgttttcaatactgacgaatgacgattgtgattcatgttttgaaaaattaataaagtttaaaccatcgaatgcgtaaaccaattattcatcttttaccttaggaaaaagctggatatcattatcatatatttattaagcatattaaaccagaccaatgatttaagtcgaaaatgacagctttcaagctttgcttattggccaataaataacaaactaaaaaaagaagaaattttttaaaacgaactggtgaagtctcgtgttatcacgtgcatggagccagtcagacagagacatcatcaggtgcatgatggaccacggtagtccatttcttccctacaaccatacacgtggcctttttacatttaacagtcaaacatctggtcaacaacactctcatctgggcttccttacatcaaaccctactttttttttgtttatcaaaggcccaattgtatataagtgaaaagtttccaatgggcctttcaaggattattcccagcccaatatttctggagattaggtttatttatcatcgccaccaaagaaatttgagccgaagcttcataatcgtagtctgaggtatttttctcgatcctcaaacatttccaacacctaaaggcttattcgttacagatttctcaccaatcttcggatttattgtgctcgtacgataagcatatattagtaaatttagtggctatttaggaaatttctcgtttgatttcttgttgttgttgagatttgaatctgttgtttatggtttttgtgattacttggttttgcagagacaatg

SEQ ID NO: 16284 - DNA, 3000 bp, Unknown; identical to SEQ ID NO: 10503
  misc_feature (1)..( 3000): 2750-1469P.txt file - cDNA_ID_1393342; gDNA_ID_2213655; Annot_ID_181735

SEQ ID NO: 16285 - DNA, 3000 bp, Unknown; identical to SEQ ID NO: 7616
  misc_feature (1)..( 3000): 2750-1469P.txt file - cDNA_ID_1393632; gDNA_ID_1972143; Annot_ID_179287

SEQ ID NO: 16286 - DNA, 3003 bp, Unknown
  misc_feature (1)..( 3003): 2750-1469P.txt file - cDNA_ID_1393705; gDNA_ID_1620556; Annot_ID_160459
catacgaaccattttccctctgactaccactaccatagctaccaccactcctacttccaccatcatatctactactctcatagctcctaccactatcgtttctaccaccacgaccacccccacgatcactgtcacctccacctcggctatatccaccacctccacgatcattagcaccagaactagtaccagaaggagcaagtgcaccacacttgttacattcaactctccttgcaaagttcacgttcccacaactatacaaacagtttcgagggtaaacaatttcaaaacatgctcccacaaaggaattcaacagctaattcaattcattacatatgcagaaagaatggaatcccaaataatttgcaatcattacctggggttgggacaacgccaatctccatctctgcctccgccgccacttcctcttccaccgcgatcacctccttgatatccaccacctccaccgcctaaatcaaaacgaatcatcgaaatagtgagaaactaaagatttaacaaaagtagctcagcaaggaatggagaaatctaaagaatcataaggttatatcaatcagatctgcaacaatctaaatcacaaacctcgatttcctctaccaccgcctccaccgtaaccaccgcgtccgccgtaactacctccgccagaggcaccgcgtccaccatatccagcatcaccacctccataacctccccctccgccgtatccatcaccaccgtacgacggaataggcgcacctccgccgccgtcttgattgtacatcccagccatgacctagggtttgcgataaacaacagaccaaaactcttaacgaatcgtgtgagagcctttttagacgtagaataaaaaatctcgcgttttatttatatttctctcaaaaatagtggaactttattattgcatttatcttaaatcttaaattcttttacatcttatcttttaccgaccggtttcccaaaataactggacttgctttttttatcaaataagacaacatggttctaaggcccataatcatctaacctttacgaaggcccagcccaataacagttattttttacgtagcccaatacagttttgaaatgtggctattagagagaaattagaggcaaaatccaccaaaattttgctataactacaactttaaaagagtccggacagtaggaacaataagaggagaggccagctctgaaagaaatttggagtttgcgaagatgaatgagaagtgtcaagttgaatcgagaaccggcaattatcctcagaaggatcaacagtagtgatcaaaccaagtccaccaaagttgcagctttctgcactgtgatcattttgctggtacaagctattgaacgcgtatgaaacgttgcctggccatctgatgcctgaacacgacccgccaggaagtatcgatgtacagtccgcaacagcacacgcttctaatgctcttgctgacgcgtttgacaagtccttgttattgttcaccacacaccacttaggaggaaggtactgaacattctgcgcgtttacctgattcttatggttgaaactgaaattgtatttggcttgaccgtcgaaagtgaacactccccagtgcctctcaaagttcccagcagataagtttctctgatcttcgtccaagagactttcaatgtaggtttcaacaggaggacgcgggagagaggccgtctttttctccaagtgaactatcagtcctttaaagaacgcctcagcagtcagtgatgttgcattttctgctccatctgtaggccaaccgatctttgacacaacgatatccacctccgaaaacccaattgtgaacaatgcagagacaagtgtgtcatagcttagatcaaagctgtttctgtaggttttacgtccgtctttgtgagcctttgctgtttctttaaagaggctaaagtcaagggagatgttcttgttctggtgaaagcttaggaaaggagagattgtcacaaaaaaaggagagtggtgctttgtgagaaaggagaggagttcaatcatcgtcttgttgaggtcagccctaaagtgtcctgaagaaggtcgaccagattcagaaagaaaggaatcaaagcttgaggggactacaaccttcacttcatttgccaagttcgccttaactaaagcattttggatattcatagctgccccaatcacaaaaggcttatactgattgccatagctctggagaaatggctcttctccaactgctacatacctgaaaatcaattcttttctttaatgataatttcacaataagaagattggcaatttggcattgaaacaaatccgactcattcacattccataagttaaattccagcttaaaaatcttaaatctatatatatataactggataagcagaagagaaggagaaagaagatactcgattcgaactctgtttccaccgttgaagtaacgagtgacattgtcatgtacccagctctctgctacctttacggatgcattcaagctcttgagcatcgaattttggattccgatagtgacaccaatattagaaccagagagagctcggagaacttttgggtcggcatcgaagagcttcactttgacaatgccgtttgatttcagaagctctacaacctttgaaggcggaagagggtgcgacgcttctgtcccccaatttatgccaactgctctgacggttgttcccgtcaagctcaaccctgccgtgacggcgaggaggaggagaaacagccgacgagccatcaaatccagtgaatctcgtacttccacgataatgtcgggccgagaaattcaatgtttaaaaaaacaaaacactgcgtgccgtttcacgactcagcatctcactgttatttagctatcaaaacgacacggtgtttagaaattgggcttgggcttcacattccctaatcatcatcatctctgaaatagaaattatctgaaacttagagagacagagagagagaaagctcaaattcaatcatcaatg

SEQ ID NO: 16287 - DNA, 3000 bp, Unknown; identical to SEQ ID NO: 15107
  misc_feature (1)..( 3000): 2750-1469P.txt file - cDNA_ID_1393841; gDNA_ID_2910749; Annot_ID_193781

SEQ ID NO: 16288 - DNA, 3000 bp, Unknown; identical to SEQ ID NO: 5490
  misc_feature (1)..( 3000): 2750-1469P.txt file - cDNA_ID_1393884; gDNA_ID_2926140; Annot_ID_197439

SEQ ID NO: 16289 - DNA, 3000 bp, Unknown; identical to SEQ ID NO: 5490
  misc_feature (1)..( 3000): 2750-1469P.txt file - cDNA_ID_1393884; gDNA_ID_2926140; Annot_ID_138981

SEQ ID NO: 16290 - DNA, 3000 bp, Unknown; identical to SEQ ID NO: 5490
  misc_feature (1)..( 3000): 2750-1469P.txt file - cDNA_ID_1393884; gDNA_ID_1620794; Annot_ID_50487

SEQ ID NO: 16291 - DNA, 3000 bp, Unknown; identical to SEQ ID NO: 5490
  misc_feature (1)..( 3000): 2750-1469P.txt file - cDNA_ID_1393884; gDNA_ID_1620794; Annot_ID_168404

SEQ ID NO: 16292 - DNA, 3000 bp, Unknown; identical to SEQ ID NO: 10083
  misc_feature (1)..( 3000): 2750-1469P.txt file - cDNA_ID_1393962; gDNA_ID_2213624; Annot_ID_195772

SEQ ID NO: 16293 - DNA, 3000 bp, Unknown; identical to SEQ ID NO: 10083
  misc_feature (1)..( 3000): 2750-1469P.txt file - cDNA_ID_1393962; gDNA_ID_2213624; Annot_ID_132002

SEQ ID NO: 16294 - DNA, 3003 bp, Unknown
  misc_feature (1)..( 3003): 2750-1469P.txt file - cDNA_ID_1393970; gDNA_ID_2214656; Annot_ID_188772
ccatgttaaaactatgagaaagttgactcttatctataaatggaacatgtttttttttctctctaagagctggtcatgcatgcatatatcccaaaaatatggaaataaataactctaatcactgggacgatccttaattgatctttagaaatagttgtagaaaaagtgattaaaacatgggatatatcatatatcattattatgtgaagtgtatttttaattggtacaaattatgtaaaatgagttattagtacttacttcatatagagaagaagcgcttccacaaatgaaatcggtggctccttcaatatagcagttcttgaagtaatggtttccattgtcgtcaaggagagtgtcttggtacgacgttatcacgcatccgtagaacgctgccttatccgccgccaccctcagtgcaaccgcacgtcccgccgttccaaacttattctacttacaataaaacgaaacacatcaatattagtaactttctttttttgttaattaataatgattcacttacttatgatattttggtgatctactttgaattggtattttataaaatgaatgtatacgatgtatgatgaagattgacctgaatagtgagaaatcggcatacaaaatcggatgcaaagatagtgagagtgggtgattccaaaatgtcttcgccatcgctccatatgagaaaagtgttggaagcttgtgtcccactcaatgttatgtagggtttctccgcaggtatcaccactttttctctgttatcaatgaaatcgctaattctcaaaactatatactttaaaagcatagaataaactaatcatcaataacatatactatttaggaaaaaaaatcataaatatattagtaggtcaaaaaagcctagtacctaatacccagctgataaatatcaacaaaatctaaaccctaaaccattaaggtctaaaaacctaataaaccttaagacgacttaaatatagaaaatctaacaaaatattttatatgtaccggtaaattccaggcttaacccaaatgaaatagagttgagagttgtttagattgggagggatagattcaattgcttcttgaatcttactgaagtctcctttgcccgattgatcaactcttattagaattgcagtcgaaaaatcaatggaagatggagaagaagaagaagccatggaagaagatgtgattgaagagaggatgaaaatattgatgattatgatatgatgatagttagcaattgaacgtttggacttcgttttataaagtcccatcttggcataacccatgtgaggtttcacgtcttggcgattgtgcagaggacaaaaaaaacaaatacaagatagaaataaaaaatgaaaactattgaattcaattagtgaagcaagagtgtgaaaattagaattttgaaaagtttggtttgcacataaaggagattgttttatatacataccaatggttgactaaaaatcaagatgacgtggtgggattggccagcggtcgaattcttatgatcgaagttgaaagattgcatttcgttgacaagagattttttctatatcagattcaaactttaaactctaagacacaagttctatacacacaagaatatatatttgtatatttaaccatggtacataacctagactactctccaaaacttgtataaaaaggattttattgtcatcctacaagactacaacgtgtcaacgtctacaatgacctaattaaacagaaccaaaccagtttttaataatgttgggctgaaattcgatttctaacctcttgaccaacaaaacaatcttccatttgaataaactacacgtttttggttcacttgaaaagtttttatcatcgatacgtcaatttatctacatttatcttacgtatgtttggtaaatggtaattgaatatgaacattaaaaaaaaaaaaatcaaacattaaactatgagttacgtcgttaatatgtaattgcttaccaattttttttttgttaaatttaagtcattagagaatacttaagatatactttacgtgtagggttggcggcttgcatgcttcgtgcattagttttagcaatcaaaaagagatctataatgagtatttttgtatgtttgaatgtaagaactaaggaaaaaaaagcgtgtatctatgttttccgtcaaaggccgaatatatatcccgatatagtaatgggccgaaacccaaaactaaaggcacatactaacaaaactacttctatagaaaattatagatgcactcaacacttttgtctatatactattcccaatagtttgttttttatcactaatggtagtagacatgttgatttgcacattgcagctacaaaactacaaaaaaaaaaacgagccatatggatgcttgtcagattgttactgtcacatgaagaaaaccaaagtcttatcttttatttttatacatccaagtagaacacgacacgattggtaaacgaaacctatatagtcaaaaaactcaaaatcaacggattttgtttactgtttgaattatgttcttgttagttagatttattcttttgtatgcatatgtaacaattttgtgtagggaagaaattatagtcataataactcattaactaaaaataaaatatggtctaatgattagactctaatccgaacaataacaaacaattattttcgtttagtgtctctcttattttatccaagaaaaaagaagtgtcaatttataatatcttctggaaagcagccgacagaaaattgtgggctcacatgaaaaaaatttcaatgatgcgtcaaaaagcaaccaaacgactccaaaataaaatcaaatcaaaaatcaaattctctacacgcaactttctttcaaatacaaaaccaatcatctcgattcatccaacccgcgaagacccagaaaccaaaatcgaagacccaacaaaacccacaagtcgaaatctcgaaatccgttgagagtttgttcctttttttgtttgctcggagatg

SEQ ID NO: 16295 - DNA, 3003 bp, Unknown
  misc_feature (1)..( 3003): 2750-1469P.txt file - cDNA_ID_1393996; gDNA_ID_1620644; Annot_ID_47547
agtttgcttatcttgacatttagcaaagcttcgactttgaccaaaaaaaaaaaagtagaaaaacaaaacaaattatttcttattataacgtaacaaattataagcttatagttgcggcggataaaataatcagatctaacaagaaagaaccgttacttggaagatggaatgatccatggtaattgaatgaaacactcacctagtccgacatgatcgcacttggctatgcaatgggaatgaaactgtgcgttttagctttgccgttttgttctcaaatatcttctccatgcactttttctgatcggccgaattaaccacaatcgccaaactctcacaattgttatctttagtttctttattcccactcttctcggcagaaccgtcgacacactgttcttcttccaccatgaagctagcaacttgcattgaaccgtggcttgacgagaaaatcatgacaataccgagacctagccagatgagaataggaagaatgatcagggacaaggcgtagtagatgatccattggaatccgctatggttcttgccgtttaatgtccattcaaaagcaaaagcaattccggagaaaaatgtggcaaaactgcctataaaaaagattctaacgattctcgggttaggaacgtcgaaaaatgtcttgatgtggttaagccaacgctttggtggttgcggtggtggactagtgttggtggtctttagcttttggtccatgcttttttttcttttctttaagtggaactttgagagtaagcttgagatgaagagactacataagtcgttgaagcttgactctaatataaggagattattaaatttttttcctttttatttgttgaagttgttcaaattcttgcgatttaatgggtgagatttcgaattttgaaattacaataatacaaagtagatgataatgtaactatttacataaaacaacaaaaccaagtcaaaacagtactactagatatttgccttttaacggaactatcgacagtaaaaacaataacgagcctaacttcatctttcattcgacttttgatcctaattgttaaatctaaagcgacaaaaaaaaaatcaaaagggatgacgagagagcaatacttgatatatagtggctactggctcataaatcttggttacttgatagtgatgtagcggttggtgccgtgcctagcccaatagttcttgagatcaaccggagaggaaagctcatgcccttcaccagctaaacgactaagtaacctggagaagacacttccactcattttcctgccgccaactcgggaatgccgcttgtttggcatctgcgggagcggatactcagacaaagtggttgtgcagcaagatgattgccagccgccattgccccacttataacactgacgagcagtcccggtgcaagtgcacatgggcactggcattgtcatctcatcgaacgtgactaggacatcgttactgtcccaatcctttctgcttttctttccgggagaagcaactggacggttcagatcctcgcccattttctttccctgcttgctctctttcttccttttggtcggtctcgtgttggctgcttcaggtggaatagttgatataggggaaggattaggtaagtggctttcttcagttataaacctttgggaaccaccgcgcttggcacacgacaaaatgtagttaagattgttttcacggtatcgaagagcatttaacgcactttctgtctccatgatagcattatctctttcagagagagctttgtcccgctgctcaagtgcttcatcacgagaggctaatgcttccttagttgctgcaaccgcttcgtttctttccttgacagctgcgtccctctcagcaaggatggagatgatcttcttattcatcaccaatgcattatgttgctcctttttcggcatcacattctactgcacacacacacagtttgtacttaggtttcattcaaagtaacgaaaacatgtttttttgttttagtgatctgcttcttcaagtgtttttgcttaccacagattgtgttcctttgtagtaatcgggcttgtagcgcccattttcatactgcccaccactctccatcctcttactttcaactgcaatggagaaattgatatcaaacattgtgaaactaggctgacgagtaactaaaaacagaaatactccaaatcataagcagttccataacatacatttaacccaaataaatcgagaaatcgtatcatatcccacaagtcagcgtaataccatccaaaccaaacgatgaagaaaacaatggagcaagtaagatacgcgggaacatatatagagttcgaatttcaagttaaagcaacgacgagagagctcccagaagaaccaaaattcgaagaaaatgaaaattgtagagagaaaaacttggcatgctgaaattaacagataggtcaagaacacgattaacgatcgaagacttacggatttcaacgagccttcaggagaaacaagcaacggaaatcgagaaagatctgaggatacttggaaatggtgtctgtgtaatgtggcaagaagtggaagacgagccaggtactctcggttcaatttactaatatacccttgtcttaaaactgctaaacgagagcaagcaagaaggttattattgtctatccatcttactcgtaaaaatgcaaagacgtttctgtttcaatctctccaaatataagccaaacaggatatgattttggttctggtggatcattctagtgggccgtatgatgggcctaagaataaggcaactaatctgggtcgaatacgggtagacccgggttgagatcccgacgtgtgcgcttcgctgttgtagtagtagtatatctcatcatcaatcaggcttttgagcctcggaaactcaatccttgtatattcaacggagagagatctgcgagagaaagagagatcagattccggtgttccaaggaagcacatattttaagatccagaatcgcctgagagatg

SEQ ID NO: 16296 - DNA, 3003 bp, Unknown; identical to SEQ ID NO: 16295
  misc_feature (1)..( 3003): 2750-1469P.txt file - cDNA_ID_1393996; gDNA_ID_2926217; Annot_ID_142262

SEQ ID NO: 16297 - DNA, 460 bp, Unknown
  misc_feature (1)..( 460): 2750-1469P.txt file - cDNA_ID_1394255; gDNA_ID_1564366; Annot_ID_149332
  misc_feature (426)..(426): n is a, c, g, or t
ataatagkactctgtacatacaataaagaaaatgaatcaagatattagtaggatacccatacgaatttaggaaaaatgaatcagataacggatataatattbtcttatataagtaaataaaatctgtaaatataatttttttggacggcaaatctataaaaatagctattggataaataaaaattggcatgtgaatgatatttatgaactgacatagccatgtgttataatctcacccacagataaccacaaaaatatataaacccaaaaagtaataaaaaagaaaggaataaaaggaagatattctcccgaaagaaagacagagaaaaaaggatattctaattagaaaccttaagaatattctttttaatcccttttatatctctaaacctcttccccctctstttcttcttcattcatcattcntcacttacgtttcccagaaaataaaagagctatg

SEQ ID NO: 16298 - DNA, 3000 bp, Unknown; identical to SEQ ID NO: 7548
  misc_feature (1)..( 3000): 2750-1469P.txt file - cDNA_ID_1394339; gDNA_ID_1621151; Annot_ID_173258

SEQ ID NO: 16299 - DNA, 3003 bp, Unknown
  misc_feature (1)..( 3003): 2750-1469P.txt file - cDNA_ID_1394384; gDNA_ID_1620327; Annot_ID_153522
catgtggagtttgaacccaccagataaatgactcgagaaaccatccaactacaagctcccaataactttacattatttgaacctatcagatagtgactgggcaaataaaatcctactacaatctccccgtatagttacatgtcccctttttcttttgtccactgctttgcaaaaagctagtttgaaccaaacataacaaggaacaaaaggcactgtcaaatagctgaagtagtggcactttcatgggcgatgtcttaccttcacaaccttggaattggacttgtgatgttcataagtgacaccaaagcattgtttcaggcgttagaaggccatcataagtggcttagaccggagggtatcacgacatagatcttagaggcaaaaggatgacacatcataccatcttagggagcatctctatcagtagtatctcatagagtatttggagattaaaaaaaaaaccaatgaaaaagtaggagtgagagtgtttcttgtttgagaaactttatacatttttatttttttggctaatgattttatacattcaaaagtacgtccagaagggcgccaatcaaattacggatactgtagccaaaaggacctcttatttcccgatttattaatgctattttgtaaagttgtactcccgtagttaaatccactagttgatttggatgtagacaacatttgtattgatgagtaatcttaacgataattcggtaagcacgagacaacaaaaatatatataacaagaaatgataaatatgaaagaaaaaaaacagaaatgaaaattctcatattcatgtaacatatacgaattacaccacgtgatcattacaattcctctatttaaacatctccaactgatcaacgtctaaaaaaatcaaatattggagaagagagagtgaacaactatgaacgtcgaaagagaccaacacatatctccaccgtgtctcctaaccaagaagatccctatcgttgatctaagcgatccaagcgacgagctcgtggctcatgcagtggtgaaagcgagcgaagagtgggggatttttcagttggttaaccacggcattcctgccgaattgatgcggcggctgcaagaagtggggaggcagtttttcgagctcccggcttccgaaaaagaatctgtcacaaggccagccgactcccaagacatcgaaggtttcttttccaaggatccaaaaaaactaaaggcttgggacgatcatctgattcacaatatctggccaccatcgtccatcaactatagatattggcctaacaatccttcagattacaggtattgaacatcattgaaaagccgatatatagtttatagttataaaccttaacattgtataagagctcatgtaagttatataatatccaacaaaatgtatgtaattaaatagtatacaagttacatgaaacttgattgcgttatttcttaccattaaaaaacattcatcaagtttttacattcttcatgatacttaaaatgtttttcggctatatagattattatgtagctgaaaattaatagtattatttgggagtggtgatggtttcagggaggtgactaaggagtacacaaggaatgttacaaatctaacggagaagattgttggttacttatcaaaagggttagggttacggcgtgaggccttgcaataatgtctaggtggcgataaagcacagtatgtgatgaggatcaattactatccgccatcggattcagccatcggagcaccggcgcacacagatttttgtggactcgcacttcttgtctccaacgaggttccagggcttcaagtgttcaaggatgaccattggttcgacgttgagtatatcaactccgctgtcattgtcctcattggggatcagatcatggtccgtttgtgtttggtttttaacttttggaaatgtttttggggtttggtttttaaaatgtgtgaattgcatgcagaggatgagcaacgggaagtacaagaacgtgctacacagatcaataatggatgcgaaaaagacaagaatgtcgtggccgattttggtagagcctaagcgtggtttggtcgtgggacctttgcctgagctcacgggagacgagaatcctcccaagtttgagtctttaacttttgaagactatgtataccgcaagatcataaaggttcttcgtgattgatgctaaacctcagcaaaatcatgtgttgtgataagacagtggcattagccaatagcttaaacaaaaaaaagtactagagtacaacctcttattattgttttcaatgttttgtttttatatttttttcagaataaaatatataatggttcgacgcatatttttcaattttcttttggtttaattaatgataaaatgattgcaactctataaatatacataattgtgaaataaacctaattgctatgttcttaattgtcaagaatttatcttcgaatgacacgaaaatcgaatttgaagtacgagacatgatttgatctgtgtatattgtacatgtcctggatcgataaggttcccagtctagctacgtacactagtttggtcagggatagctttatggtaacgagaaagaaaggaagtgtatccaatcacgatgaatcgttttctaatctatttctttcagtcctattcaactgattacacatgtcacatgtgcgccaattggatgctgttgaaactttgaaaatgcaccactatagtgttaacaatgagccggcgtgataccatgttttctttattttcgaaaggtgtatccattattgtaattttggaccaaagcatatgacattgatgtgtctctgggcctactttaaatcaaatcggacttttctcactcgattattaacgacccgacccgactcgacccggctcggaccggataattacatttgtagctatgagaagaaaaagaagaccacactactctctctatctctctttctctctatctctctctatctctctcatttcttcctgcgtcaatg

SEQ ID NO: 16300 - DNA, 3003 bp, Unknown
  misc_feature (1)..( 3003): 2750-1469P.txt file - cDNA_ID_1394465; gDNA_ID_2214540; Annot_ID_134460
agaagcaacgagacatgcatggctatgtcctagcgaacatagagtagtagtttatacaagtataccaaagctaaaccagtctcgtgaactatatatatacgtcaacaccgaaactttggaaatgtataatacttgtatagttagtctctgtgtctgatattaaattgtacataaatttctttatgattacagtttttttttcccccgatttatttgacacggtttgggttatatatatgattagtcacacaccgacttgtaatatactctccaatacacgcttttaaatttggtgcgttccaaacggatgataagaacaccatgtcacactaatcgggtagggacgtccactaaccatattgacagttgtatcaactacaactacaccatatataacggtagatccattgcattcgtgtggaatctatagtgtttatatttgcatatatcatgtcaaatgatattttgctaatgtaggtaggtgacgccatagaacttttgaatatattaatatggaatcaatgcttttaagaagtggatggtgattatcatttatcactctatcatcccacgtttcatacacgctgcgacttatattttgatttacttttcttatgggtttggtccaattccaccgctaaacactatgcacaagtgcaaacaaatatttaattaaattcaacttccgatttaatcggtcattcaaatgagactaatgagtccaccaaactccacaattagatacccataaataaaatagaaaattcgaggttatcaacgtgcgataagatccactttttgggttatataataactaaataaatgaacaaaacaaaaatagatttgactaaaatttggctataaataaatttgagtttcaaagaagccaaacccgtcaacacatcttctttaagcatctctctcccttcaaagaaaatatcacaaaaatggcaaacgtctccgctttgctcaccatagctcttctcctttgctccacgctaatgtgcactgcccgccccgaaccggccatctccatctctatcacgactgctgccgatccatgtaacatggttagtctgattcacatgccatgcatgaatcaatttccatatataaacacaaaataaccaatatcagagcttctaaatttttaaaaatatttaacacatcgaataggtttaataaattttttgtaatgtatgatgattactttggcaggagaagaagatagaaggaaaattagatgacatgcatatggtagacgaaaactgtggtgcagacgacgaagattgcttaatgaggaggactttggtcgctcatactgattacatctatacccagaagaagaagcatccttgattttcacttactcatttctaacaaacttttgctcaagattatgtaatttatgtcatccttaattagtatttgtcacatacaagatcaagatagttatgattgtgattatttatatgtattttggatgatatattgtagaactagaagtttgacaataaaaagtttatagtgtcgttgtatgtttaagaagtttgacaataaaaactttatagtgttgttgcatatatgtgttgaaaactcattaaaaacacacacacacatgaagtacgcgtatatttataaataaactataaaattgagagtggattcatggaatcttttttattgaaaatacatgttggcttgtttgattagttgagagactgctaaacatttatttcatataactagcaaagatcgatatatcgtcgtgtacacaaaagtactactgtatatgtttgatcgaatctgaagaaccaaatttatattttcagactgattgtgtatatggtctcgtaatatacaatcatatgataattagccatcactaatgtagtcatgtctttatgctgaaagagtgtagagactctgccgtcataatgcagctgttaactacgagagcgaagctaaatatttttgaaaagctcccacttcaatcgaacggagggaaaaacctcttgcgcatggaatagagtagtcaacaatcatttgtaattgtaatagaaaaaactagtttaattagaaattgagcatcaaatttaaacagctctgtaaaattttctaattgtaataagaaatttttgttatatctgtcttaaaatatacaccaaaggtagacacaatatctcctacaagtgcacattcaacttctagatatagacaaagttccaaacttataataagtttttttgcaaagttattggttataattaagtttaattggtttatcaatgggtaaagtatacagtaaactgattaaacctagctatgtgggttatagatctcgaactatttactcgaagtacattaagttatagaactttcatttcggagaaaataaggataaaacttttattttatagacatatgaactagagttaaaatatatgagctctatctactgatactttttatgagaaaatagaccttttttctaaaattatctttgatgaaaattttgtttggtactccaacatgtgtacaaaagttgcgctagatcaaaacatatgtaagtaacacaacttatgacattcttgattgcaaaattagttaaaatctagttgtttttatattattgttgacacaaaaaaaaatgtcagcatatgaaagcctccgtctgaagcagaaggaacgactctggtctaaaactctaaaaaccctatcttcttcgttctaaacccaaaacacacacaaaacaaaatggtgctacttctccgatatcgatccttaacgataaatctcactcctctaatacccaaatctcaaaaattccacactctccaatcatttcgtaaccctaatttcatctccatcccaaaaatctcagcctccacgaacaatccaacaacaacaacgaatcggtcgatctccgacgcgactaaattcgctaagtcagtgttattcatacctcctggtgtagagattgaggaactaacagatgatatg

SEQ ID NO: 16301 - DNA, 3003 bp, Unknown
  misc_feature (1)..( 3003): 2750-1469P.txt file - cDNA_ID_1394502; gDNA_ID_2214505; Annot_ID_133736
aaccacgaatattcttcatttaataaaataaaacactaatattaatattatcaaaccaccatcaatcctgtaaccaattttcacttttgattgttcttccttattctcagctaaccatgaagttcggcaagagcctaagcaaccagatcgaagaaactttacctgaatggcgcgacaaattcctctcatacaaagaactcaagaagaagctcaagcttatggagccacgaagcgtcgagaatcgtccaaataaacgttcgagatccgattccaattctgtcgacacagatccaacggttggtatgaccaaggaagagcttgatttcattagtcttcttgaagatgagcttgagaaattcaattccttcttcgttgagcaagaggaagagtatatcattagattgaaggtaaatcctcaaaaatttatgtggaacgatgcaaaaacttaggttttgatgtagaattgttaggtttgatgatttgggatcaatttgttagttttgattgcatttactgattgttgattccaattcataggattctaagatttttcataagtagatgttgttggaattactattatgacgaatgactccggccaaatttccggtgaagtccgtcaccggaatgaccggagcttggattcctcgtaaatcatctgaattagtagtttcgattcgtttggaaacgtagttgaatgagaaatgagcatagttagttaaaaatttaggtccatgttacttattttgtagcctaaggctagaattattgcgtggagcatttttagtttacatagtgtattcaactctatttcttggtgggaattggtatcgtaggaattgaaggaccaagtggcgaaagcgaagaattctaatgaagagatgataaatataaagaaagagattgttgattttcatggagaaatggttttgttgatgaattatagtgctcttaactatacaggtaaacttttctttctcatgtcatctccatggttattgtttttcgttcttttctcatatgttctaatcattcgtagcccgaaagccgacgttgagtaaacagaacaagctcacatgttggacaattgatagtttttagatgttaaaactcgtttacaaggtcaagctctagtttttagcatttcctagtaagtgaaaccgtgtcaatgggcaatatttttagaagttttgtgaaagattgattagtagggaacttgagttagtattaacattacgtctatgttaagagtcatattctccacgatctttgtgttacttgttaaatagaaatgtgcccacatgaaggaatatgctgtaatttgtttaactggccactcatcgcagatgctttctttatacttttttcttataaataacttgaggtttatgcctttattcttattcgctaaatgtgtagaattgtgttctattggtttacaggattggcaaagattctcaaaaagtatgacaaaagaaccggtgctttaatccgtttaccatttatccaaaaggttttgcaagaacctttcttcacaactgacctactcaacacatttgtgaaagagtgcgaggctatgctggaccgcctctttccgtctaacaaaagtcggaatctggatgaagaaggagagccgacaacttctggaatggtcaagacaggaacggacgattctgaacttcttagagtaccaaaagaactgtctgagattgagtacatggagagcttgtatatgaagagcactgtgtcggcattaaaagtattaaaggaaatccgcagtggtagctcaacagttagcgtcttctcgttgccaccgttaccggcaagtggattagaagatgattcatggaagaagaaagttggtgtccttgaacaagtagcgaaatgaattatgagtattattatttttaaatctctctttttttttgtactttctttaaatagtacaagtaattgtatacgcttacagctgtaaaagatgaatcaaataaaacatagaagtgtgatcatctttcaacatttaaacttggttgcgtgtactttttcttttgctgcatatcatgtatgaaaaatcttctgtaagactgtaacaccactttcaagcagagagaacaatgaaatacatacgccatttcgaaatcttatgtattgcattttagcatctgtgggtcaatcggtctctgtactcctaactaggtgatatttggtccaatttaagggcagctcattcaatcacaaagaatcaaatatgttgcagaggaaactgttctgacttctgtgaatgttgcaagattgtatagctgcttcttgttcggcccttttatatgggctttgtaatatatgggccttttttatgtgggcttagataaggcttcgacaaattttagactacgctttgcgtccctaagtgcggccactcagtaaatcatctacgtcacttattgatcaaactatggctgggcagtgggcaaaacaaacgaaccagaaatcctaattttgtgtacttcaaaaatcaccattttttttttttttttttttactattataacaatactttttgagatcaccaattttcttattttataactaattaattctttcaagaaatatttaattcacttttttatatattttaactaaaaaagactagaagttattactttttctttttgacccatactattaaaaatataactgtcactgaatcggctctaaatctcctcgactttcaactcctacagacattcagacatgtgcaacactcaacgcactgtcgatattacatagacccgaaataaaagctccttgtccaaaaacttcattcaccctctcatcgttatcttcatttggaaacaactaaacaatattctgttttattaatattttcgcctatttaaaaattcaattagaatagtgtatccctcttctctattccttcaagccaactaaaactacattgcgtgacttcttctgtaaccatttttctattccgatcaaaccatg

SEQ ID NO: 16302 - DNA, 3003 bp, Unknown; identical to SEQ ID NO: 16301
  misc_feature (1)..( 3003): 2750-1469P.txt file - cDNA_ID_1394502; gDNA_ID_2214505; Annot_ID_184087

SEQ ID NO: 16303 - DNA, 3003 bp, Unknown
  misc_feature (1)..( 3003): 2750-1469P.txt file - cDNA_ID_1394622; gDNA_ID_1620452; Annot_ID_157502
gagatccttgagactctcaagcaagaaccggatccggtttaccccggcgcgagacgaaccgggagagaacgcagatgggtctgactccatataatgcgggtcgataacaaaaaccggatacataaattcagaaccttttgaggcgtattcaagagccgggttgtcgtgaacccggagacctttccggaaccaaatcagtgaaccggatccagtagccattgatgttatgggattgagacgataacttgaaggtgaacagacgcagaatcgttgcatgaatatgtttgagatttctatagaagtttcttttgagaaattcgcgcctttgaaaagcgcgagagaaggtttcttaagacgaagatgtggttaatatacgcttcttcaactctgtgtttgctaatttgcgcggtaatcagcgtaagataaaagaagggaataggttattatcaacggttatatttaggccacgtcattactaaggagcaacatcatttgggcgatgtgttcaattatccaacatttagtgcttattagtatccatgattagtgaaattaagaaaatttacttcatatatttgagattgcaatcgtaattatatttgtatactaacattttaatctttatacgtgttgaacatatctaccgatccaacagttagcattaacaactgaggaaaaaaaaaaaaagcattaacaactgacaacaaataaaaagctaaactaactaatgatccaacggttcacaataaagcaacatcatacacgatccagaccgtacaaacagaaaacgacgccgcacaataaagcggttcttgagtatcatcgtaaacaaaaagttattcttcatcccataaaagagagacattttaagttcgacgaattattgattatttctggatccgtgacccgatccagttacttcttgacccgaacgtcagacgcgagtcgcgacgcgatcgcagaatggtacataacgtcgtggaatgtagaagcttcggcggttttcctccgcagctgcttagccttctcctccgtgagacaacatcgcagagacctcttttcagctttatccagatctgattccagattcacggttttgttgacgtaatcaggttccgatgacatgccaaaaagaggagcccaccatgaaaccgacgaaacaggtttcttacgggctggatccgattcggaagatgctcggatcgaggaaagagcggagcaggagatgattgtagccattgttaggtaaaatgtggttatctgagagaaagctcaaagctgtttttaggaagaagagaaagattaaggatttgtaaatttttggattaagaaaagaaaatggatatgtagatatttaggtggaatcagctgctatgcggtgtggttttttatagtgtggaatgttcgtttcactggtttttatcaacgtaagggtattttcggaaagagtgtgcaacggtaaatgcgttgtgcactacgataagtacggtggagatgagagcactggattataaaaaaatttaggagatggataagattgaaggcgtggagcagcgttgccaattgtcaaatgtcttcgtcttcacttttcgctttaattatttgttgattaggatatttttgtttggattttacattgcttgtgtgacttgtcgctttgacaatatccaaaatgacgtgtactcattggaaaatagagttcaactattatggaatattcttaaatcaggaataatcgtcggtgatatttgactatatctctttcaacgtatttcgaactcgtaacaaaatgtcagtcttcttttatcaaacggcaaaatgtaaaggtaaatgcatgtatatgatgtgatcatttgcatggaataggagtttttgttagatttacgaatgctgaacgcatataagtcttttaagactcatggtattatactattattgcatgtttcatcagccataaataatgtgcagagaaaaactaactaacaaaacattgattatatattttattgtatctaataagtaataactaaaataattagagctaagtgattgactgatttccttcgttattttgaattcaatttttgggctttttcctatttggcagattcgtatcacattagcaacactagggatttctgttttagttgcaagagaagataaaacgttataaagcccaaaagacccaattggtgaagcaagcccgcataagaaaaaacccaaatgttgaaccaaaaagatgaggatgcaaacttttcacgctagtgtcgtactaacggaaaacttcatatttggagacatcgagtagattttttttatctatgagaaaaataattcatctagaattttattgaggatatgagtataagataataatgaaagaaactattaattgtgtacgtctttatcgttcatatgttttgttcaatggacatatatatacattctacacacaaactactataccacgattttttttatgctaacattacctctagctacagacagaagtagaaagaaaaccaaaaccatcaggtattacatttgaagttttgaattgtggaattctcaacgaggttcgaggaacatgaatttggttgctaactaaagcaacttgcttgtgcctgtgtgcataactggactgaggaaaaaataatccttacatgtccatttcatcataatttcattttgtagtatatgcatcattgtatcattatttccacttgtatcactaattccacttgaaatgtcacacaatatagggtcccctgacacgtgtgtactatgtagtttcacacgtaccggttaatatcgagattccaagtaaaaaagtgaccaattctaaattaagaatctctctaatctcttcccaaagaagaatcatcactgaggaagaataaaacatttggggagtttcttcgctaatccttcaaggtgtgacctgagaatcacaacacaaaacaatctcactcgaaattcctttgactcatcatcatcaccatg

SEQ ID NO: 16304 - DNA, 2247 bp, Unknown; identical to SEQ ID NO: 7814
  misc_feature (1)..( 2247): 2750-1469P.txt file - cDNA_ID_1394643; gDNA_ID_1621165; Annot_ID_57188

SEQ ID NO: 16305 - DNA, 2247 bp, Unknown; identical to SEQ ID NO: 7814
  misc_feature (1)..( 2247): 2750-1469P.txt file - cDNA_ID_1394643; gDNA_ID_1621165; Annot_ID_173816

SEQ ID NO: 16306 - DNA, 3000 bp, Unknown; identical to SEQ ID NO: 6260
  misc_feature (1)..( 3000): 2750-1469P.txt file - cDNA_ID_1394744; gDNA_ID_1621085; Annot_ID_55368

SEQ ID NO: 16307 - DNA, 3000 bp, Unknown; identical to SEQ ID NO: 6260
  misc_feature (1)..( 3000): 2750-1469P.txt file - cDNA_ID_1394744; gDNA_ID_1621085; Annot_ID_170505

SEQ ID NO: 16308 - DNA, 3000 bp, Unknown; identical to SEQ ID NO: 6260
  misc_feature (1)..( 3000): 2750-1469P.txt file - cDNA_ID_1394744; gDNA_ID_2926172; Annot_ID_140182

SEQ ID NO: 16309 - DNA, 3000 bp, Unknown; identical to SEQ ID NO: 6260
  misc_feature (1)..( 3000): 2750-1469P.txt file - cDNA_ID_1394744; gDNA_ID_2926172; Annot_ID_199603

SEQ ID NO: 16310 - DNA, 3003 bp, Unknown
  misc_feature (1)..( 3003): 2750-1469P.txt file - cDNA_ID_1394783; gDNA_ID_2936574; Annot_ID_194872
caaagcttcacccttttttttttttttccttcaatctctttctctcactcagtcactaaaggtgaatcctttttgtttgtcaatcttcttcttcttcttcctgatttttcggtcggaacacacaaattcagctcaccagaattcttcgctatatttattttacatttaacaacttcttaatttttagtaaaatgtatattcttaatcttacttaccaggtggcattttcacttttgtttatatatttacttcaatttttctaatagaaaaaaagtaagcaaatattcatatgtacttttcagtttagtttttggctaaattaaaaaaaaataattctacttttaataataacaacttaacaacttaacttaacttaacttaacttgttctatttctaaaccaaaaaaaaataaactaagatgaaaagctttgaaaagatctgcatgcatccatgggagatcttattatatgatcaaaaccaaaatcctgcagaaattaaaaatccaacaaaaaaaaaaagaatttggaaacaattcgagaccagctagtaatggaaaactataatcaagaacattgtttgtaagaattcttaaatacggtagtagagagactagaataactagtaataaagacatcattggtccgcaggatctaagcaaataaaaagaatttctttttcactgtcttcaacgcagtgactctctttctctctctttattcacacctcttgttaccttcaaaaccttctctcaatctcctccattatccttctctttttctctctccctgcaactggctccatcccaaagtgcttcgttctggtacagcgaccatggcagtttttgttcttgtgatgattttgttggccatggctggtcactcaagtaagtatatcttcgtctcttttcaaatccttctctgtctcatatagatcctcttcttttcttctatggcaaaacgattcttcttttctttgttcacccactctgttttacaacagaacaacatagtcacaaacttcttagctttcatagtttttaatgaaattttccacaaagaagggccatttttgcttttacccataccttcttttcatatttcctttttgactgtggagttcaacaatcttgtcccctcttgaattaaacattaaggtgttccatttcacacattatcagtgaatgagatttgaagaatgctcattgaagtgtttatgtgtgtctttaggtgggacatggtgtgtatgcaaagaagggttaagcgaggcaatgctgcagaagacattggactacgcatgtggtgcaggagctgattgtggacccattcaccagaccgggccttgctttaaccctaacaccgtcaagtctcactgctcctacgccgtcaacagcttctttcagaagaaaggtcagtctctgggcacttgtgactttgctggcacagccaccttctcagcctctgatcccagtgagtctctcctaccaacctcactacattagaattagtgcaaaaacaatttgttcatatttggtaacttaactaggtaaagttaaaagcagtagttgaaaaatggaacccaacttgaaagcaaatcagaaaggctagtttatattaatctaaacttcacatgtttcaatgtgaatgatatgataaataaagtatccattatcttattatatagtatcacaactcaagattctctacacagatttgaaactagattgtagaacatatcatttttattagtaactgttgtctcttgtaccattgtggtcttatgatataggctacactacttgtcctttccctgcaagtgccaggtacacacccttctttctttcttcacttcttatttgttgttttgcaaacaagaattggctttggtcttgaggatctttgcactctagatctttgtttaagctgattgatacaatctgagagatgtgtttgtatgtttgttgttatttaccatttaatgcagtggaagtgggacaacgactccagtgacgacaacaccttcgacaagagtccctacaacaactaatacaagaccctacacaatcacaccatcaacaggaggaggtttgggaataccgtctggtattaacccggattacacagatccatcctttggattcaaactccaaagcccaagatttggattcatagtcttgttcactctcttcctacccttttacttgtttagctaactaagtgatcatgtgagtagtgtgtgtgggtctcaatctaatgtaatgatggaatctatggagatagagacatttttttgttccatctttgtctgtttttccagctgttccccacttgcctctgataaaaattgtacattttgatttcaagtaaggagacggaaatatatttatttaaggttacgttaccttcaccggaattgttatgaccggagataatcaaatctgaatttctgattgtctgaattgaccccaaacacaaccaatcaaaacaaaacacaaaggataaaaatgtcattttgacgggttaatgtatataactaataaagggtaaaattgtcatttgacttcaccaaccaacaaacactcttctcagtggctttttttttaattgatcggatcctccaagcagcagccgaagacgaccgccggcgatttccggttggcaattgttctcatctgatctgctttctcgcggtactgatctctgatcccaatcttacatcgtaaaatctctgctttcgttcgggttttgatgatatagatcacgtggattccttcttttcacaattgactgttacaaaatcacaacattacatttaatctctttcacgtccccaattgttgtatgaaatttgatgtatgtgaggtagaaggtcatgttctataagctcattcgaccaaatttgtgtgtttgtaaacttaactttgatttgttcatctccaaggttctctcaaaatgaacgtcagacttattgggcactcttgttttcttgtagctccaagtttaatg

SEQ ID NO: 16311 - DNA, 3003 bp, Unknown
  misc_feature (1)..( 3003): 2750-1469P.txt file - cDNA_ID_1394832; gDNA_ID_1971889; Annot_ID_58462
agtattagtttagctagtggtttttattttttcttttttattttgtctcgaatgaaatagtggtttatattgaaagtgatggtttttcttatttaagccgaaaatcaggtggcaatttgaaaatgatgggaatcttatccaccccaattttttttcatttttttttccgattactgatatttttctcgattcaattctattttctttgaagaccgtttctcttccttgatttccaatcctaatttcttgacttattgatgttgaactttgtaattgtcatcaatactatcgaaatgcttggaagatattttatcatatttcatttatagaaacccccttgtgttttaattaggccaagggaaccttcgtacttcacttaagttaactactttatcacgaaaatcaatttttaaaacaatgggctgagaaaaatgtttaatgactaaggcccaactataagattttgggccggataatataatcttccaaactcatcgtgttcgaaggatattcttcagaataatgaaatggacttttaacatttattactagaatcttatccgatttttctttacaacaaaaaaatgaaaaaatataggtgtgaatatgatccacatcaaattcggatccgaaacgaaagaaattcccgggtcattggagctccgtgttacaaaaaatctccagatttctccatgactccaaggaaaatctcacagttcgctctaaaaaaatattatgtttgggaattcaaaaatcccaaagaatcaaagattcatctaataaactctctcctccgtaatcttcgatgggtaaaatctctgtaaatcgatcaccaccggagaagccagagaagtcgtcggagaaggaatcaaacccgaaattcatcggaagcaaatccaaaaacgaaaaatcataatccaccgtcgatgtagcaacagatgcagatgtagaaggagactctggtcggatctcggatccgggtactaaacccgattcttcttctcccttgacaatgtcttggaatgtgttagcgaatctagcagcagcttcctgaatctccggaggcgtcaacgacttttctacggagatcgacggtggattattagggaaattgaaattagcatcgccgccgcggagacaaaattgagcggcgtcgaaagcacgcgccgccttctcgggagtgtcgtaagagcctaaccaaattcgttctctgctgtgtggaagtctgatctccgatacccattttccccatttcctcttcctcactcctttgtactttgactgcatcgccgtgtttctcttcttctcctcttccttcatcgcttgcttcaccattggataaaaactccggttcggttcgattcggtttggttgaattggattctgtttccggttcttaactcgagtttcagttgtgtaggttaattctgttatatctggttgatttcgaatttgcggctgtgtgggatttatatatgaagaagtggaagtggcaagtgaggaagaagatcaacgctgactggcgcgtgaagatgggacacgtggcggattgtattgagtggctaacgcgggaatagtgagactgttctgctttgtcgtgttccttgttttccacgtgatttaattcaactctcttttgtctttttgcattatatctgaatgattatctctatttgtttaggcacgtttgttttaaatactgagattttcgtcgcgacttctgtttctagaattttaagactacttcttcttttgtattttagagattattgggcgttgaatcggacacacataagtattgttattataaatgtttgcatcaatggttaggctcatgacatttttgatgcggacactaattaagaagttaagaagcaagtatatgactcactgttttgaagaaagaagcgagtcgtctgttgatcataacttgagattcgtagaagaagaaaggtggaaccaaaacagaagtttcatacatgaacactatttagagcagtagctatctcttttgtttacgcattctgttttccaaataagttaaaaaaagttaccttcttttaatcccacttctcaagatggagcaataattgaattgaaggccagtggccactactaactttcattatactttgctcgagatagccactactaatgaacttgtgacacaaccttgtgtaagaacagtctcccttagattcaataatcaatttccattttgggaaaatcgtttgttactattatttatttgttcagaacccacggaacagattgcccccaaccctccgagttaccaactttataggttttcgctgagcaacaacatcccattagaacggtgaagctcatcatcatgagcatgaaggagaagattcttgttgttgtggtcgccattatcgatcaaaagatcacaaattaagaaaatcgaagaaggaagattgaggaatataagtcgatgagttatttgagtattgatgaggaaaacaaagactatacgaactctctatttataaggtttacggaacctaatccttgccggtttaggattttactcaacgtttggaatatattacatgtttatttcctttttcaattttgattcacctcttatcttgcaaaaaaacaaaacaaaaaagtgacgtttaaagatctctaatccttttctaattaactttgtgtatgatttttagttcttctaatttctatatatttttgttcataatatgaaaatttgatctctgttttaattattttggaactaaatacacatttttaattagattagtaaaagagttataattaaaaaaagttgatctggttggtgtcagcagaacaaggaaaaaagagaggctttttcgttttgatcctcctactcttcttcattagtgaaagctacttataaagtccaaatcttgaagtgcgtgcacggtgcaccacgaatccacgatccagtgagcagcagcaactccatctccggagctctagattcagataagaacaatg

SEQ ID NO: 16312 - DNA, 3003 bp, Unknown; identical to SEQ ID NO: 16311
  misc_feature (1)..( 3003): 2750-1469P.txt file - cDNA_ID_1394832; gDNA_ID_2684202; Annot_ID_191252

SEQ ID NO: 16313 - DNA, 3003 bp, Unknown; identical to SEQ ID NO: 16311
  misc_feature (1)..( 3003): 2750-1469P.txt file - cDNA_ID_1394832; gDNA_ID_1971889; Annot_ID_176812

SEQ ID NO: 16314 - DNA, 3003 bp, Unknown; identical to SEQ ID NO: 16311
  misc_feature (1)..( 3003): 2750-1469P.txt file - cDNA_ID_1394832; gDNA_ID_2684202; Annot_ID_137227

SEQ ID NO: 16315 - DNA, 3003 bp, Unknown
  misc_feature (1)..( 3003): 2750-1469P.txt file - cDNA_ID_1394861; gDNA_ID_1971875; Annot_ID_176681
atgatgcatgcattgttgctaacaagcatgtgcaattaatttatgatttaatacgaataaagaaaagaagctaaggctatacactatagttttagtggccaataaccatatcggaaggtatgacaaagaatataaaaacagttttctgaaaattgtaaattgttatttatggaccagattaaataatacatgtgctaaatactaatgaaggcaacgaatcccacatggaaggattctcgtttccccaactatttctgctctgtgttcccacacataatgccacgcaatatttatacagagtggactgatcaagagattagttaccaaaataaataagaaattctgacttaatcaatcatcaaatttttgtatcaacccctaacaatataccaatattcaatccaaatcagaacaattaaaaatttgtaactaaaaaaatgaaaatgaaactatggttgtaacgaaaaaaatcacacaagaattaatagtcgagtattagatttttaaagataaatcttctttcttgatgacttggtcgtgatcggtcaacaaaagcggttttttaccggtcaacggactcaagatctcttcgtcgacgattggattgtgatgaaggctgagttcaggtaacgccggtaggtttagatcgatgaatccacggtggctcctttcttccgataccgtgctcgacacgcttccactgtgactgattgatttgcttcctcctcctcctccgccgccgaggttgccttcgtagtgacaacgtttgtgaccgcctaaagcttgacccgtcggaaacactttatgacagattgaacactcgtggatctttccggaggcagcaatcggatgtttttctccggcgacgatggagatggtcggagctgttgaatcatcggcggttgttgagattacggttggtggtttgattcggtgacttgctttgtgaccgcctaaagcctgataggaaggaaacgctttttcacagacgttacacttgtacggaaggttctttgattctggcggcggcgttaacgattgcgactgttgatgaaatcgcgtttgcgacggttgatctttagcgagcatgaggagacaaagagcgagatactcttcttccgtaagatcttgattctgggatttgggtcgagatcgaggcggtgaggaagaagacgaagaagggctgtgagaacgctgacgtttggagcgtttgcgtttaagccacggctcaatgaaaacggcgtcgttcatcaaatcttctttcgtttcgattctggtgaaagaagaagttggagtgttcatcgcttcgagggccatgatcagatgaatcttcttctaactgttggatcaaaggatcagaaatttgagagaaaagttgagagtttttaatcgcgaatatggtgagagatagagagaaggaaattagagagtgaagtgcttaagaaatgttttggacttgttgtttttatatggaaaccacgtggcagatgtgtttttaagtcggtcaaatttttatcttctttttttttgtcaatatactctctataagaaacctaacactatagtgtaaacatggaagaaaatttcacaatgtttaaattggattatagtatcaacaaatatgattttattagtattcttattttaaagcattttttgataatatattatctatagcatatttagctttagatatgtgtcagatatatatctgatagaaaattattttagacttatcaaatcatatatattttgttatctaattttgagagatttatggaaataatcacttaaaagtaagtaccaaaccagcaatggtaaaccaaatttgaccaaaaggaataaagagaaatttactgtaaaataccgggttgtttttggtcacggctgacctaataagttttggtcatcaaagagtgagagaccggttcaaagtcaataaccagaaaagtaacaaattggtaaacccgcaaatagattttagcttatattaaacaattaaaaaaagaagcatacctttcccgtggagctgacttatgtgttagctacgcgccacgagtcgtgtgggtcacgccttaaaccaaacgcgtacacgcctaattacgtttttttttggtactaatcttcttgaagatttatcaaattttctagatttttttaaatttattatctcttatcatgaatcatgatcttatcttaattatttattaatcactcttcccatgctaatctatagcaaataaatcgataagattcgtttaataaaacacctggattctacccgaaaaatacgtagggaataaattaacggaaagaaacaaatcggaatttttgttttcagaaaagaaaaaaagaatgttgagctaacttcagtggagttgagtgtaggtgaggtaaaaattgggtgaggcatggcgtaccgtattagtaactaaaacggggcgtgattataggacacgtgggagttccgttaccacttgtaaggcccatgtcacttttgttgttatacccaacaagcaaaaaaagtggacgtaatttatccaaacgcgttggcggagacgtcacgtggcaatttatacacgtgtcacttcgattgcgcagacaacatcttctcaggaaacgcagttttagacgttttctctcattcagattctatactcttcttacctttttgggcttgcaaggttctgtataatatgggctttattagcccaatcatctcgaaatatgtaagtccgtatcagacatctaacggcccatcttcgttgaactcgtgttttacatgattcattttggatcattgaagtttcgaccatttcgctaattcgaattcaaataaaataaaattagtttttctgtttggatatgtagagtagatctaatcgacccttgtacttctgcaatttgaattcaaaatttaaaccactctacttttgaatctctctctcactaaacctagaaagtagaaaaccctagcatttgtgatcttcaacgggaaaaatg

SEQ ID NO: 16316 - DNA, 3003 bp, Unknown
  misc_feature (1)..( 3003): 2750-1469P.txt file - cDNA_ID_1394982; gDNA_ID_2213635; Annot_ID_181008
ccattcatggcgatagaacacaacaggttcgttgattgagttaagttgaaatttggataattgtgcacactaaagctaaaaccaaactatagaaacaacctcgatgatattactgaaatgaactctttaaagatcatcatcagtaagttgttctctgttgactcaatctgattgacttctttatgttgttatgaattcaaaggaaagagaagtggcactgaggtccttcaaaactgggaggacacctattttggttgcaacagacgtggcagcacgtggtcttgacattccccacgtggctcatgttgtaaacttcgatctaccaaatgacattgatgactatgtccaccgtatcggacgaacaggacgtgcaggcaaatctggaatagcaactgccttcttcaacgagaacaatgcacaactggctaggtcgcttgctgagctaatgcaagaagccaatcaagaggtccccgagtggctcacacgatatgcttcacgtgcttcatttggtggtggtaagaaacggtctggtggtcggtttggtggccgtgacttcagaagggaaggctcttacagtagaggaggaggcggcggcggcggaggaggcggcagtgattactatggcggaggaggctatggtggtggtggatacggtggtgctccaagcggtgggtatggtgctggagtgaccagtgcttgggattagccaattaggctccccaatttttcctctttttaacctgactatttatttcttctcttctacattcccaagagagcacgtgtatttgcccccacctttgagatctctcattcaagagatggatttaactaatcttgctattaggtggatctctctgttttttcaggctatttttaggatttgtcctaaaagatagacagtagtttttccgattttgatcttgttcttggtttcttctaacaatttcatttgttagtttgaaatccaatttgtctttttgtttccctttgttgttgacaatctttcttggtgaaatacaatctctctttatatcattttaaggactttgtgcttacattgtttaaactccgttccgttacttcaaaaagataaaatgcaggtacataaattgttgctctgtgtgaattaacatacaacaattagattcaacaactattgctattcagcttcagaatcttcttcaagctcacttccttccacaatctcttcttcttcagagccttcttcctcaaggtcatcctctggcctatcaagcaaaagttcctctttagagaccatgcctagccctctcgcccgataaagaaaccctgttctcatcacatgataaaacttatctcgaagacgagtgagaggatgcggatccactagttttcctcggcgatacccttctttgaggatcacagttgttgtcttacacttcaatgagaggtagaaaatgccggggtatcgcgtgaatagacgagtgaacttgtgcggaatgttgagctccgctctcatgcttctcaagtagttcctcttggttttcttgtggatagtcaagctcaagagctcgtgcaaaacagccacagctcgtttctccatgagatcgctttccggatcaatgttactcgggtcatcgtaaggagatatgtagggaagtttttgaaactcatccatccatgctttgaccttcttctgtgctccatatcctctagggaaactcataggaaaagtcaacgtagactgacctctcttgaactcgcggtatctagactcctccccggaaacatcattgtcctcgtttcgcttctgcagcgccgagaatgcgaactcatcacgccattttacaagctttaaacacgggttaccattagaagccttgacgaagcagaaatgatcagggtatttcatgactagcgtcttttcgtagttatcgggtaaaccgagatcgaatttgagagaatgtagtgatctaagagagacagtttttgatctcatcatcatcagaactctacagagtctctccactgtatcagcctcgtggctttgatgaataatctcttcttgtgagtcaagcattagtgctgtgtccgttagcttgaaacatggtaagcttgcgtaacgagcatgaggaaattcgtgaaacagagtcggatacctgcaaaaatgtcaagactttcattaccattcttacaaaattgatttctttctaaaccgtttgttccagtaacaattgaaattttctctgattgtgatacctgcgcaagaagcggagaacagggacggtgagaccaaggagtttttgccaatcggcgacggattttgcggtgaggaaaccagtgggagatcgctttatggcgtctttgaggatacaagctgctttgagatcggtctcagtatcaatgacgtgatccaggttcttgttcttcacccacttcagtctcacctttgtcattgcacccattcctcgccattgttgatgctggtgaaacagcttactcaccgaaaagagaaagctttgtgatttgacgaacatctaaagagatttgacgaaagcgcgaaatgtggatgatctgtaattgagagtgcaaaatgggtttagggtttagtgttctctcggagtttagttaggacttatcattgaaagaatgaatagagagaagtaggggagagtaatgcagagaaggtgctcgacgaaatgcctgaacgaatctaaaagcgagatttttcgacttctaactctaggcccacaggctacagtcaaagtaagccttttaagttggttcgcgatatgtttttgcagacagaacctaaaaacttggaacttctttttatctgcggtacacagccaaatttgcaaaaataagttccaacgcgtctagactcgattcgtgcgactcgggaagactaggctcgtttaaaggttcacgcttttgatatttcgagctcctagagacctagactctagtcctgaggctgattggtagaggaaattggaaaagcttggattgaaaactatg

SEQ ID NO: 16317 - DNA, 3000 bp, Unknown; identical to SEQ ID NO: 8065
  misc_feature (1)..( 3000): 2750-1469P.txt file - cDNA_ID_1395054; gDNA_ID_1621189; Annot_ID_57464

SEQ ID NO: 16318 - DNA, 3000 bp, Unknown; identical to SEQ ID NO: 8065
  misc_feature (1)..( 3000): 2750-1469P.txt file - cDNA_ID_1395054; gDNA_ID_1621189; Annot_ID_174529

SEQ ID NO: 16319 - DNA, 3000 bp, Unknown
  misc_feature (1)..( 3000): 2750-1469P.txt file - cDNA_ID_1395173; gDNA_ID_1620365; Annot_ID_154799
aataacatccaaatcatgtttcatgccagacacattaagcacgcaatttttccactatacaaatcttagcttactaattcttgttttaatttacgattcaaaaaacattaaaagctacagtgttgaccggaaaaaaataaaattcagaagggttttaaagttttctcttggagaagacgttgcaattttttttatatttttggtaagtaacacgttgcaaactatttgacatttgtttctttccatatacgaaaaataaattttatttttttctttatgacatcaaaagatctaacgtttttttttttttttttttttttttgtagtcacacgagtgtaacatagtagaccggaaaaatccacatatttgatgacgtcagcataaattccttactaatacataaccaacttcgtctcttcatctctactaacaattagcaacaaaataaaagcacacgaattttcaaatctttctcttctctcgctctctcgaattcttctctctgttcctcgtagatcccctctgtttccgttttcgtcttttcgaattccgaagatctcaaatgggtgaggatgcaatctcaggttcgttttaaaatctttctttcttttgttcttgatctgtcgctgtcgaatgatctttataaagctggattcgagttgggtttttcgttttcatggaattaagtatctgtttttattgttttggcttaaagttttgttctttgatcatatatcatcttggggttttgttctatagatagatctctgtttgtttctgctgaagaacgaaatctgtacatgcgacaagtgtttgaatcgaggaactttgaagttgttagatttcgagttttgatttttcatctcttttggtaataggtaatctcaagaatctaacgatcgacacaagagattcagaaactcttgtggtatgtttcggtgaaatgttgattgattttgttcctacggtgggaggtgtttcattggctgaagcaccagctttcaagaaagctcctggaggagctcctgctaatgtagctgttggtgtctctagacttggtggctcctctgctttcattggaaaggtctgattttgatttaccattgatgatcaatctaagggctcttgttttgaatccaatcttagttttaagttttgtttatgaactcaggttggtgatgatgagtttggaagaatgttagctgatattctaaggctgaacaatgttgacaactctgggatgagattcgaccataatgcacggactgctttggcctttgttacgctaagaggtgatggagagagggagtttttgttcttcaggcatccgagtgctgatatgcttcttttggaatctgagcttgacaagaacctcatccaaaaggtagatttttttcatcttttgatccacatttggaatgagactaagtccaatggtttgattttgtttaattacaggccaagatctttcactacggatctatcagtttgattgaggaaccttgccgttctactcagcttgtagctatgaaaatcgctaaggctgcagggagtcttttatcttatgacccgaatttgagattgccgttgtggccatcagaagaagctgctaggaaagagataatgagtatctggaatttagctgatgttataaaggtataatcttttacgctagagtgaaagatcagatcattcttagtacttaaaaatgacacaagtcttgttgagtggttttcagattagcgaagacgagataacattcctgaccggtggtgatgatccttatgatgatgatgtggtgttgcaaaagctctttcatcccaatcttaagcttcttgttgtttcagaaggacctaatggctgtagatactacactcaggtttgcttgtcttttttctttctctaatcttctttaatatcaattctatatcagattgcttattcttgttgctatatgatcatgtaggagtttaaaggtagagttggtggagtaaaagtgaagccagttgatacaaccggtgcaggagatgcattcgtgagcgggttattgaacagcttagcttctgatcttactcttctcaaggtactttacttatctcttaagttttaccttctctggctttttgtaactaagactatgaatcaatgacattatgtgaaaatttgcaggatgagaagaaactaagagaggcgcttctatttgcaaacgcatgtggagccattacagtaacagagagaggagcgataccggcgatgccaagcatggatgctgttcaagatcttctttcttctactcgctcctaaaatgcttcaaaagtctcttttgagtgtatcaattcattaccttttacagtgtttttgtttttttaaatatttttccccaatttgtaggaactcaagaatgttgtgtgtgtttttttagtttgttgttgatctcccggagttttagtattggggtggtttggttttactattatcaagttaggttttctacaaagaacaaattcatgctttgtaaaaactacttgccgttttatgtaacgagaacgacacacactctttaacgcaaaaccattaattgtttagttaaaccggtttacggtttacgaggagtttcccacagattcctcatcgataattatgttgagctgaacgtgatgctcacgtgacaagtcaaacttgattgggattagtgaaattgtgaatagagctgggggtaaaaacgacaatttttataatgttaacggcgttaagaagggaacgttaagttcttcagtggaaacttaacgaacattaaacatttcgttatcaccgtcaaaatcaaaatccgggacgataattctcgcacacgttctccatcactttccctcgatccaaaaccagagtgggaactacacgcgaatcgaatcataaatggaatgtgaattttgaaatcgaggaagaagacgaaatcggagcattattggattgagttttgaagtttttaggagaaggaaatg

SEQ ID NO: 16320 - DNA, 3000 bp, Unknown; identical to SEQ ID NO: 3330
  misc_feature (1)..( 3000): 2750-1469P.txt file - cDNA_ID_1395335; gDNA_ID_1620640; Annot_ID_47469

SEQ ID NO: 16321 - DNA, 3000 bp, Unknown; identical to SEQ ID NO: 3330
  misc_feature (1)..( 3000): 2750-1469P.txt file - cDNA_ID_1395335; gDNA_ID_1620640; Annot_ID_163024

SEQ ID NO: 16322 - DNA, 3000 bp, Unknown; identical to SEQ ID NO: 3330
  misc_feature (1)..( 3000): 2750-1469P.txt file - cDNA_ID_1395335; gDNA_ID_2926178; Annot_ID_140425

SEQ ID NO: 16323 - DNA, 3000 bp, Unknown; identical to SEQ ID NO: 3330
  misc_feature (1)..( 3000): 2750-1469P.txt file - cDNA_ID_1395335; gDNA_ID_2926178; Annot_ID_199995

SEQ ID NO: 16324 - DNA, 3003 bp, Unknown
  misc_feature (1)..( 3003): 2750-1469P.txt file - cDNA_ID_1395753; gDNA_ID_1972144; Annot_ID_179330
gctgtaagtgtctctaatggatcattttttcttggtttcttttccattagtattgcaggcactaatgtctagctctgttgtcttaggttggagtgttccctaaattatccggggatgagtttgattctttcatggcccttgctgagaaattgcgtgctgactatgatttcgcacacactttggatgctaagtttcttcctcgtggagagtctgtggaaggacctgcagtgaggctgttcaagccttttgatgaattgtttgttgactccaaggtaaaggggaaccttttcattttgtacattacatcaatgagaagtcaagttttatgcaataatgtttcaaattatttatttgatttgcgaatcatggattcaggacttcaatggggaagctctagagaaatttgtcaaagaatcaagtatcccacttgtcaccgtctttgacagtgatccaaacaaccacccttatgttgccaaattctttgaaagccctgccactaaggtaattctcagtaaagttattttggatctcactgcagtgcaatacattaatggacgttttcagttatgccttgcatttttactggacaagtattttagatttctgaagatggtagtttagtaatttagtatgtgcttgaaggttaaaagcttttctttgccggtggtagtgttaactatgacaaaagctgtgatatcataaagtagtgattgaatttgggtaatagcatcatagttctctagataattgtaaaagcatttgttctgtttctgaaatttcaggcgatgatgttcgttaacttcactggagcaacagctgaagctctaaaatcaaagtaccgtgaagtagctacatccaacaaagatcaaagtcttgccttccttgttggtgatgcagagagcagccaaggcgctttccaggttactacacatttaagttttgtctcttattatcattttctcatgccaatgttaacacatctctaagaaatttttttcttttcatgtattggtttaacagtactttggactcgaagagagccaagttcccctcatcatcatccagaccccagataacaagaagtatttgaaagtcaacgttgaggttgaccagattgaatcatggttcaaggacttccaggtttcattctcttttgcacacattcacacaaggttttatgaaaaaagaagtacgtataaaatcaatataacctaaacaaacaacatgttttcttcaggacggaaaagttgctgtccacaaaaaatcccaacctattccagctgagaacaacgaacctgtgaaggttgttgttgccgagagccttgacgacatagttttcaagtctggaaagaatggtgagtacattatttgaaaactctaataatggtttcaatttttttgcgaacgcaagactgataaacatcaatttatctatcagtcttgattgagttctatgcaccatggtgtggacattgtcaaaaacttgctccaatcttggacgaagtggctttgtcattccagaacgacccaagtgtgatcatagcaaaattggtaagcctctcttttatgttctttacatgtcaaactataacttgatatactcctcctggattgacttaaccgtgtctgtgtctgtgcaggacgcaaccgcaaatgatatcccaagtgataccttcgatgtgaaaggattcccgaccatttacttcaggtcagcgagcggaaatgttgtagtgtacgaaggagacaggacaaaggaagacttcataaacttcgttgagaagaacagtgagaagaagccaacttctcatggagaagagtctaccaagagtgaggaacctaagaagaccgaggaaacggccgcaaaggacgagctgtagaaatctcatgagttttgtttcggaatttgagtaggagcgtttctcttcttcaccatatccaacagaatcttcttttttctttagcagttttacagttttatcttttttgctctcttgttcgaacccaaaattatccccattaataaaaagttaaacctaataatcatttaatctgttttatgatttgaccatagggttggttagtttggtacgtctatcatttttggtggactgttcggtaaatcgtcctgttgattttgttcgttcaccgatagagccaaactctcaaatctcaatctctgagatagaatcaacaatgtggtcaaatatataacaagtatataaatatgaaaagttcagtttatatacaatgtgattaataggaaaagttgcagtaagaatatgaaaattttagttgaatatctttaaaacgttacttttgaatttaatactgtgtgtgagtgtttctcccttaccaaaagatattcaactaaccttcgaggttaattaaatttgtataggtaaagggcaactttaatccgaatcatatgacaatgacatgacaaatgatgatcgcaatatacataccaacaaatgataaataatttgatatatatattcgaagatagaaagacgacaaatatctactacatattacaccaatgaactagctctgatggctccttaaagtgatagcctgattcatgtggtttcgtggacccaatggtcctgttaatatactacatgatttatttgtgtgtccaagcattgtgtatatcgtatttgacagaattaatagctttcgctgatgacatgtataattttttctaatcatcggaaaattttggattgaagtgtagacatatactgatcagtgcatgttaaaaatcatatattttgaatatgtaaagtgttcaccataatcaggcatatatagttgcaatcgtaaagaagtacttgaacccatcccaacaattcatgatatgtatctttcatttatttcacgaattcccaaggaaactaaaatagtatacgatacacttggcttcagattgtttccctatataatggcactaactctccatgttgaaaccacattaatttcttataaccaacaacaataatg

SEQ ID NO: 16325 - DNA, 3000 bp, Unknown; identical to SEQ ID NO: 6014
  misc_feature (1)..( 3000): 2750-1469P.txt file - cDNA_ID_1395806; gDNA_ID_1620836; Annot_ID_50810

SEQ ID NO: 16326 - DNA, 3000 bp, Unknown; identical to SEQ ID NO: 6014
  misc_feature (1)..( 3000): 2750-1469P.txt file - cDNA_ID_1395806; gDNA_ID_1620836; Annot_ID_169900

SEQ ID NO: 16327 - DNA, 3000 bp, Unknown; identical to SEQ ID NO: 12439
  misc_feature (1)..( 3000): 2750-1469P.txt file - cDNA_ID_1395836; gDNA_ID_2214551; Annot_ID_134681

SEQ ID NO: 16328 - DNA, 3000 bp, Unknown; identical to SEQ ID NO: 8945
  misc_feature (1)..( 3000): 2750-1469P.txt file - cDNA_ID_1395928; gDNA_ID_1971948; Annot_ID_58611

SEQ ID NO: 16329 - DNA, 3000 bp, Unknown; identical to SEQ ID NO: 8945
  misc_feature (1)..( 3000): 2750-1469P.txt file - cDNA_ID_1395928; gDNA_ID_1971948; Annot_ID_177318

SEQ ID NO: 16330 - DNA, 3003 bp, Unknown
  misc_feature (1)..( 3003): 2750-1469P.txt file - cDNA_ID_1396182; gDNA_ID_1620776; Annot_ID_50293
agagattctcagatttatcgaggtgaagaggatatatacattgaagtcctttgtgtttttcatggtttatatttgacattcattagtcagtttatctcaatttcttgtcatagttatttccttgggtttcattatactctcttctctgaatacagaatgctaagttttcacctgaaatgagtcgatagattgtgtagtctgaagtgagtcaatagtaactgatcacaatggacagaacataaggatttttaggatagttatctgacaattagttggtaacttctgaggttgtagatatatgtagtgagtattctaacacaaccatgatgactgcaaacactctgataccattggaatagcattactaactgctgttggaacctctttgttgcgccgcccaggttactgaaattcatacccaggaaacttgtggtttcatttttcctccttataacatttgactccaagcatgaatcctttttatcaccaatgctgctgcattacattctcttattactgtttctctattgtatcctggttcaagctttgaaaaatatcatttggataaactcttatatttacgttcaaccttaacatcaagaatatgaattacattgaatccagttggaagttaatctttgtggtttatcaattgcagggacaacatgaggttccacaaaactttaagaaactgttgagttatagcctgggaatccttgtttctcaagacaaactcaaaaaggtaactagtgttgtttttcttaatgcgcggtttgtcacaagcctatctacttttctccatacccccaatatctatatgacaagatgtagtaataataaacctgagttatattatatgataaactcaaaaattactttataaatgcaggtacgaaatcgttacaaaatctcagttacgaaagcaattaagccaacactcaccctgcgtccaaaagattccacgaagccaccagagttaccaagtacttctgtgatattaacatcaaaagaaacacatgagatagacccagcagcaaatagagaagcagaaggaatgaatgagttggcaaaagaaaacaacgtaatcttactccttttaattacatgttgctcatccaatttacagtatcatagcaacaaaagatatgatcccttgtggttgatcaatttcaagactggtacgaggagcaacaagactttaggatgtttttgagtgagtgcctgataattctcgtttctcaaggcaaactggaaaaggtatatttttcttaattgctcagctatttattgatgcatcatcatctatctataacaagatcatttgtaattcttatgattgattaaaatcagaaaatctcccaaattgcaggtattggatcgctacaagatatcagaattagaaaacaaagtgttggaagtagcaccagaagttgtagcaatgaaactagcagagtcagataacaaaaggttgatagcagcagaggcagtcgaagaagaagaacgaatgcacaagttagtagaagaaagccacacgatgcttcaattatgcttagagatccaccaacaatgtaatctcaacaaaactcacatggtacatcaatccatcatcatcaccatgatcatcactgtcttttgctttgtttcttgcaggtgctcttggccaagaggttgttctactgtaaaagaaaaccaagtatctatctagtttgcttcaatctatattttacttaactaaccacttgagttttgtttttgtagttcttaaacacaggtttatatggttgtaatggtgaactaatgttcactgttttgttcataaaaagatagctttttttttttttgctaaaaaacaatgacgtgtctatggagtcttgtgaatgctttgctacgtcataaagcatcaaaaggtgctggaaagaataagcttttccaaaagaaaatttggtctttttttctaattaaaaagtttggtattggcgtatggaagtacaacactactactcatatttccacttgaaaacaacattttgtgattgtgatttgatattttctggtgtgtgttagtatgcaattgcgattcattattcatagtctcttttgacattggtgtaaaataacttgattggtaacaatattttccctactagtttaggaaaagtataaagaggtgagaaaaatctcaaatcgaaaaggaagaggaaagtgggggtaaagttggaaatataaaaattttggaaaagtagaacaattagaaagaggaaaaccctaaaaaaaaaaagagggggactatataactggctaacacgtattgggttgagtctctctctacctcaatttatattatttgcttcaatcttctctttatcgctccaccagatccaagttcgcgagatttcaagctctctaacaaagttcttcacttttactctcaaagctttcatctttcattcaactacttaagctccaaggttcggaaatattttttttacttttctctgcgatttgttccttttcttatgaacgattggatctcgagtctgatttactctctttgcgatggaatttgttctgggtcgttttcaaaattgacgcttgttaatctataattcgtcatcggattcaattagtccgtgaaacccttcaattcgtttatctcaaatcgatttgggttaggttttgatttcgacacttatgttaaaatcatccaaagcttttatcttcgattttggacaactttgtgtatattatatgctttcatggagagatagatgtttttgaatggtatctgttatgataattggatgaaccatatttcctatatctctcctgacatcgaataattcagatattaatgcttgtgttcctctctatatggaacttcaagtttggctattctgttacattcttacttttgcacaactctctctggctataagatttaagaatcatctctagctatctgggttctaaactattgtttcttttgtgtattgttgtagtatg

SEQ ID NO: 16331 - DNA, 3003 bp, Unknown; identical to SEQ ID NO: 16330
  misc_feature (1)..( 3003): 2750-1469P.txt file - cDNA_ID_1396182; gDNA_ID_1620776; Annot_ID_167730

SEQ ID NO: 16332 - DNA, 3000 bp, Unknown; identical to SEQ ID NO: 15436
  misc_feature (1)..( 3000): 2750-1469P.txt file - cDNA_ID_1396277; gDNA_ID_2926134; Annot_ID_197082

SEQ ID NO: 16333 - DNA, 3000 bp, Unknown; identical to SEQ ID NO: 15436
  misc_feature (1)..( 3000): 2750-1469P.txt file - cDNA_ID_1396277; gDNA_ID_2926134; Annot_ID_138832

SEQ ID NO: 16334 - DNA, 3003 bp, Unknown
  misc_feature (1)..( 3003): 2750-1469P.txt file - cDNA_ID_1396277; gDNA_ID_1972121; Annot_ID_179001
cttcatctctgttatagttgctcgtagctcttcctctttggtctttgcatccaactctagaaataatgagaaatcaagtccatattcagtgtacacaaaacgatgtgagaaccaaacatgtaactagaaaactaaaattcacctttatcactgtatcttttctctgcagattgaagagaagaagaaagattttccttgtcttgaacatgagtttcatccacttgttggtaccatctaacacagaccttaagcttcttgataatatccgtcatttgctcaatcttaccctattagtaccacaatgcaaatacatattaaagtgatttttttcttagaatctcctataatcaaccaattggttattcggttcacaaaccttggtatcaaattttccagctttagctctctcgttaagcaaagccaacacttcatcttttgtaaactcaactttaccacactcctctgtgcttcccacatcgctgttcgcatcttgtctgttcactgtcgaaagcacttgtcttcttccagtaccttgcgtctccttccttcgcttgtcaaaaggaatacttgagagcgcttcctttttcttaaacatagttcaaaaaccaacaaaattaagtaaagccacagacttttatgaatcaatttctcaagagaacccacaagatcttctcaattgaacaaaaccctaaatcaaacaattaaactgaaaaatatcgttatgacttttacaatctccgcttctctcttagaagaaggaaaataaaagaaagaagaaggcttacgacgtttggactaggtaaaggagcgcgattctggttgcgaagtggcatcttcgatggattgcttcaccttaggctcgtcaataggatccaaatctcaatcccgagatcggcggcggatttcttaagaacccgggagaaatcagacctggttttttctgaatctgagatgggaaattagggttcttgcttttttcctaatgggggagattttaagaattgaggaaggaggaaggaagaaggaggagcctgttgtttgaatatttgaaaacagatcggcggactcttgtcaaaattgtaacgttactcttctcctcgattataatattaactttcaggcccatcagcattaaacaataatcttttttttccttagatacttactctcaggccaattgacttaactttcaggcccatcaacattgtaacgttactcttgtccattaatatttaaattattattatataaagtataggctccatttgagccaattgacttaaaactcggtccattaacactagtgatattccatattttgcgtgactttttgttggctaaataaattatgggaaagaaaaaaaagtaagatattaatcaaattggtttctattttatggttaaatctttttataaaattatttttcttttattttgtataaaatgaagggttttaaaagtttcaaattcttgtttttagtttgattcgcagttaatattcgattttgggataattttggagagttattacttactttaactaggattcaacccgtggtttacagcgggcctcggttttatatgttttttttttttttttgtcatcatcatcttattgatttataaatcagcagtgtagtcacaatgtaaagcatagcttattacattaggaacccaaaaatgattaaggaataaagattggttttggagaggagctttagcaagaatatcagctggaacattgtgatgtcttcttatccaattgaaatggattgattcaaacttccttgaccaccaatgaacgtctcgtatccagttgtgaacgccaaaatgtaccttggatccgttgattaggtcaaacagcatcttgttatctccttcaaagcaaacccgtttgtaaccatgactccaacagtgctgcattgaaatgattagcgcttgaatttcactctccagagcattgtccacctttcttcctatagcctgacccgccagtagataacttccattactatcccgaacaacccaacctgctttactttctacatctccattaacgaatgagccatcaaagttgcatttgatccatcctctttcaggtcgtcaatcttatatggtttttaattaagtatttgattatatttatattataaatttataaaatatttcttttattttaaatttttataaataatgattgagatttttattggttagttgttatttagtgattaaaataatgtgttttaatgtgtgtatgtaatttaaatataagtaaagtagtaacaaaaatgtaaaatagtaaaaacggtgtaattttttttgtgattataagtttttttattattattatttttgtgattataattctttttggaatgaaatatgctcatatttagataccaaaatgaagtagtgataccaatattgttgaacggttaagattgtctactttggatgctaaacatgattaggtatttgaattcgtgaataagtgactattattcctaacccacccgaaattaaaaatgtggatcatataaactttaatagattgaattgaccaaattattcttaatggctatgtacaaaatccaaaattgaaattgaggccaaaattatctatttttcaatttgtacttttttttaacaataagggatttcatttatttgtcaagttggattggatttaagttacaatttgcttagatattatcgaaaccggttttcaattaactttgactaggtttaaccgaattggtcaatttccacgtcattcagccacgtgacaatcgcattctgggaacactcgatctcaatcctatgtggcaaaactgagaatcaagaaaccacgtgtcaacatattagtagttaaaaccatatccgagtaatctaagtaacaacgtgaatcagataaggtattctttgtcacataaccaaacaccaaaaattataactcaacacttcactaatcaattattcaaagcagataaaaaaaaaatg

SEQ ID NO: 16335 - DNA, 3003 bp, Unknown; identical to SEQ ID NO: 16334
  misc_feature (1)..( 3003): 2750-1469P.txt file - cDNA_ID_1396277; gDNA_ID_1972068; Annot_ID_178464

SEQ ID NO: 16336 - DNA, 3000 bp, Unknown; identical to SEQ ID NO: 10119
  misc_feature (1)..( 3000): 2750-1469P.txt file - cDNA_ID_1396296; gDNA_ID_2213626; Annot_ID_195881

SEQ ID NO: 16337 - DNA, 3000 bp, Unknown; identical to SEQ ID NO: 10119
  misc_feature (1)..( 3000): 2750-1469P.txt file - cDNA_ID_1396296; gDNA_ID_2213626; Annot_ID_132065

SEQ ID NO: 16338 - DNA, 3003 bp, Unknown
  misc_feature (1)..( 3003): 2750-1469P.txt file - cDNA_ID_1396308; gDNA_ID_1620369; Annot_ID_154935
atgtactattgtagacatcatgaccacatgttttataagagctagatcactagtggccatgaaaagacgaatctttcgtgttataagaaagaaaaaaactctacgtatgaacatgttctataagccgattataaaaagatatatgtccatatataataatgcataccgtcacttgtgctttgatctcttcgtccgacagagtaggcttcccgtcagtgtctttagctattataaacatgtcaagaaaatcttgaggttctttcatcttcccatttcgccattgcatgagtctttcatcaacaaaagggtcgttatacttacttacatttctcattgcgttactcacaaccttctcatggccttccaagtccaagaaccttagccacgggacataatctgacaatgcaaaggcgtaaagatgggttaaaaccgtaaacaaagattccacatgttcaatctcttccaaccctggtcccgatccatcttcacttcctttaccaaaatgccttataccaaacatcatcttccgagctacatttccactgtattgccgtaccgcaagccttaaatcaataaccacaaaagcattaccacggtttttgacactacggttattgatgtaccggactaagttatcagcctcttcggttctcttttgtagcatcatttggaagctcttcttgctcgtcacgtgagatgccaccactctcctcatcttcttccactgctctccttgtggctccaccgcaacggtcaagtacccgcggctgcagtactccgtgcccatcgttagcggtctagtggcgaaaacggagtcttgcttcttcagaatctctcttgcaattctcggggatgtcacggggatcacgtgagtattcgcaagacggatacatgcaatatcggtgttgagttctttcatgagagaatgtatccaccggaacaccggtttgttcctccctagtatttccggtaggtttccgattaaaggccaagatttcggcccgggagggagagagaggtttctcgtagggctaattaacatggttttcttcttctccttacgcttcatagttaatgcaagaagaagcaaacctataataaacgcgagcattggggtggagtcaagcatttttttttttaaatctcaatttggagaaattatttgagttcgaaaaggttttttcttatctatgatgaggaataagctatttatagccatgaaacaaatgcttttgtttaagtgtaatctatggaaaataaatgtgctttaaatgttgaagaaaacaatgttaaatgaatccacgatttttcaacagctcatatgtaagacatgtttttttctttgattattccttatcccttataaatcttgtggatgttaaattggtaatgcatcattatgaaatccttgtcccttttaggtagcgccatcattagaaaaaccacgatttttcaacagctcatatgtctaatgtattacatgttgtgttttaagtacatttctatttaattaccaactttttacttttccaaattcgtctaaatctaatctctaaggataaatttgcttacgattccttaatccttatccctttaaaatcttgttgatgttaaattgttaatgctgtttatgaaatctttatccccttttaggtagcgccacgttaaaaacaatatggacatggagatttgggcttataaaaactgtaaatatttggcccacttaaaaattgattcagcttctgtaaatttaatcctagcagcttccattcggctcgacatgcgtagcaaaaggaatacccacgactatccatcaaccatgaaattaattaggaggcgaattaaaacataatcaaattacataaggactaattaagaaaagctagagattgtgattagagaatagagattataccatgacttgctgaagccaatttttggcactttgcacacattacccaatctctttcagttgtctcttcgatcctttgttcccacttggctcttagtttatgtgtcgaaagatgggcatagctttcaatagtcagtttcgatttgcagcagtaacacttacttaccagttcaaaaatgtgataatgatcgcaatagattgagatatgacttatgagtgatccccaaactcacggcttcgattagtcctcgcttcgatgccataagctgagcctctaaacccgtaatagcggagtcatgaattgatcctttcatgatttgggaggtcgagatagaagagaagacgaaaaagggtttttatacgttactgctttaaagacactctttatttctcttttttttttttttttttttttttgggtctttgtcatcatcagtttactttacgttactgatttcaagagccgttgtggagaaatgtggctgcttctaattttgtatctaatttatgtacgctttgtttcacatttgacatctgatctctttttactgtatcatagcaattctttcttctatctcttttaattattatacttctataccttcatttgttaggtagaatgagtggttgtggactgagtgcttgatccaaacacgtggcttcctggtgggtcgctaacaaacaattgagatcacaagctttggtagcaaaaaaattgaattcataaaaagaatacgtcgtcttttagatcacaagctttgaacgttagcaaaattatgttacctaccaccagtccctggcttattatatagagagagatattcacatttacaatttcgatattgtttctctaagatcgtaaaatagtacaccaagccatttataaatttcttcactctcagattcaaaataatataaattagaaagtaagtcttacactctttgcattcttttttattacaagtttatccactaaagtaagattttcagttctaacaagtttcaattattctcattgtctttttttcaatgctttgtttttttcctaagatttgtgtgttcttgtttatcaaacagtgggaacagagatg

SEQ ID NO: 16339 - DNA, 3000 bp, Unknown; identical to SEQ ID NO: 7308
  misc_feature (1)..( 3000): 2750-1469P.txt file - cDNA_ID_1396358; gDNA_ID_1621139; Annot_ID_172762

SEQ ID NO: 16340 - DNA, 3003 bp, Unknown
  misc_feature (1)..( 3003): 2750-1469P.txt file - cDNA_ID_1396358; gDNA_ID_2926161; Annot_ID_139704
ttaaacgacataactagattttataatgacaacataatttaccaaaataacattattaagtaggatcgtaaacttgagttttataaaccaactgcaccttgagttttattaaccgactcaaccagttgaataatgtttggttaatgacataaaaacctgtctcagcaatgtgtttgtcggacgagtgatatatacaagattatttggggtaattagtatatatcatattatgtaaattgtaattaaaacactaaggacatctccattggttaagatactctgagtatcttagcaataaaataacaaatacttttaatagatttcagttatcaaatttttttgtagatatctttttttccaattttcccttaaattaatatttatttgaaaatcatcaatacaattaaactaaaacccatgtctctcaaacctgacacatcaatattttcgttcaactagaagacataaaaatgtcggaattgtaagatgtaatgaagccaaatttagtttgaaacatcgctacgtaatgttttatctcgctagagagaagaaatttcaatttattggtcatatttttaataattaaaaaataaatcatacataaataaataagttaacgttttaactaattaatatgactaatggttaaaatataattatataaaaaaagacaatggtaaaatttcataacaattcatagtctccaacataagtattaacgaaaaatgccactcaaaacaacttcgtatcaactctacaagaaaaaaactaatcctcttgtttcttttaaaagaagaataagttatagattatgactttacactaaataagattagtactttgattattagaaactcaaacacaatttcatcaaaatactctgcagcataacacggatctttatctaatatatatgaaaattggttaatcctctccatatgaatgtcgtcagcattctcgaaactgtcatgtgtcatcgccatgtcatgaaattttaaacatgcatgacacataatatatagatttgcaaatcataaacatataaaatcttttcctctgctaagaaaataaaaataaattcatcagccaatcaaaaataaaaataaaatcttttcctttcatgagtttttagagcatctctaatgaaatatctaatcaaaatagtttctctaaaataatgataaaatattaaaatgttggagatagaaggtgagagaggttcttaaagttcttatttttgagaacccatgaattctttattagacacactcatgataatgccaaccttgaatgattatagtttttgtttacatatttaatttaaatagataattgaattatattaaaatattaatatttgttagcttaaaattccaaattaagagtcttacccagggccggtccaaccaaatattaatacttgacaaaattttcaaatttatctctatttttaagtttattaattgatgatattaaataaaacaatacattaattagaggtaaaaaaatattgaatattttcttaatatttatgaaaaaattttaaccgacaactaatataaaatagaaataatattatttttatattatggttttagtggaattagctagttaagatacccacaataaaaaaaactcgaattataaataatatgttattgtataaaacatttatgcatagtcctgttttatcaaaaggcttttaccctttcgaaaatatttagtttttttttttgaatcatttgagttaaatgtttgagtcttttttttttttgagttaataacccatgcttatatgtttatatctttgcaaatctgaaccccccaccccacccccaaacaaaaaaaggtttgcacatcatgtcagaggtgtagtggaaattactaaaaagggtaaaagcataacttttttaacagttcccaaaatggataaaatgcttaagatgagatgtcacctagattccctacatcagctacttctgtatatttagtgaattttaatattttttcaaataaattttatttttaaaaaatctcagttaaaaaaaaaatgctcttatgctcttcgataactagagtttgaagaaaaaatgaatttagataaaatacgatcagatacttagaaataaacaagttttgttttgatttttataaaatagaattatttaaaatttcatctacatttgagtcaatcctgttaaaaaccaaagttttcaactttaaagcgtttttttttgtgtggcagtgttcaactttaaggcgattagaattactaatatgaaaacaatcaaattgatgacctcgccaactagagtgcattacataccacttaccactatggtaacaaaaattcaatgttatcactcttttgattaaattgtatgtattcttattcgattttgtctatgttgttttttgatagctagaaagtaaagtttattcatttcatttataaactgtagataacagaataagaataattaaacgtgagggatagcaaagttagaactcaacttaccattatagtttgttctgttcgtataaaaatagaatgtatacttgtttcatctttcttgaagatgtatagtttcactttagtaaagaattaacgcactgcatgaagcatatgaactagcggttaccagaagagataaatattcttttaaaaaaaatggtcatcatctacgtcaatgtcatgatctgtctaattcatcgagaaacttgtggcaatcaaaagagaaacagaagaagctttagttttataaattcgtactttattctaaaattaaataaaatttaaaaaatatatatatatgactagtgaacaaagtctctatatatacaagtttcttctgccttcaatcattcatatacacaaaccccttagagaaacaaaaagaatacaaaaagaagagagagattagttattaacttattcataataagtgtaattacttcgtatttacttttttttggttagcagtcgactagtaatcaataatg

SEQ ID NO: 16341 - DNA, 3003 bp, Unknown; identical to SEQ ID NO: 16340
  misc_feature (1)..( 3003): 2750-1469P.txt file - cDNA_ID_1396358; gDNA_ID_2926161; Annot_ID_198751

SEQ ID NO: 16342 - DNA, 3003 bp, Unknown
  misc_feature (1)..( 3003): 2750-1469P.txt file - cDNA_ID_1396391; gDNA_ID_2214506; Annot_ID_133762
tgcgaataaaaacccacccaaaagatctctcccttcttgaagaaacgaaatcgaaagcaataaccaacccagtagaaatccattatactgaaaatgaatgtgatctacgatcaatagccccggagaccaaatcaccaatgcgcagatcagatttcgtttcaacggttctaattttcgagtcaatcgataaacaccgtagagaagacatagatctgagacgattacgctgattcgttggaagtaaattacagattcggcattgtaatcgagtcctgattgaagatctacgatcctgggatcgacgagacgcgcgaaaattgagaggaagcgttcgaagtaggcgaagaaaggaggatagtcgagtgtccattggctagtctcgtcgaagtaccatttggtaagaggaagagagtttgtgatagcgagccagttacggtggacctcgaaatcggtgcttctggacgacggaatgagaaggagttttacggcggtggctacggcgaagaaccatagcagtagtcgccggtcactcttttcccggtgatccatctcggcaccgatagactgggaacattagcgaccgttgatttacaaaacccattgatatgggcctaatttgggacacgaaccggcccacttagtaactacagaagtttacgtggagttgtagatatggcagtacataattggttaaaaatatatgacatggcattacgtggaactgttcaaattggtttttatatcggattaaaccggtttagctatgaatatttcgttgtgtgtataagtcgtacctacctattacaaccgcccaaaaggaaagtagctattggctatagcgtagagctagaccattcgaattaatcagcggttgagatcattcttcagtaactaaggccacgtgtcatacacgacgaccctaaaagatcaaatagtaaccgtagactcaaaacaacagattttaattcccatgcaaaccttaagacctttacctaacagccacgtagcacgaactcggatcttagctggcgcacgagcgaggatcaccgcacgtgtcaactgcaggtgagtttaaaaaaaaaagaaaaaagtagggcaaacggggtacaagggcagctgtcgtgggcccgggagacaaggacgttgataattgggcctttcaaaagagaggtgattgtgggtcccattaactcattaatctgagtcagctcgacgccttgttgtatcgacagatgacaagttgtgtggtcctaaccaattatgtaaaacctcctttctttttttggaactttattataattgatcacgaaaacaccttttatttttgtatgtattaatacactttaaatatatacatttttaatgttttattattggtttgccgttcgtaatgtgagtcattgcttactcagattcattgagttttcttgacgtgatcttatttaatttaataaatcatgatagtgttttcttacctttgatttaaaaagtcaaaagtctcatgttggaggattataatatgaatcaagagcataaaaatgtgatatttctagtcggtatctgatatttataatagtatacagaatttcacctatgtgacacgttatgtggttttagtattaaaactataattgaactcggactaagaacttaatactactatagtaaatgaataaaataggtcggtcaccctcttattcgttttattacaagtattagcgtatggagtatgtatgtacacattactagtagtagtaaatgtgtaaacgtattcgaattacatgttctagaacctttttaaaaaaaaactttatgactatttagatcgtatttttaaatattattgtttgaacaaagattttgccaaagactcttttacacattttcaactagaggattcttagctatagtattcatatcgatataaaatatagaatagaatagtactatttcgaaagagatttaaattcatccaatgtctttggaatattttttacttggacatgtacatgtgtaccaaaatgtttttgtctcactataaacacgaataaattaattcactctactatagtaacaataaaaaaaagacgttactgtcgatatgtccattgaagaagttaatgaaatacaaataagtacaagcaaagcattaaacaaaacgagaggcgattataaattacacacatgcaatgaaacattgtccaggcgaaatgaatcctaaggaaaagcagagaaagtacacacgagaacagattaataaaatagaaattattttagtagtaatattcatataaaaaattagaaactttctcttttttgtttttttgttaacgaaaatttagaaactttcatttaatgttaattgaatatttgggaaaagtccaccatcatgcgctatgcatgttattgtggccaacgaatcttacaaaacgcaagacttgtttgattctctcgtcgaacgagatccacccaaattattgtattcccaaaataatactaatatatgttctttattgctcttacaaaagaaataaaataattttaaaatttactcgacattcgtaatgtaattgcaaaaataaaaacaaagaaaatagtactcgtaacggacaaagagtttgattcattgcactttaactttatcgatgaggtaaaataatcagaaaaaaaaaaagaatttaccacaacacaaaaagacaataataaaatataataaaagtaatgaattattgaactttaacgtatagatctttcgagatgaagattcggtcacgatgaacggtgaggatgtattgtagagtactgtaactaaagtggtacgtgacacaggtgatcagctcaagtcaagcagaaagtcctaaagccggctttataaatgaacaccaaatcaacctccttcttcctcctcctcctctcgcttcttcttcttcctctcgaatctgcttttcgcagtctatttcgtcatcgtaaattcggaagctttcgtatttaattaagcaaatg

SEQ ID NO: 16343 - DNA, 3003 bp, Unknown; identical to SEQ ID NO: 16342
  misc_feature (1)..( 3003): 2750-1469P.txt file - cDNA_ID_1396391; gDNA_ID_2214506; Annot_ID_184126

SEQ ID NO: 16344 - DNA, 3000 bp, Unknown; identical to SEQ ID NO: 15167
  misc_feature (1)..( 3000): 2750-1469P.txt file - cDNA_ID_1396414; gDNA_ID_2926078; Annot_ID_196272

SEQ ID NO: 16345 - DNA, 3003 bp, Unknown
  misc_feature (1)..( 3003): 2750-1469P.txt file - cDNA_ID_1396500; gDNA_ID_1620555; Annot_ID_160417
gtttaccgatcattaaaggaatataaagcgattatacaaggaggatccaggaacaatcaaagatctgaattaggtatgtgatatagattgactagtttttttactcctattttctatctgagtgtacaatttgtaaaattgaaagtgaaatggatatgtttctaagtttcttatttctcttcttctgttgcttttttctgctctgaagcagagacaccaactaatggcgagaatctaaaatctccacttatctatttaatggattgcacgttgaatgattgcagcttgatcctaaaatcaataaatcaggtacctttgatgatagcttgtctggttcgttttatttattttagtatttgcatatcacagttttgctattgagtagttagagcttatgattgtacacaccgtattctcatttctgaatccagtattcacttgctctatgaatctgtaacattgcagagggaagtgtatccttctctgatattatttccagccgagagaaacaaagtcactccatatgaaggggagtcatctgtaactgacataacagagtttctagctcgccatgcgaataactctcgcgagtttttcagtaagtctttcagttgtttacacatttatgctgaatattatctctaaagtgtctgaccttccagaaaaatactgttttctgcagaatcttaatatgttttacaacttgtgactcaattttttcgtagtaactcgtttttttcctgcctaagctggttactgaggaatgcttttggatttttattattctgttttgatctggagcataataaacaaagttatgaatctttctctggcaggactccttcctactctgtctagaaatggaagaagaaactcaaacaaggtggatcagtcttcttcatctgcggtaaataataaagtgacagatggtgataaacttgttgaggtcgttttaaggaacagagagcccgctgaaagagaggtaaaccacgaccaggtcaattcccaatcgcctccaatacactcgctcacaaacgctccccaagtgaaaactggcacagtcctggtcgctacagaaaagctagctgcctccctaacatttgccaaatcaaagattctgatcataaaagcaggccccgagatcggtttcctgggcctaatctttaacaaacggataaggtggaaatcattccctgacctcggtgaaacagccgagctcttgaaagagactcctctatcgttcggaggtcctgtagtggatccaggaataccactattagctctgacccgagagcgagactcttccacaaaccatgatcacccggaaatctcaccaggcgtgtatttcctagatcatcaatctgtggcccgtcgaatccaagagttgaaatctagagagctaaatccaagtgagtactggtttttcttgggatactcaagctggagttatgagcagttgtttgatgagatcggtcttggagtgtgggatgttgataacagtgacattgactttgcttggccttagaagctcttgcgttgcatctcttgcaatgtttttcttttacgttttgttttagaaagaagaagaaaaagagtagaagatagtaaaacccatcatgtgggtagaagaaatgtttaaactgtaagaataacacttgaaaatgtcttctaaacaaatacaacacagaattagatatcttcttttgagatcattcctcttgcagattacttcaataggaaaacattttaataagcaaaagcaaaggtcagaatcataacaaaagtcattcatctctctttttgccagtcttgttctctaagtagcaaatcttatcctcaggatcagaaaatgccaagaaggcctctctatgagtaacatcagcctgaaaatgagtcaacgatgcacggtataaaggcgaccacatcctaacaccaggtagatcatggagtgccttcattgaatcaaacacaatactagtcttgttggaatctgagggttgcttattgctggttcgtagagcgctaagtgaagggattctagcagcaagaatatcatcgagtccgtctgttaaatcatcatacatctcatcataccactcattaatcatttcagacattagagaatccacaaggttttcttcatcgcttgattcttccgatccgctcgcatcagacatatcatcatcatgctcttcagactctatagaatccaaactgttttccccaacgcttgatcctttcgatccgcttgcatgatcattgtcagcttcctcttgagaaataaccatattgagtgagaatctaccaatttaacaattcaatgttacaacagcatacatatctctaacataacatggaaaatcaaaggggattattcagaaaaaacaaaatctgggactagaattccataatgaaaatctcaaaagccgattacctgatttttttcgggaatggttgtcaattcatcctcttgttgttgaaatctgaaacgaggaattgggaagatgttaaactatttgagcagaaactgattgtgttgtatagcaatcaacgctaaaagagtagatgagtgactagaatggaatctaatgttcgttcgaattactaataaggactcaaaattcaaatcaaaactcagagaagcaaaatgtggaaaaggagacgaagaagaagatatatcagattaccttttcagagaagcgatggagagaagcttttctgggtccgagggttttaagaattgcgcaggtctctttttgtgggttcccagataaaggtaagggtattttggtcataatctcagcttacatacttgtttgacttttttagtatgacttacgacttttgtttctttttttgtaaatttactaataatataagtatgagaagaagacacgtgaagcgccaaaagacttgtggggagtgtataccggataaggtttgcatggtctctaagacctcaggttcttcctcacagtcctttctaaagaatcatcatccatg

SEQ ID NO: 16346 - DNA, 3003 bp, Unknown
  misc_feature (1)..( 3003): 2750-1469P.txt file - cDNA_ID_1396596; gDNA_ID_2213635; Annot_ID_132143
ctagatttacccccaattttctccaaacccgaattttacaacctaaaatttatgaaattgaaatccaatgagtgggatagatttgttcgctacgactaaattaatttccaaagatggacaaagaccaaagaaaaatacttgggttctatattcactgttttagcccattaaaatttaaaacctaataataataataaaagtttaatttaattataaaatctaatttgcctcaaaaacaaaattatatatcgatttgagtttatttgaaaaaatcatggtttagattttacaattaaacaaggttaaatattgatttgggtttagaaaatacgattagggtttagattttatgattaaacgagattaaatatcggttttggtttagaaagtacgattaaggtttagattttatgattaaacgggttaaatattggtttagatttattaacaggtttagatttaacaattaaacaaggttaaatgtcggtttgggtttagaaaatacgattagggtttagtttttttacgactaaatgagtttaaatggcggtttggatttacaaagaagaattagggtttagattttgtaattaaacgaaattatatatcggtttggattataattatagcttcaatttattatgtaatttaaataggatttgacatgacatatttttattagttaatgcaaaaggaggtgaacaaagaggttcatccccctaggaatgaacgcaagtctcgttcaagaccaaatatggactcgtatttttattttattttattttccaaagggaaacaaaaagtctttaatactcttttttctatatacacatatattcacctatttataataaaaaagattgaaacttacggaaaatataatacagtacaaactatatatgtcaactaaactaaataacacttaattaaatgatgtatatagattgcataaccaagtatataatattatatagttaacattataaatataaaatttcatgttaaataaccaattaactctaacgtcaaccggtgttaaccaacaaaaatattcaaaaataaatttttactttatttttaatattaaaaatctagttttactagttattctataatcaaaaaacaatttttacatctactataaaaatattttgcatatatatttaatacattgattcttaaaatatttagctttttttaatttcaaaactaaactaaaaatgaaaaaaatgattaaaatttttaaaacaaaaaaaaaactgaaattaaaaccagaaaaatcttattagaaacatatgagtgaaagaatcttttttttgtattatcaattaaaatatataaacttctttattcattagaaaataaatcattacagaaccaaatacacatgactatataagtttcataagaaagtaatatgaaaaacaattgagtatataactttttagtctaaattttgcacggtaatttttaaattcaaagtaaatgttttttacgaataatataagaaaaaactaactattgattaaaaatatttagcaattaaaaatttaacttcttaagaaactaactattattattattattatgaatagttcatatcttaaaaaaatatttattctcttagtttagttttgaaattgaaaaaataaagtaaatattatatgaattaatgcattatatatatatacaaaatatatttatattggatataaatatatttttttgtattttacaatatcaaataacattaatttttttaatactaataattagttttgaatattttgttggtcaatgctgatcaacgctggagttggtcgaccatttaacccgagattatatgtttatgatgttgacgacttgtataatcatacaatccatatatgttaagtagttgtatgttttttagtttacttgcatttgtggccaattgttgagttagctgacaatatttttttgaaatatatgtatgatgtcaaaaatattttattttttacaaattttcattgtaatattcaaattaggtagagacagataatataataatatagatatttagaaaattatgattttcaatggaaatgaaagtacagactcatatttatgacatttgtttaaaataagttggtatgtaaatacttttgctggcaattaatatctaaatttgtcagtaattacttttgtccagaccacaataaatattcgtctctatccaatccttgctcttcgtgtttatcacgcgctatgttaatttatgacgacacacagttcacttcgttatagcaacgccggcacgcttttcgttgttggaaaacggcaaacaatctgaaaattaataaaataaaaaaacgagaaaggcttttggaaattaataaagttcatcgaaatacaaatatctcttcatcttttctcttttgctcatttcccagaaacctttgtttcatttgcttcgtgtgcgatcgcgagaacaagggaaaattagggtttatatcctcaagctttttcgaacaccattgatcgttgatctaagatttttcttctagtcgagtttcttaaggtctggcttcatatctctctgtgcatggtgtcgttaaatctatgcagcgatgtcctgttcgatttcattttgcttctagggtttaatgatttgtgcatttgttcgttttagggaacgattcttctcagctttgtgttacttcatcgtgattttgttttgttactacgagtcgtttctatttcttagattattcgattagctgaggttttttgaagattcttctacagataactacttctctcgaatcgatttgcatttgttcttcatttttagtatttggatttgttgactctttctctcatttcttacatgcatagctgcaacttatttatggaaaacgaacttgttcgaactgatatttattacgatatccaggggctttgatcaaactcaaaattgaagaccaatactttgaaggattctggtaaagctaagcaactatg

SEQ ID NO: 16347 - DNA, 3003 bp, Unknown; identical to SEQ ID NO: 16346
  misc_feature (1)..( 3003): 2750-1469P.txt file - cDNA_ID_1396596; gDNA_ID_2213635; Annot_ID_181012

SEQ ID NO: 16348 - DNA, 3000 bp, Unknown
  misc_feature (1)..( 3000): 2750-1469P.txt file - cDNA_ID_1396767; gDNA_ID_1620301; Annot_ID_152634
aggaaaaaccggttcaactttccatagtcaatagaatccgaaccgccaattgattttgattgttgaccgggtttagtagaccgaatttagaataggtgaaccgtggccagaattttggcggccgatacacttctttacctcagcctcacattactactctcacaaaagatacacagagagagaagagaagaggaagaaaatgggatctataacggtagctccgggaaccaccgtcttattctccagtcggcggctagatctttgcggtcgtcgccatgagaatctatccgtcgtttcgtcctcacaaccgtctctgatgccaaagcagagatggctttatattcccgagacgaggttgaaaagagaggttttaaagctcgatgtcgtcggaagagctgctgattccacgagctcttctccatcagtagcttccggtgatagaaccttaattcctgatgatgaattcactttagccaaggttttaaatccctaattaaagagtttcttcaaattcattgtgtttatataattaactattcctgaatcagtcattgccttgtccaattttgtgaactgtgtgagatttatggtaaaagtatagtgtctctccaagtaggtagattcgattattagtggtctgaaattgagaattaggaaggatttgatgtatgcaactcatagtttataggtggtattgaatgtgcgttggaataattttggacactgaaattttttccatatgttttgcattgcagatttcatttggtgttattgggctaggtctcggggtttcgctactctcgtgagttttctcttgccttctttgttgctatgggtatatgtgaggtttagcattatggatctgtttaacaggtatggttttggggcctattttactatccttcctggaactgagtggtctgctataatgctaacatatggatttcccctttctattatcggaatggctcttaaggtatgctctttatgctctttagttatctttctcactatcatgtccttgagaaagtggaatgtttcggataactgtaaaattactgagaaaattgacttttgtattagagttactcatttctttctttgagttttcggaatggttaattgttttagtccctgaggatgggttttgcttcctttgcagtacgcagaactcaaaccagttccttgcttgagctattcggatgcggtgaagcttagagaaagctgtgctactcctattttaacgcaggtacgtagtggttctggttactctcgactgaccggagtaccttcaatctgattttagttgttcttcagctcgtctttgttacattaatttcctaaaacatatttatgtttctgataagaggaaggggtgttagtagttttcgtcattagtatttcgaaattcaatctaaacactagcttgatttcagtatcataggttcttttgcagaaagtcttgctcagtttagtttccctatatgacatcacatcgtagttttgtcagtgcacataggattttaaatttacttctcgtgaattgttaatgtgccttcttctttcttttattaggttagaaatgatgtcacgagataccgttatggagatgaacaacatttggaagaagcactaaaacgaatctttcaatatgggctggtaagctattttgttgaaacaaaatgaagcacgaaaacaaaatgaagcacaacacacgcttcttgtacttccgctttaacctctctttctttcgactgttttggtcataagggaggaggaatcccgagacgtagtgcacctatcttacagctgataagggaagaggtacatttcttcacgcgcatgactttacatcatattatttacatgaatcatcaaaatatataactcaatttttacttgcatatgacatggatattgactggtgaaactaaacttaaacggatcatttttgataactcatcatgtctgtaggtcctgaccgatggtcggtactgtgtggtccttgtatttgaggccaaagctctgacgttgtcagattttgaaaaaagacaggtaagagttagattcatatactactaacaaatcagcttggcgcataagaaaatagcttaagtagcgttggttttatcaaatctagtttttaagaagtagcaaaacataaagctggaactaagcataaaaattttgttttgataggcgaaattcacttccttctttggaccaaacatcacggcagaagtcggtaagtagtgaatcaattctccattcatgtttatgaatttcttgttctcggttcttaaaaaattattattgttgttttgctttgaaggtaaaggagaaagtgagaatctctatgaagtaagactgatttccaacctctccaccaactctgtatcttctacctcttgaacatagacaatcatgtatacggcgacgttttcagtcaatgttattttggtcttgtaaatcaattctatataattatcctatgtataaaaagttcatactatttacagaaatgggaattggaactagccttgtcgaatggtaatacggtcggaaggggacaagctacgattgcaacgtgttctagagtaattttgatttgagtaaacaaaatacatatactgtatattattcatatcttggtgaacaatacaaaatatattagtttgttttaaattaccaaactaaagccttaaaaaaagtatcaaattaagcacataagttagaaaagaaaaatgtgttgtaagaaagaaaaaaggttaggaaagaaatatgcgacagaaaaaagagttttatgggcttacaaataagaaaagcccaaatgggccttgagtttgagctttacataaaattcattctactaaacttaagcaaaatcattccttcttctttctctgaaacttttgccttgcttgcttgcccagaaagtcgccgagaaagttaaaagtagaacggcggaggaaaaaaaaacgaagaggaagaggagagatg

SEQ ID NO: 16349 - DNA, 3003 bp, Unknown
  misc_feature (1)..( 3003): 2750-1469P.txt file - cDNA_ID_1396989; gDNA_ID_1971948; Annot_ID_58616
atacatgtttatgtacattattcattaccattgaccaatataaaatcgttacagacgaatatttctaattaattatttataatttattcatctttattattttcgttataggttttgttaagttttttcgtcttacttcacacccacttataccatcgccttgtccatgaaacaatttatgagacctttagtagtttagggcaaaggcaaaccgcgtgagcatattaaattatagtaaccatgtcaacgtgaaatctatttttctttttataaaaggtcaccaaattatagagagatgttcaaatccactactttgtaccttagaaatgtgcaatcatattgcagggatgttcattgttcaatcccatcaacttgtggctatatcctcgtcttgtcttttcaccgtggtcgtattatagaattttgaaactaaagatatagatagaatagcactccttttcttatgtagtcattgtttgttttttatatcgattaatctttcattttcccaaaatgtactataactaaagaaagataacttgtttacattaccaacaataggaatgagactatttgtaactaacatgttaggtctttatctgagaaaattctgactttgacctctttagttctaccggttgctaaaagaaaattaattgacctacatagtttttgttttagaaacaaaaaattcttttaacctttagcaaaacaaaattccattgtgttgttgttaatggagtgatcagtgattcattaaaagatcggaacaaaagttctagtacaacaagagggcccaaaaagcccaagattagaatttaaagcccaacagttttaaaaataaaagataaaaaatttcggattgtccccgaagttattccttttgctgctcttgacttgaaagttataaaccctcacgattcatccttaaaccctaagcctaaagcagaaacgcagaagccctgataatggcggatccgatgaaccatagcaccgggcatcaacaacagcagaagtaccgtcagtacaatccttaccaacaagtcaatcttccgtaccgtaagctctacgaactcccaacttctcctgagtttctcttcgaagaagaagctacgaaaaaacgcttaacatggggagagaacctcaccttcttcaccggttggggttattgcactggatctgttctcggagccttcaagggtacaattgcggggatgcgagccgccgaacgaggcgaatccctaaagatccgaactaatcggattttgaactccggtggactcgttgcaagacgcggcgggaattgcttaggatccgtagggttgatgtttgctgctatggagagcggtgttacgtatatgagagacggagacgacggttcgttgacaactgtgatcgctggtttagccactggtgtgctttacagagctgcttctggacctagatccgctgtggttgccggagctgtcggaggagttgcggctttggctgcagttgctggaagacgcatcgtcaagcgattcgttccaatctaatgaaagtttctcaatctctcaaggttagggtttaagaactagtttaaaggaggggcttttagatagtgaatcattggtactggatttagggcttatgaattcaatttccactgtataaaagttgacatttttattgatctaattgctcaatccgactcaactttttgctgattttgtcgaattcacgaaattgaaatgatctcacataaaaactcaattgataattttacaaaggagaaaaatttgtcaatcaaagaagaagagaaagattgaacttttaacctcacttggtcataacttcaacgccattctttccagcgataatgacagaagtagccattccgagaaacagaccatgctccaccactccttgaaacttcccaatctctttagccgcagcgaatccatccttcaaaggagtcttaaaatacaaatcaataatgtaattactgttatcagtcacataaggcttgccatcaccatcaactctaagctttgattcacatccaaattccttgaagaggtcttgcaatctaatcaaattaaagttccagcagaattgaacaacttccaccggcatagctaatccacttccaccgagtcctgtaacgagtttggtatcatcagccacaacaataaacttgtcagccacagcttccaccattttctcacggagaagagcacctccacgacctttgactaaatcaagattcggatctacctcgtctgctccgtcaatagcgagatcgattctcggatgtgtatctaacccaacaagaggaatccctaacgaccgtgcttgttcctccgttcgtttcgacgttgggataccgacaatatcgtagagttcaccggaagagagtagtttcccgatctgatcaacagcgaaagctgcggtggatccggttccgagccctagaaccatcccaggtttaattgcctccacagctttctccgccgcgagcttcttcaaatcgtcctgtgaaagcgcgacggattgagccttgacggagaatgaaacggaggttcgaggagaagagccagtgctgcgtagggcaatagaaggagtgcgtagcgtaaggtgagaagaggaaacgaaggataaggaagccattggagagagaggattgagaatggttggagaagaaataaaatgaaatcgaaaggtttggtttttgacttttgagtggaagaggaaggtttagtggcaagttatagagttttgtagttggtttgagggtagtattggaatactagttttaaggttgttgtatttgggttggtgaagataataacctgctaaaccaatcagagtgttaaatatacgatgtcgtttttgtttctttgagaacagagttatataaaaaccttttttggtttggtttcgtggagagtctaattattttcttccactttctcgatctttgagatttctttcaaaggaagaaaaaaaaaaaaactcgcgatg

SEQ ID NO: 16350 - DNA, 3000 bp, Unknown; identical to SEQ ID NO: 9372
  misc_feature (1)..( 3000): 2750-1469P.txt file - cDNA_ID_1396989; gDNA_ID_1972105; Annot_ID_178720

SEQ ID NO: 16351 - DNA, 3003 bp, Unknown; identical to SEQ ID NO: 16349
  misc_feature (1)..( 3003): 2750-1469P.txt file - cDNA_ID_1396989; gDNA_ID_1971948; Annot_ID_177324

SEQ ID NO: 16352 - DNA, 3000 bp, Unknown; identical to SEQ ID NO: 14757
  misc_feature (1)..( 3000): 2750-1469P.txt file - cDNA_ID_1397255; gDNA_ID_2684224; Annot_ID_191880

SEQ ID NO: 16353 - DNA, 3003 bp, Unknown
  misc_feature (1)..( 3003): 2750-1469P.txt file - cDNA_ID_1397500; gDNA_ID_2214625; Annot_ID_135945
gcatgtgtaggtcagccatgaaatgcaagccatacatcaatttgaacaggaagaaccacggtggtacccacattgttttcagagaggtcaagggatgaaaggttggaagaagaatcaagaagtgtagagaaaaccatcctcgcaaaatatctatcgaggttgctatcgccaaaatgtaaggaatgtaaggtcctgaaagaaaaaagatgctcactaaaagtaaaatgaagaaagaagtacataataataatattacaacatttatgaagagactttgatagccaaatgagcaaacatttaacaagacacgttttggcatcagtccatatatatacctcaccgacatcaggaatgaaacgaaagcggaaggcgcagcaagtggatctatctcaatgctagatgtctttatacagaaacgttgcatcccagttgtgtggatacccttttcatgaagagaagtgcatattgcactgatggaactcaaagaaagcttgcagtgaataagttcaagcgaagttaatgtttctcggctctgaatcaagagcttgcacaagggctcaacctggagttcatggaacatcagcaataaaattccagctaactaaatctaggagactaaatagagaaagcgtcttacatgcttctcggatctgatccaacgtagaaccaaacttcgcaatttacttgtcctcaataactcctacagtaacaaagcctaaagattatttctgtcctccctctagaggttgaatgattgattcatcaacaaagatacaaatttgaagttctaagagagagataaacatcgaaagcaatacaacatatcacggcgatcagtggatactgaaacaaaaataaaacaaagatgactctatttacaaacacagaaacacatcaaaacgtcagagcatagtttaattacttacagaagtttctgtaacgcatagcacattcagaagcctcagacacctgcaacaggtaagaatgaacgcaaagaagcataagtatgttagagcattaaatcagtccaaaccagatatctcacgcacaaccagttatgagcgatataaaagtaaggcaagctgaaagtagtacagtgtatccgtatatacaaggaaaacgtgaggctatgaaacgattaataatcagacacacatgaaatgttactcaacctaagatatggtccaaaagtttggaaatgaaaagatagttccttgcagacacaattttgacaagtcatgatgtgctcttcatggcaaatgtatctcaatatgttatctgcaatagaaaaatacaacaaaaaaactgaataatgattattacacaactgaaaaaatcaaacccaagaatttcattggaacacataccagatacattaatggaacaaatccgaccactaaatgtcggacgcagagctacctcagctgcttcatcaacacaactgttactcggataaagatacaactcaaaaggaagttacataagcaataaaaaacaaatcatcgatcatttcaatagaattggcatacttttggagatgcttttcccagtaaagctgttgccaatcagctggtgattccacacggtcaacaaaatcaggccaccgcagcttaaacaacaacttccaagagctaccaagtacatcatttctgcagatgaatttaagttaaatctttctcagtctgtcttctcaattcgaataacaaaacagaaatcaaaagaagaattcatcaaaccttgcacgttttctcccagtaatcaagcagcaatcatctccagattcataactatccaagcaatgaaacggcctataccaatagaaaaatgtaaatgaaataagagttgtatcatcttcatccatataattcgtaaccctaactaaacctttcaatttgtattcaaaacttaaatgaaaccaaagagtgtactgacatgttggtctgaaacttctgcaaagcaagagcaggcaagtgagcgacaatgccatcaagtaactccgatggaagctcgtataaatctggaattggattatcgcctggaattacacaaaacccaaactcaaattcagcatattttggaatcaaattggcgcaacaaaagctttgttagaattactttctagaagctgaattttgagggattggatgcagagaaacgcaagagaaggagctttcgtcatccaaacaaagagaagagagtgccaatcgcaacgcaaccaaaacttcccgctgcagctgctctcggctcgctgtttctttcttccaaagagggaagagcaaataattcgttatgaggtctctttcataatgggccgcttagtatggcccaattcataattattcatagataattaaatctttttgtgaccagtaaaaaaacaattaaagttttaaaaactttgtttaaaaaaacatattttcatgagtagtgtaaattattttaaaaagaaatggaattataaggaaattttaatcaacaataattttataatggaatttaaatgttttttttatataaaaaaaaactaattgtgagcattgccatccaaaaataaatggtaaatttatttgtaattaaaaatagaagaaatatcaggatcatataaatcattaaacacatgcagccaaaaacataataagtgtacaaataaaattttaaaacagttccaaaaagcatcagataagagcgaaacaaattacaaaattgaattacacaataatgtcctctaagcgacgactaccggtgaaatattttataagaaaacaaaaacaataattaacaaacaaaggcgacacctttagattcgacaagacgaccattttagaaaaagcttctcaaattctctccttatccccaaaaattcaaacttttttctctttggaaaattctgaggcaaaaatgcggcgtaattgctgccatgtttcatttgcttcaaccctcaagatccttaattttgtccaagctttcattggtgtttcgatcattatctactccatatggatg

SEQ ID NO: 16354 - DNA, 3003 bp, Unknown
  misc_feature (1)..( 3003): 2750-1469P.txt file - cDNA_ID_1397500; gDNA_ID_2214625; Annot_ID_187772
cttaagttgagcttgcacagggactgtaaagactttccagatgacagagaaccaacaacagatttgcagctaaaagtagaaagccatcctgaaatctatatagcatgtgtaggtcagccatgaaatgcaagccatacatcaatttgaacaggaagaaccacggtggtacccacattgttttcagagaggtcaagggatgaaaggttggaagaagaatcaagaagtgtagagaaaaccatcctcgcaaaatatctatcgaggttgctatcgccaaaatgtaaggaatgtaaggtcctgaaagaaaaaagatgctcactaaaagtaaaatgaagaaagaagtacataataataatattacaacatttatgaagagactttgatagccaaatgagcaaacatttaacaagacacgttttggcatcagtccatatatatacctcaccgacatcaggaatgaaacgaaagcggaaggcgcagcaagtggatctatctcaatgctagatgtctttatacagaaacgttgcatcccagttgtgtggatacccttttcatgaagagaagtgcatattgcactgatggaactcaaagaaagcttgcagtgaataagttcaagcgaagttaatgtttctcggctctgaatcaagagcttgcacaagggctcaacctggagttcatggaacatcagcaataaaattccagctaactaaatctaggagactaaatagagaaagcgtcttacatgcttctcggatctgatccaacgtagaaccaaacttcgcaatttacttgtcctcaataactcctacagtaacaaagcctaaagattatttctgtcctccctctagaggttgaatgattgattcatcaacaaagatacaaatttgaagttctaagagagagataaacatcgaaagcaatacaacatatcacggcgatcagtggatactgaaacaaaaataaaacaaagatgactctatttacaaacacagaaacacatcaaaacgtcagagcatagtttaattacttacagaagtttctgtaacgcatagcacattcagaagcctcagacacctgcaacaggtaagaatgaacgcaaagaagcataagtatgttagagcattaaatcagtccaaaccagatatctcacgcacaaccagttatgagcgatataaaagtaaggcaagctgaaagtagtacagtgtatccgtatatacaaggaaaacgtgaggctatgaaacgattaataatcagacacacatgaaatgttactcaacctaagatatggtccaaaagtttggaaatgaaaagatagttccttgcagacacaattttgacaagtcatgatgtgctcttcatggcaaatgtatctcaatatgttatctgcaatagaaaaatacaacaaaaaaactgaataatgattattacacaactgaaaaaatcaaacccaagaatttcattggaacacataccagatacattaatggaacaaatccgaccactaaatgtcggacgcagagctacctcagctgcttcatcaacacaactgttactcggataaagatacaactcaaaaggaagttacataagcaataaaaaacaaatcatcgatcatttcaatagaattggcatacttttggagatgcttttcccagtaaagctgttgccaatcagctggtgattccacacggtcaacaaaatcaggccaccgcagcttaaacaacaacttccaagagctaccaagtacatcatttctgcagatgaatttaagttaaatctttctcagtctgtcttctcaattcgaataacaaaacagaaatcaaaagaagaattcatcaaaccttgcacgttttctcccagtaatcaagcagcaatcatctccagattcataactatccaagcaatgaaacggcctataccaatagaaaaatgtaaatgaaataagagttgtatcatcttcatccatataattcgtaaccctaactaaacctttcaatttgtattcaaaacttaaatgaaaccaaagagtgtactgacatgttggtctgaaacttctgcaaagcaagagcaggcaagtgagcgacaatgccatcaagtaactccgatggaagctcgtataaatctggaattggattatcgcctggaattacacaaaacccaaactcaaattcagcatattttggaatcaaattggcgcaacaaaagctttgttagaattactttctagaagctgaattttgagggattggatgcagagaaacgcaagagaaggagctttcgtcatccaaacaaagagaagagagtgccaatcgcaacgcaaccaaaacttcccgctgcagctgctctcggctcgctgtttctttcttccaaagagggaagagcaaataattcgttatgaggtctctttcataatgggccgcttagtatggcccaattcataattattcatagataattaaatctttttgtgaccagtaaaaaaacaattaaagttttaaaaactttgtttaaaaaaacatattttcatgagtagtgtaaattattttaaaaagaaatggaattataaggaaattttaatcaacaataattttataatggaatttaaatgttttttttatataaaaaaaaactaattgtgagcattgccatccaaaaataaatggtaaatttatttgtaattaaaaatagaagaaatatcaggatcatataaatcattaaacacatgcagccaaaaacataataagtgtacaaataaaattttaaaacagttccaaaaagcatcagataagagcgaaacaaattacaaaattgaattacacaataatgtcctctaagcgacgactaccggtgaaatattttataagaaaacaaaaacaataattaacaaacaaaggcgacacctttagattcgacaagacgaccattttagaaaaagcttctcaaattctctccttatccccaaaaattcaaacttttttctctttggaaaattctgaggcaaaaatg

SEQ ID NO: 16355 - DNA, 3000 bp, Unknown; identical to SEQ ID NO: 8879
  misc_feature (1)..( 3000): 2750-1469P.txt file - cDNA_ID_1397582; gDNA_ID_1971910; Annot_ID_177083

SEQ ID NO: 16356 - DNA, 3000 bp, Unknown; identical to SEQ ID NO: 8602
  misc_feature (1)..( 3000): 2750-1469P.txt file - cDNA_ID_1397711; gDNA_ID_1971820; Annot_ID_176123

SEQ ID NO: 16357 - DNA, 3000 bp, Unknown; identical to SEQ ID NO: 8602
  misc_feature (1)..( 3000): 2750-1469P.txt file - cDNA_ID_1397711; gDNA_ID_2926158; Annot_ID_198552

SEQ ID NO: 16358 - DNA, 3003 bp, Unknown
  misc_feature (1)..( 3003): 2750-1469P.txt file - cDNA_ID_1397750; gDNA_ID_2214537; Annot_ID_134398
attaatacagaggagaggaagatcgtcctcacaagtatttgcaaaaatgatacacaaatcaatgccaaaatgatgacgcagtgaaggtttagacagctcaagaatgatattgcacatcaatcactgattcaatgttttatttttgtcttcttcttttttttttttgttgaatgatactcattgtcaacataatatcataagccttttatcaaaataataataatacataatgtcctgcattttgtctttttgtgatgatttttgctcattatataaattgcaagtaactatgttttgcaaggttttttctgttcgtgacataaattgcgagtaaccatgttatgttattatatatgtacctatggtgcgaaggttagattttacatatggagataataagtattggatttggagataacataatgctacgactttatactgtgtatgttgggatttcataccaaacaaaaaaaatgaaaccaactagccaagaatatgtttacgttttgagttttacagagttcacattatagttgattttatttgtgcaaattatatttactctgcaaaataacatcttactctcctacttcaagaaactttgaagagaaagatatggaatgcaacgagttacacaaatctgttacaagatttctaattaagaacttacaaatctgctacttatcatcttttgaatacgtcttttggtggttaggttctaatttgtctaacagtatatgttttccaacaaaatttgatccttttgaaagcattactcttttttttttttttttttgtcaattttgaaaggattactcatattccttaaatcatgttactaaactcacataaatacgtattaagccaaagacgactcttgacgtgctctaaaatccaattcattctttatagattttaattcttggctctttatcctatttaatatttcgccgaaaaatctttgaaatgattatctgattgtatttttttataaaaaatttgtcataaccaaatttagaattatattttaaaatttaggaatgagtttagttaagaagttggtttgaaggtatagttttttctggaatttaaagtttaactttaaaatttattaacgatttagtattagattagtttattaatttgttgaaaaatctggtctattttgttacttttttcaaaaatatggtctattttcataaaaatccctaaaatatccgaatttatcggataaacccaaaccccctatcgggaaaacccaacacaccgtctctctctcactctcacttcccatcggcgaaaatggcgtcggtggcggcatcatcgtcgatatcattcgctgcatcattcctcaaaatcaaagcattccctctctcccctcgcttcttccccatccgtacactccgttgctctgtctcctcctcctcctctgagcccattgaattcgacatctccttcgctcctcccaaacccaaaccctcctccactcacggcggcgtcacccctcaacaactcttcatcccttggatcgtccgtagtgatgacggcactctcaaactccaatctcaacctcctgctcgtttaatccacaacctcgccatcgatgccactactcaaaaccctaagaagaaagataaatctaagaagaaacaacctcaagctacctcctcttcctccgccaccaccaccgcctcatctccagcttcacactcagaggtaaagccaaagctatccaaagcggcgcgtaggttttacaatgagaattttaaagaacaacctcaacgtttaagcaaagttctcgctgctgctggagtggcatcaagaagaacctctgaagaacttatttttgatggcaaggttactgttaatggtattctctgcaacactccacaggtaaaacaattctcattgtgggaatcaaattttgatgttttgatgataaagcttagcaattttgttaatgcagactcgagttgatccatcaagagacattatttatgttaatggaaatcgtattcctaagaaacttcctccaaaggtttattttgctctgaacaagcctaaagggttagccttcttcatagctttttctcatacctagcttcaggattactatcacagacttgtaacctttgtttgatatttcttgcatcatcctgatggcagatatatttgttcttccggagagaaagagatcaaatctgctattagtttgtttgacgagtacttgtcctcttgggtaagacattttgttttcctgtacataaaacgttgtcttttaaagtatgttagattagaaaacttggtttaagaatcttgtctttgcaatgtaggataaaaggaatccggggactcccaaacctcgcctttttactgttggtcgtcttgatgttgccacaacgggattgatagttgttacaaatgatggtaattgtattaattgaactccatgtgttatgttatatatcttggtttgtacattttggttcaaggaactatgtttctcttcccttcttctaaaaagaatttcaacttcttgctatgcaggagatttcgcacagaaactttcacatccttcatctagtttaccgaaagagtgagtttacatattccttttatataccgttatcactcatgattaggtgatcataattggtaggaagaacctttggttaagtaaggtaaaagaaataggctagttcgtgccaaatatttcttaatgaatacaattcagatagatgtttactgcagagttattttttgagctttggttgctggtagtagtcgccaattccagaaattgtggttttaggatcctctcagttttataaattcaagcagtgattctttccttgaagatttatgttccgtctaagtagttcaaaggttttgtatatttatactgctcttattatctttcttttttgaaattgcagatatattaccacggttgtcggtgatatacacaaacgacacttaatggctatcagtgaaggcacaatg

SEQ ID NO: 16359 - DNA, 1864 bp, Unknown; identical to SEQ ID NO: 12229
  misc_feature (1)..( 1864): 2750-1469P.txt file - cDNA_ID_1397750; gDNA_ID_2214537; Annot_ID_185121

SEQ ID NO: 16360 - DNA, 3003 bp, Unknown
  misc_feature (1)..( 3003): 2750-1469P.txt file - cDNA_ID_1397812; gDNA_ID_2096300; Annot_ID_195671
acgaatacagaacaaacaaaactcatgggacgaatagatataataaagatacaaggagacagaagcgtgtcgatagcagaagcaatggagacagcaaagcactaatcttttgagacaataagccaaaaaaaaaaactagctgaaattcatcctaaagtcttccactatctgatctataaccaatctacttctatatccaccaatatgattacaaattattgaggaatgaaccaagaatgtggtctagtcaaaatgatctttaaaggaattaacagaactattgaatcaatgactatatgtcaagtaacataaccaaaatgtagatatataatgcgagatcaattacctcgtaaagaaagtactacactaagaagatccaacgatgatgttgttgattgggatgaaaacgagcttcacgaagaatccaacgaatcccatcaccacaaatccaatcgccgtacgcacagctactttcgtgaattctgataaccaattcaattacaaatgatatcaaaatttcagaaaaccctaatctacagatcaaaaatcggaaatgagatttttttgagaaaaggcgttacccttgcgatcgggtttgtgacagcgctggacgagacgaacactgctcttagcgaaatctctgagaggatcgattgcggaatcaatggcttccatgacttctttttagatcggaattggtaatcgaaattagggtttcagcaggttcgtttaaggatgaaaattgggttttatttttgacatttggttttatactttagttccgttgactttcgcctccaccataatttctccaattcagatttgattcggtctgaacacaaagtccggtttggtttcttatttgtcttaatatcgattactttccatctataaaatatttttctacaacatcttaagaattataattgagtgatgttgatgctactattttaagtttagaaaataaacactaaaaagacaaatgtctcactcatcaaagtaaaactcttgaaaagtgcaagagctctgaaatttgagaacgaagacaagactccttgtttttttttgtttttttttgctaaaaatttaaatattcattattacaatgaaaatttcggttacataataaatggtaaccaaatcatggttccatgacaaaaaaggataaaaagcatggaagcataccaagactccttgttactacgtcaatctcttttatacgttttcagccaagattccggattatgaaagaatcttgggattctaacactttttctttttttgcttgaaagaggtttacaaattttaacactttttttttgttgaggattttagagtgaaacacatgttttgaactgtcttcaactgaacaattcatgttaggcgtctatataaccgtcggttattcacgaggtaactacacatgaacatgataaatttactctctcttttcattaaaaaaaagttgtacaacttaattacttatgtcatgaaaatagtatatacgtaaaagtagattatttttgtggttttccttttttttactataacaataaataattctatgttacctaaattttcttaggtagtataatggatcaaattgatatggagtaaacaaaagaaaaacttaaataatctggtctataatttgaagcgcttcaagccttcaacatcaatccgagtacgaacaataatatgagatttcatcaaaatattatcctggaaacgatttttcatttatatgcgattatattgttaatgaaagttggaaatacataatctagacacgtaaatgtcgtattgatcatgttgtgaaatgagctgtcgccttggtggcactttttggcattctctatttctctttccacatttaccacaatgtatccaaataggcaaatatataagcttagagagttggctgcacgtttttgctaaacttgataaatgagtcaatacaaccaatatagccaccatccatatctacaaatctacacttatcatctaaacttgaagaatatttgttattttatcactaaccacaaaagacaagactcgttacttaagttaaatgatagtgacatgattaagagaatattagctattaggtcggaaataagagaaataagactggtagtggtatggttatgtaaattatcagtacatgtatataacacttgtccaaataatggctttcacattacaagtcattctttccctgagactactgcaagaaacaaacacggaattctcgtgataaacggattagtacgaaggaaaaagtaaaatgcagtaaccaatttttatatttcaaaaaacaaggcattttggatgcaatgaaatatttagatatataaatttgactagtgacaacaatttaaagttgttagatttctcaaatccaaaaaaaaggaaataaataaataaatagtttatggctattcaaattgtgtattattttttctattggttaaaatctataaaagattttttttttattacttcttaaatttatgtttatagccaaaacatctaataaaatgggacagagaataataactaggaattcaaacacattatcaatgattagcagaataaaagtttggaacatctaaacctaatgactttatacttcccctttttagagtttactttgtatggaaaactttgtaagctaacaaacaaaagtattgaaatcgtgaaaaatagtaaagctttttgagctgcaatatttgatgcgttgaaacgagttggaaacagctttcactacactaaaaacaaacttaatctcaaaatttagatggattaaactcaaaactttttaattaattgaataggattttaggatgatgcagtgaatatagactatttggtgaaaaaatacaacgtaacgtacgtggctgctctaagcctatataacatagcccaagagagtcgtgttctaatgtgattaagtaaagtgagggagaagcaacgagagatagagatagagagatcaagatg

SEQ ID NO: 16361 - DNA, 3003 bp, Unknown
  misc_feature (1)..( 3003): 2750-1469P.txt file - cDNA_ID_1397832; gDNA_ID_1621119; Annot_ID_56262
acaaacttcatgttgtagttatagtaaacttgcttatttacctgcgatagctcctacgcgtttatggtttacgaggcttggatctgcagaatgtatcaaaatgattgaaaatacgtattagtactatctaatagtccctaccaaaaaaaaaactatctaatagtagttaaatagttctcaatagaaattgtagttaggacgaaaagatatgaacatagacattttgacctttgcaataagtagtgacattgccttgtttacaaaggcacaaaaaatctcgtgtcctcgtattaaacccacaaactccaccacctttagtcgtttcttggcaaagaaggcacttcattgtcactggaaattcgtaatcaacccttatcccgtactctggaaactgatcatacggtgcattctccacacctgtactcctccaatacacacttgtatacgtcgcacagtcctgcagcatgagcctaagagattgagtcgctttagggtaatacgaacaacaagaaaccctagatcccaaagcagagccacattcaggcaaatgtctgcatagatagctagaactatcgcaggacgagtcacatctatctggaaacctttcgcagaagagcggttttggttcgacgataactttatcggtgttgcagttgaagaacaagtagtcgttttgaggagagacagtgaagtgtgtacttgaatcgatgctaaaagatctagtgggtcgaaaattgtctcgatcttgacagttccacatgaatggatcggagacaagaaggtgaggatcagagtagcttatagatttaacagggtatttaccagatggtgttctaagttcgagcttggtatcgttgtcggagcaaatgagcatgtgtctgtaataagggctaccacaaccgtcgtcgatggaaaaagggtaatttatcggaatgttgccgcaagaagatctgcagagatttgattgggatgatgttgttgatgattgaagaaggatggtcatgagaagggagaagaagataatgtaagagtgaagtggagacattgttcaaaaattaggagtttagatttgattattgggtagtttttagttatgagattataatttggtggtgtgaagtgttgagtaagcttggaatgtcttgttaaagagtttaagaatcaatcttgtcatgtgcttgttaatattgcttattttaggtttcggtttgtttttaaaatttcacctttctttttagtataaagtattccaagaggactcgtggttttgtttcagattatttgaaatatttacatacaatatgtcaacaaacgtactattcttttttctgatattttacaacaaaatttgttctttaacatgttatctaaaaaccatttaacaaaaaaaataaaatgtatgagaaccttataaaatacaaaatagtaatttcagtatataatagttttgaattttcttttatttagaatttcgtttaaagggttgtgatttgtgaagtaatctttggaagataatctcaatgtaaacaacacattgggcttctcataggcccaatataaacaacacattgatcattatccatgtaaggtgaactctttaatcgaaaccgttcaatttcagtcatctcaatccaacggttagtattccaaggagcacgtaatccactctaaattcgtaaacacgtgatttctcactaaatataaaacttgatacgttacgccttcctatccatccgtcaacgattaaatccaatcgttcaatatagagatccaacggctaataacgaaacattagcccacacgaaatctcctttttttttttgacgggattatacagtgggcctccacctgtaattgtccatttaggagacagcgcggttaatttagcattatccctcctcacagtcatctctttcttcgcaaataaatgtaaccatctctcttctcgttttcttcaacaaaaatcctcatttctctgagaatctggtgctttagctttggtgagctctctttcttatgaaacttatcgattctcttctcgttgattgtcttatacttttagttctctgcttaatttattgtccttaatactcgtggatttgttcataaatcgttttctgagcagttaggtaagagttttgttaccgaatttcatgttcttcgattttgaatctggatgattgtatgatgtgattagtagactcgcttagattttgtgatctgtgtatggtttgtggctaattttggtttcatcggtggtatgaatttatttggggttttaggtttgtttgattacgtaatcggactgtttacttgaagatttatcgattatagttgtgatcgtttttagttgattgagaagaagaaaataaatttcatgctcttgttattgtcgcgattgtggcgattttcagtgtcttatgaatcaattatgttgcatgtgagtcttggtgcaattgagattgtttcctttttttactagattgcttgtcttattgaacaaaactttccatttatgttgaaaaggtttataggaacggatgtttagggttttgttgtaatctgggtatttgctttctgatttcggcaagcaaatgtcgatttcaaggtttatatcactttctctagcaaaagaagtctttagtcatttgcaaagtcaagagagtttttactttatttattgcttccacgctattgcttcgtggctgattgagagagaccaattaaactaataatttgtagtttgtacaatatattgcgtgtaacattgtccttcgttatctgtttgaggaggaggaccgagttagcctatttttagtcactttacaaattttcttttatgttgcatcattcaatatgaactctctgatataaatatatgtatacatactggttgacttttatgggtatggttctctgctttttttctctgtgatggtctcttgattctaactttctttgttttatgtttttggtttttgttgtcaatgaataggtaaaatg

SEQ ID NO: 16362 - DNA, 3003 bp, Unknown; identical to SEQ ID NO: 16361
  misc_feature (1)..( 3003): 2750-1469P.txt file - cDNA_ID_1397832; gDNA_ID_1621119; Annot_ID_172002

SEQ ID NO: 16363 - DNA, 3003 bp, Unknown
  misc_feature (1)..( 3003): 2750-1469P.txt file - cDNA_ID_1397867; gDNA_ID_2214695; Annot_ID_136798
atccacaaatcagaaactgttttgttcggtgttgactcgactaatgaagagcttgcagcaatagttcagacaagaaacacaactacaataatactcccaagtggagttcacacattgcctaaagacggtaacaattctcctctcccgttgattaaccggtggaaaaccggtggagaatgtgactgcggtggttgggacatcggttgcaaactccgtgtcctgtcttataatcatacaaagactcaaactttgtcaagctttcaattgtttgatcaggtaaactaacttgttcacttcaagcagctttcgggtatcgatggtttgagtcatttttcaacaatttgatttgattctcacaggaaagagacgagccagctttcaaaatggtgagccacggcgatgaactccactctgttgagtttggctcatcgatctctctcttggaagcgttctttatttcgttagcagtaactagtcatcagagttggtgtcaggaggaagaagaagaagaagtggttgtgatcggagattgtctgttaaagagagaaacaccggcgaagtacgcaacgaacccaccggtttctccaatcggtcgggtctagaggcagagagagttgggcttagacagtgttggatctggtttgggctgggctttaatataattgtaattaagaattacatggcataattaatcgtttagaatttgggtaatgtacaaaatagtgaaatgcatttatgaataatatagtgcttatggtttttcctatagtcctttgaaaaaaatcgaactgaaattattttcagaaaaactcatttcgagacgttttttcggttgaatcaaaactattttagattttagtatttgatgataaaaggaatagagaggcatgtgaggaagaaaccgtatttgacagacatgcttcgctgcattaccctacgtactcacatgcttctccaaatcatattcctccacgtgtagtgtttttttcttctttctcaattagatatagttaaaccttaattaagttttgttaagatttgcaaattggccacttacttaactctggttaccccgacattaccttcgaaattttaaattaaagcgtcaataacggttggtgggtttcatctcgtgaccactgactactttttagttttacttactgaacaaaaaagctctttatcagaattttgaatataccacttgtttcctatttcggataaattgatcatataaaattataaagtaaaggtttttctcttagaagataaattttttttctccaaatttgcataccatttaaaaaatgaaaaagactcttttaaaacaaaacacaggctgggactgataatatgatattctagaatctttcctgaaaaagaaaacttacatagaaacttcttcttactatgaactttttgtaaaagaaaaaaaaaggttcgaaatgagtgaaaatgattttaacgtgcattaaacttgtttgatatgaatcaattcatgtaataggattgaatgctgatagtaacatcatacttattttctgacaataatttaataaatgagtacacttgttctaaagttctctttgagaattctagaatacaagtctgcttaatcaaaaggctattttaagataaatgaatttttaaaaaggttaagaaaacgtatgaaagacttactgtgatggacatatcaatcgacagttattgggagtttttttttggagtagcaaagaaatgtaagaaaaaataatgagaagaagataaaagccaaagttgtgaggcttgtcggaccaaaaatggccaaaatgctagcaatccttgaaaacaagtgatggtaactggaacaccaaaatttaatgggttgattgaatcattgaaagatttgactttcaatatttttgatattttcctaaggagacttttatgacttttctttcattagtctctctagccaaatttgttttgcacggctcacattttgccttcaacaattttcattacttgatctaacatagttacttcttaaaaaggcaaaacaaaatttactttaatagctgagtttcttttttgtttctttaccatttaaatcatatagaatggctaaccatatttgaaatagtattgaatcgaatgtatctaccattagaccaccatgaatgatttcatttatactcatgtattttacagtttgttaagttgattcatatactaatttaacaactgataattgttacacatccattaagctttcatcaatacttaaattaatagcaaaaatgaataattaacagctaaatacacccaaattttacagaaatattctactcctacaatttctaccagtcactactctctaattttggtataaaaatcatatagctcactatataacagctatcaacctgtaatatataaattctgataattaatattggagaatttagtctaattagctaaacattttattcgtataaagaaactttttttttcctcgtataaattctaattttcgtttcgtggtttgaattatactttttttgtttttatatataataattttcaattcaaccgtttctccgtgttgaactctaggcctttttaatctatgccttcatttctcagattcttctaaagaaaaatttcgcttttctctctacttcaaaacttttgataatcttctttaaactttcttcttcgatctctctttgttaactttctttcgttacgtctctctcgttctcgttatttcttattctcagatcttggattcacgaccatctcgatcgttgaccgtcgaatttgggttcggctaaaaatccaatctttttttttccggtgagaagctcgagagagtatataatttaataaagggtacgtacgattttggttgagtgttttgatgatgttgacccaatttgttggggtgtgaagtatacttatggaactgattgtcacaatacaagaagaacaacatcatcaacaaacaagaataataagatg

SEQ ID NO: 16364 - DNA, 3003 bp, Unknown; identical to SEQ ID NO: 16363
  misc_feature (1)..( 3003): 2750-1469P.txt file - cDNA_ID_1397867; gDNA_ID_2214695; Annot_ID_189506

SEQ ID NO: 16365 - DNA, 3000 bp, Unknown; identical to SEQ ID NO: 13314
  misc_feature (1)..( 3000): 2750-1469P.txt file - cDNA_ID_1397919; gDNA_ID_2214615; Annot_ID_187501

SEQ ID NO: 16366 - DNA, 3000 bp, Unknown; identical to SEQ ID NO: 8341
  misc_feature (1)..( 3000): 2750-1469P.txt file - cDNA_ID_1397961; gDNA_ID_2214705; Annot_ID_189819

SEQ ID NO: 16367 - DNA, 3000 bp, Unknown; identical to SEQ ID NO: 8341
  misc_feature (1)..( 3000): 2750-1469P.txt file - cDNA_ID_1397961; gDNA_ID_1971751; Annot_ID_175291

SEQ ID NO: 16368 - DNA, 3003 bp, Unknown
  misc_feature (1)..( 3003): 2750-1469P.txt file - cDNA_ID_1398124; gDNA_ID_2936555; Annot_ID_194203
cgcatggatagtttggccttcatcatttaaagcattagctttctaagtcaacgggtagcttcaagagtgtaagcctaactatctttgatcacacgatgtggaagactccatccttcttttatcttttcttgatgctccaacgatatcttatattagttttgacttttgtaaagaggggaatgtgtatctatgggtaaaagtaaaactgtaaaagagtcatgtaacggctagatctagcggcccatgtgttgctgatatcgctagcttttcccatggttttgcacatttgtgaatgatgatgatatagctttttctggtgtaaggaagaatcttcatcttttctttcttctcacgttaactctttgaatatgtggaaacgagatgttgatataaggtccgtttagttgtttatgcattatacctcatatccaaactttaattagatgaaagattaaaaaaaattacgatatataaacgcaaattaccaaaatttattctttactagaatttggtaagaattcactagtacaaaccgtcagaccataaattccgaacatatggtttattatattacaatacaacacttattataaatatggtttgatttttactgtaaatacaaaaaagttaaaaaggcatggaggtaaaatgtatgtgcactccttaggtgttttaaattttaacaaggataattgcagaaacaaaacaacgagtcttttttgtcgtgtggcctgtctcctggacggcaatcaccataccctttatacttccgtgcacaattagcttcacatcttaggaaagaacacgtattatttttattaaacatacgcgaaagacacggtacttttccttggactcctattcctgtaatatatcaaacataaaatatgagtttcaatattcaaattataagattgttatgataaaatatagtttatttatttgttgatccattgattattcttgagaaaatatatataggaactaaaaaataattattatatacatgtagtttgaaaactacataggatacctttgaaaaatcatggtatttgtaatattttccatttagaacaaatatatggattatattaaaacgagtttaaatgtaaaaacaaacctaacacaagaatggagaagataagtagaacggctaccgagacttgagagacatttttcatcttaaaatagataaacgaggatgatttttgaagattacaaagaaacgaaaacatgtatttatatatgtaaagttaaagttacatgtatcacacattcaaatatgtctaatttaagtaataaagtaccgatttaaaaggatcatgttttacacaattccggatatgtaatattgaaggaaaaatctaaaataggtttctaattaaagatatatatttattccaaaaatggaagtcaaaatcaaaaaataatttaacatatatcatttagctatgtaatttaatagaatttgggttgtacataactacatatgttcaagtatgaagaaatagatataaaatcaagcatgaaagacaacacaaatgttaaatgagcaaaaccaagaaggcaagaacaaatatagggccttcgtggaaaccttttgtgcgacatatggaaacccattaggctagcgatgtagttggcccaagaaaccggctttgactcagaagatatagttattgattttcggcttcgtcaatcaacaacactgtaattgtaatgacaatagttggtgccgacaaaaaataataatgacaatagttgggcttaggtttataagttcatttttctaaaagttaattggtgaaaatcaattgcaaacaatatattactctcttttcttagtagtcttctatataagattctgtttgatcatgagataaaaataaaaataaatactctttttaatctgtgggtaaaaggtaaaagagacatgttatggttggatctgacggcccacgtgtcgctcgcactccgatctcttttcacttttggtcccagtaaggctgtccgtatggagacatcttcccatgcctttggacatttgtgaaaacaagatattattattagaacaactgaacaagatattgcaagtgttacttttatttaatttcactgtggtaagataaaatttgaaaatttacttgttgctctgatcttgatgcaagtaacctcaagttttgcccattcttggagaatgtaaatataacttcgatccccaaaatgtgcctcctgtcatgttggaataactggtcagattttcaaaaggtgaccatttgtctgtccataatcatcaatcccttatattctattccacttcttaaagtttttgttctattgttaaaacgagttggtttggtttggatcatttgaaatgaatgggtgaatgcatgaattctaagagtttgtcatgatacttaggcttcacataaaattctacatatggttaagaagaaattaggtattctgaatttgacgatatttcaataattaccaatttgttaccttgtgataatttcacgaagctcgaggctagaatactttattttataggtcccacttcaatgactcatcatccttatctagatttgtgtcacattccatctagcacttttttttatttgcacaccctccccactccttttcttttgtgatcctaaaattaagttcaaaaattattttaattttggaatcttcagattataagaagaaaaaaaacattgaatcttacataaatacttaagtagatttgggattaccggattagtagtgacaaaattaactaagaaatattattcaataataaaacaaccagtaaaataaagtcaccaaactttttaaatggcgtggccggtagtgaaaaaacaagaaaaaaattaataatgtaaataaaaatcaagatattttgataaggtgtctataaaagtcatatgccaccaccaaaagtgtttcactgtctacaaaatcattgaagatctacccaaaaaaaaaaaaaaagagatg

SEQ ID NO: 16369 - DNA, 3000 bp, Unknown
  misc_feature (1)..( 3000): 2750-1469P.txt file - cDNA_ID_1398337; gDNA_ID_2936587; Annot_ID_195142
ttccttgcgtacctctggttcctcaggaacttagggtccatctgaaacatcatttcacataaacgcaataatcaaacctccaacactataacccgaatctgaaatcagttaggttagaactgtaataagagacttactcctctggttggggtgtgacggtgtctccttggcttcttgattccgttcttgtgggctttcgccgactggttatgcgccgtgtgattcttcgacttggccatctctgagacacaagaccacaatacaaactattcaattgaataacgaacgaaacaacagggggaaatgaagccagagatcggccgtagatataagaaaagctaacctgagtactgagagagagaggtagatctgctcggctaggtttactttccgcgatacaaatacggcgtctgcaacacaaaaccctaatttctgattgaatttatagtggactttaaatgaccaacgtgccctaataaatcatatatgggcctctaattaatctatctcgttgctaaatcatataagcccattgaatgaacccagagtcgtggccttttacaaattggggtataaataaagcagcaaaccatttttttcaaaatttggaatttctttgactcaaggaagtgaagaagacgagagatagagaagaaacctttctgtttcatcagaaaaatggacgatcaagctactctggtagaagacacagacaaacacgatgatgataaagaagaagaagacttgtgcaggatttgccgatcaccggaggaaccaggaaaccccttatggtatccggtgcgcgtgtcgaggctccatcaatgttcatcaagactgtcttcatatctggctcaatctccgcggatacaagcagtgcgaggttattatacaaacctctttttctctaaagaatgaggttcttgttctatagcgttatgtgacaatttcgttttcgattaaacttcaatttctgcgattttagaaagaatatcaaagttatttactagtattttgttatgagtgatgtttttggggattatatttgtgtcatggtgttgggattttcgatttcttctctgtttcttgtaatatgggtttaagaagaatctcgcacaccaaatgtttgatgaaatgctctctgttttcattgtaggacgctccagagagacttccagttcacgagtttctaatacgtgtttgtgttaatgagagcatcaccttacgtgagaatggttgttccttgggctatggcgtttatcttgaacacatactgcctttctttacatcctttgggccaagaagttgttgttgggttcaagagagattatggaatgtctaccaagtccgcatgtttcttaaatggcctgttatacaacggtcatcttgtgtttttcatgaggatacccatacacgagcccattatcgcgagacatcctgctgggtttcaggctgacatcttgattaagaatgtcttaggagatgggtttgtgcttgttttatggaaatataacaagatcgtttgtgagtggtattattctctattgcaaagcttcttcggggaacctcctaggctagttggtgttgctgttcacgaacttggagccattggacggctgcttttctttctggataacaaatcttttgatgtaagtctaatgtcccttctagttctcttccttcgtccaccctatgtaacttaattaccatatggagcatgttttgaataacaggttctgtttgttatcttatctacaggctcttaccatcagcatatgtgtgtctttcttctttattcttctgccgttttcttttcgctggattgcaatagcaattgtaggaggtggcggtttattcgaaaactcacctgtcattcttggatacatgatgacgctgtcaattccctttgcctacttaggaattttcctcactctgcgtcaaatctcgtttccagccatagtcaggtggttttccttgggatatcacttcataacaaagaaactgtcctgcctcctgagcaaaaatctcgtttcctgtcaactgtttcgcgactaaggcatggcggggaaagttcaagagaatcagaaacgtgggaatcaataagcttccttcaatgtggctgcttcaagatgtgattggttcgatcataaccacacttctagccacactctgcatcccttacttgctcttgaagtctttgttacctctgcttggattttcccgtagcgccaacccagctattgagccgtttatctggccggcgttgttagccttgattgcggtctggttcatggccaagcaaacttatgatctcgtcagttactttcataggttggtcttcgatgatcggtatgtagtcggttaaagagtggacaatctgactgaggatatctcgctagagagaaataactaatccatatatgacaaacaacgacttttcattggaaaggaaaaaatgtataaacacaaacgtagattcaaaactcaaaaagttatatagtaaccaaggtctatatacgttaatattaagataatcgcagtccacttgtaagtcatgaaaacaaaaggatcttcaaattgttgagatataaagaagaatacattagcttgcctcaaagaacacaatagtaaggggctaattatgtaaataacctaattgtggacacctgtttgcataaataaatagtggcaaaactgtaaataagtgaatattttagcaattacagtataaattaagaacaaagattaaaaataaataaaaaagtgctttcattctttggatgcgctgttgtcaacttgtccctcgctgcctctgcttcttaactctttctttatcacttttccactcccaaatcaatttttaggttttttttataattataatttatttgctctcggcaggatctatataatacacagaccagtctttgcgtgtgcttgtgtgcattcattgatcgggtttatatcttttcatcggattttctttgtcgagcaagagccatg

SEQ ID NO: 16370 - DNA, 3000 bp, Unknown; identical to SEQ ID NO: 16369
  misc_feature (1)..( 3000): 2750-1469P.txt file - cDNA_ID_1398337; gDNA_ID_2936587; Annot_ID_143887

SEQ ID NO: 16371 - DNA, 3003 bp, Unknown
  misc_feature (1)..( 3003): 2750-1469P.txt file - cDNA_ID_1398444; gDNA_ID_1620487; Annot_ID_158494
actctttgtccctctctctttctctattactctgtctcctctgttccggcgatgttccaacacgcgccttcttccatttccctcatcatcatcttcctcttcaccattctatcacccgtttcacctgaaccggtcacagtccagccattccgggtcaaatcatccccacccgcaaccatacccgctttcccggagcaatccgatttctccggctgcccactcgatttaccagaagacctcttccacggcatcaagtcagcttgcagcggcaaaaagctccacaaaggaaaatgttgccccgtactaggcgcgtggctctactctgcttactcaaccactgctctaagccgttcgatttccgccgccgcaagaaactcatcctcctcctccgccgcggtaacgactcctgaagaagatatgcctttgcttcccgatgactcggagacttgcgttgacggattagggaaatctctgaggcagagagggattgagctcactagaccgaacgagacttgcgacgtcgtttactgctactgtggaatcagattgcatccgttgagctgttccgaggcttttagagtgaatgatgaagggagactcgttggagacgagagagttgatagattagagactgattgtttgagtggaagccacaacaatgctgatggattctcacctcttcttggttgcaacaagtgcttgaacagtctctataaggtaaagtcactaactttgctgctatatttagaagctgccactgtgaagttcaaatggaattaggttggctaaattggtaaaatgtgtgtgcaaatctagtaacttttagataatctatagataccctgaagcgttgttggtgtttagcttctggattttgtttgattgactgattaagacaattttttggatgagtaatgaggaattgatggactagttatagtagttaactatgtaaggtttagtccaaagtttagaagcccttttttaatgatatttatttggtgtttaaggattagggttttactatatgagtgagtgaagatttggaattatgtagtttaggattctttctgatctatccatcatatggcgaatggtagtaatttgggaaaagttttgttctttagctttttgttctctttctatctgacagtctgacacacatatacgcgctaacagaatccgtgatctccacgcgacgttttgtcttccatcatatgatttcattcttctgcatcttaatcaccaacccaccatagccaaaagcttagcaactagttgccacctttctactttctacaatcctcaatcattactttagtcagcagcaacaaaccctaatcaaaacaaacacttctgcttcattttgcagctaaatccgaagaaaacttcagggacaagaaacccatcaaaggaagaccgaaacagaacagcaaagatgcacaacaaagactgtgtcctcatgggtctcacttggcttctcgctaagaaccgtactgcttatttccccactgtcacttctgtcctccgagccgtcatgctgaaccacgatggcgtgccacgttcatgtgctctcggcagcgacggcatgcctttagccgtcgattcttccgaattctccaacggctcgccaacttcacttcagtatccgcaccacttggtccacttcttactttacagcgttatcacattagtcctaataaggtcgtggtgacgtggcacaccatggttggatttgattgtgacgtggagcacgtggcattacgtggttggttgagagaagtgaaattcagatagagagaaagagagagggctttggttctgtctttgtaaattagttttttggtgtcgttgttgttttagtagccatgttctttaacattttattacatcaaaaaaatcttgttgtattttgtcaattaaatattgaaaaatcacaatttgaaaatatttcaacaatattttcggtcatatcaaattatatgagcgcaatcaatataaatatatcagtttttgggaggagaagaataatagtcagagaaaggcatgtgagtaatggggacgaggtggtgtggctggtttgagagagacagagagacttgtgacagctttgttcttatgtttccttatcttctctctaaccacggatgctcctataacaataatacattcatgattcatccctatcatattctatattttatatgaattatcaatgcgaccaagagatgtaaaaagccccacgactgacactttattttctcatatagttcaaataatatttcattcaataatcgaatgcttccattcgttagatttttcctttgagaaatattatgaaaaagatatttcataacattttttttgtggtagtgattagatagaggttcactaatgcgccaatcaactgctagcgattcattgactttggcattattgcgtatataactgggctgggctaaactaacttgcccatgggccgcacatttacctttttggccaaataacacacccattagtctaatctaaaattacaatggtaaaaacatgagagattgaggaattgattaaaatggaatgaagataatagagaaataatttggttccactcatttctaatttagtagaaaatatataatttttcaaaattgttcataattcaaggtatttccaacaaaaatcaatggaagtttattattcttaatgttatatactactctgcattatgatatgtaagtcttaagaaacaaagtgattagcacaaaactattatacaactacactttacattatttttgggttatctaatgagtttgtgccagagaagtgaatgttgcaacaatgattatcattacattatctttctaattacaacaactaaatattaacaaatgtaatgtcaaacaaaactcaaaaagactcaaatccgtccttccattttcctcgtctctcttcttccccgtaaacccaaaaacaatctctgcaaagtcctcggttctgatg

SEQ ID NO: 16372 - DNA, 2997 bp, Unknown; identical to SEQ ID NO: 14782
  misc_feature (1)..( 2997): 2750-1469P.txt file - cDNA_ID_1398573; gDNA_ID_2684224; Annot_ID_191873

SEQ ID NO: 16373 - DNA, 3003 bp, Unknown
  misc_feature (1)..( 3003): 2750-1469P.txt file - cDNA_ID_1398573; gDNA_ID_1972003; Annot_ID_177779
ttaatattagatggttaactagatccccttgaaaatggctaccacttctttgttctctatctccatgttgggaagtaaaagatattcagtataaacttttgaaatagtgtgtagcatcaagttaagaaacattactagcaaaaaataatgtataggaaaagtctccgcatatgtttcagggacaaaaaaaagattcaaagatcaaaaaaaccctgcagccaaatacacagagaaaaagctttaaggaagacaaaagattcgttatagaattgagcttctctggggatgaaacggtttttcttgatagctttttcaacgaacactcaagccttgaatagctgcagcagatgatgatgatgcctgagaaccttcctccgttaccttattcgattcgatggtagttatgatacttgaaatgttgtcctacacaaccacacataagaatcagattcaggagatgttttgtaataaaattctgtaataagtgaaagcttttgtagttaccttccaagtcgcaagctttgttcggagagattgccattgctttgtcccaaattcacgttcggaagagcggctgtaagatatgaatcaaaccatcaaataatgaatgttgcgtttagataagtgcagagtttcaatagatgtgtgacttgcctgacaattaaaacttggttcatctgatccatcttacactcaatcagttttgcagttattgccttcacgatccataactcgacatcctgttcatttacctgaaaacgaaaagaaaaatgagaaactaaaagggtctcaatatttcatgttaagtgcaagcagaggagagtttttacctgaagagtgtctttaatcgaggtgtaaggtattttgccagattcatctgaggccaaatccactagtgacaacaacctcatcttcgtaacacaatcttcattggaaagtcctagaaacaccacaggattcatcaggagatcatatttcagcaaaaacagttagtgagttaacaatgtagtaccatagctttgcagaaatcccgaatttgcattttggaattccgtgtaggcatttaacctctgagtaagaaaaatcttcagaagttggtaaacaggtgcatatttagcatccttttccaattgtgctacggctggcaagtccaataaatcacactgcaagatttaagattgccatcgttgaaattccaatcaaatataaaagagcagtgtcaggacaagaaagacaaatccaattcacattatgatacctggaaaatactggaagctttgacaaattcgataactgcacgcacagcctcctccttggcttcatccaggacctgagcatcctcattggagaaagttgctaggtacttcgtcaagaacttaagggattcattcaccaagctggagtattaatagaaaaaaccatgaggctattgttatacccaaacggaaacaaaaaaagaaagagacagagaatgactgatgagcatagttataaagtataaattatgtttcaataccttttgttttctttcagcacattagcaatggcaagaaagagttccctctgatctttaatgtcaatattccactctttcagaaagttatcgatcttcttaaaagaagaaactatgtactcagtaaccttcccatcaacagctagtgtaagagctttcatgtatacttgaaatcgagcatacgggtggtcaaccaggttatagagattgaagaggctacacaaagattaagacaaaaaaaaaatgagaagtgtgataaatgagcaaagcattcagaaataagcagaaacgattcatacatcttcaaacgaagtgaagctttgtcactgggttgttgagcaaccttggaagctatagctttcaccatttcaaggacttgctcagggcttttcgcattcttgacaatgctgcaaatgatggtgtaggtacactcaagatctgaattaaaaaaagatgcaaatcactgagaattgaatactcgaaagacatacaaaataaacaggtataagtaagaataggaacacaaacctttctcagatatcttagaagataccaattcagctgaagtgaccattaacgaagacaattcaagccacttctctgctaccattgactcctcagcctccctacagagcctggtaatttctggctctgctgcctaaaatttgaaacgataactagttaagtacaggcaagccttgaaaacttaagaagtcgcttaatgaaactaatcttagatggttgaactaatcggatgcatcagaatcctcaaagattacaaactattctagtccagaaactatcaacaaacccttccataaccaatcagattcttcgaacgaaacaacatataccagatcaaatttcccatctcacttaagatagacattcttaaattcccactataaattcacaaccaaggtgtggaggttacctcgggaccagcatcggcccaggcgagctgggaagtgaatcggacaacagcgagaaagggattttcttcggaggtgggaacaatcgtcgtcatagcttagctccggtttcgaatcttctcggctgcgctgaagaacaaatgcaccacaattacaacttgtttcagcagccgaccagcagagacaagagagagagaagaaaatgaaaccctaaatctctatatttttttcttttccggttaaaggtaaccggaaccgaatacgattcctaaattaacggtttacctatctgacggctaataaattatgagaaaactccaacggtcaggattgagctctagtccacaacccttataaaaatcgatttcttcctcagttaacatttgagaagattagggtttaaacgctgccgtgttccgccggatcgccaccgttgaagtcaagatggtacttttactctctccctctctgtatcctttgttctatctctcttaaatatttccttcgcctgatcgatttcatggtctctgatattagccgtcgcacaagtcgttcatg

SEQ ID NO: 16374 - DNA, 3000 bp, Unknown; identical to SEQ ID NO: 8119
  misc_feature (1)..( 3000): 2750-1469P.txt file - cDNA_ID_1398634; gDNA_ID_1621194; Annot_ID_174673

SEQ ID NO: 16375 - DNA, 3003 bp, Unknown
  misc_feature (1)..( 3003): 2750-1469P.txt file - cDNA_ID_1398698; gDNA_ID_2096294; Annot_ID_195483
aaactagactcctggttttatggtctgccatagaatctcttcacacaacacaaccttttttgtattttcttcttatcgttgataatgttctagaattagggcttttattgggcccagtgcaaataaagtggataatgcataaataatactttttaaacacaaattatgggccttaggattggtccattagaaaaaccttatgatagataaataatgtggcccatcaatgtcacctccatctccatatacatatctctcatcataaacagccgtcaaaacaacatcaatggcaatgcacactgttcgattgtcgccggcgactcaacttcacggcggtatctctagcaatctgtcaccacccaatcgaaaacctaataattccatcgtccgatacggatgcggatcttcgaagcgtttccgtatcgtaacggtcttggcgtcactccgggaaaacgatgcaaacggaagggataactccgtgagagctatggaagtgaagaagatctttgaagactcgcctctgcttcctagtacgaatccccactttcgattcctttgagctgtgtgacagatatcttcttcatttgcagtagacataacgtatatatgtaaatagtagcagctagaatttggatttagtgatgattagttcgtttttgtttgaataatagagccgttatcatcgaaccagctcacggaatctgtctctaatggctcccgcgttcgtgttgcgtatcaggtaactaattcaaaggaactgaattgtttctgagagtcataatgttttgggactttattggctaatgaatgattctccaattagggagtacgaggtgcatacagcgaatcagctgctgagaaggcttatccaaactgtgaagctgttccatgcgaagagtttgacactgcttttgaggtcagaatctcgttcctttactgatcaagactgaaatgatcagtatttcattttcttaagttttggttgccattagtcttgctttgttcttgtttaggcggttgagcggtggcttgttgacagagctgttttaccgattgagaactctttaggtggaagcatccatagaaattatgatcttctgctgcgacacaatttgcatattgtaggcgaagtcaagctagctgttcggcactgtttgttggctaaccacggtgtaaatattgaagatttgagaagggtgcttagccatccacaggtatgccacatacctttgtgcataatcgagttctttttctcttggcactatttaaacccttcttcgttgctttggatcaggctcttgcccaatgtgaaaacacgttaaccaaattggggttggtcagagaagcagtagatgatactgctggcgctgcgaaggtatgttttatgttcctagtatgtttatatattcacactcacaacttacagtggcagctaaataagtttgtgaatttgattcgcagcaaattgcattcgaaaatttaaatgatgcagctgcagttgccagtgaaaaagctgcaaagatatatggtttgaacatagtcgctaaagatatccaggttttaaagactttccgaatgccttttccaatttttcatccatatttttacacttctgctggattatttgattgtgaagttcaatcaatttaggatgactgtgataatgttacaaggtttctaatgctcgcaagagaacccattatccctggaactaacagactctttaaggtgagaaatccagtataacttccatctgcaaaggcaactctaatttctggcaatgtttttttttctctgatggaatgagttactttgattcttgtagacaagtatagttttctcgttagaggaagggcctggagtacttttcaaagcgcttgctgtgtttgcccttcggcaaatcaacctcacaaaggttttgattaacacactcaaaatcttccttcattatgtgcagccttgtttccagtcccttacaatcaattttattgtggtttcgatcagattgaaagccgccctttaaggaaacatcctctccgagcatctggaggactaaagtaatttctctcacaaaaccactgttaagtctataccgtacccagagtgtctgagcagtgatgaaagtgtctctctttctgtgcttgacagatactttgactatcttttctatgtggactttgaagcatctatggctgatgaagttgctcaaaacgcacttaggcatctcgaggtaaagcctttggtcacttgatctgaaaacatgtacatgtgactaagactctggattttgttattggcaggagtttgctacctttttgcgggtactgggaagctacccagtggacactacaatgctctaaacatttcaaacatcttcttggtaaatagttcattggtttgcatttcggatctgagttagtaaaattatatcaagtgaggtgaaatatttgaatagtttgtgacagagatccgcttgatgatatcataatcctggtataaggagctatatccctgaggtgaggtctgagaggagtcaccaccttacaagacattccgctcttgttacaaattctgtttagttttccaaaaaagatcatctttgtttttagtaagaatgtagtcactaagtcagatatcaatgacaaataccaaagaactagtgttttttcgtgtttcatccatacatagatacttatcctgtgtcttttttagaaatttctttttgtatgacgtttcaaaattttgattgactattgttagtggtatatctttgagttaataaacgagatataatctgttttcctgttcacaaaaaaaaaaaaaataaaaaaatcatatatcatccaattttcttttggttcagattttaaaacattgggaaaaatagggactagatgacaaataacaagaaatcagaattttggaaggattaaacaataatcgcttcttgtgcaataagccaaaaacaggattaaacagattcgctcagttctcaaaacgatg

SEQ ID NO: 16376 - DNA, 3003 bp, Unknown
  misc_feature (1)..( 3003): 2750-1469P.txt file - cDNA_ID_1399019; gDNA_ID_2926278; Annot_ID_143590
tattaaaaatcatccacattctccgtgccaatacatgatcggatcaaacaagccgaagcagtgaccataaccgccgcgaaaatcgaaggcacaaacaaatcaaaacgcgatctcttcaccatattagacggcacgcatatactctcccctgcaaaatccatcggaatcttcacgaaaccatctcctcctccgcacgaagacgacaccgtagacacaaaagccatctccggagcaaacgaagcgacggccaccgtgaacattagaagcaccgtccacgtggcagcctgagcgatgaccggccaacggtcagagacactccgtagaaacggctccattagcgatggaagacggtgatacatcttgatcagaagaaatggggattgttttagcgtggatcaaaagaaattaggtgttggtttgcgaggaaacgaaaagattgtgagatcgatgagcaaaaaccagagcttgtttgattggtgcggtttatgtgtttggaaacggaaatgaaaatggaaaggctgcttctttgcacgtttaactaactactcttctttcccatacacacacacagagagttgttaattacgaatttacccttccctttgaactcttctcttcttcttttgcccttccgggtcgtctccttcccctttgacactcccacgttttcagcaatatcaatttttgtttaatcgacggctgtattagttggttgttaagaaatttcagactcgttcctccataattcagatataggaggagaacataaactatattatatgattatggagtgatttatgctttatgttgttcaccaaaaactattcattaaaattaagcgggttcacctaaatctgatgcttatagcctgcttgtggcacaacgataacgataggtaattcaactactaatcttcaattttatctatttcaatgactccaatcatatcataattagactctgttcgttataagaaggtaagaaagcaacatcattgaaggaaaagtaggccaatttcgcgtatcaaataatataaacacacacatataacatatacttcaatagagacacatttcaatatagtgattaggtaaatgaaattgaaatggaaaaaaaaatcgttaaaaatatataatccaacattgaaattcataaaaggaaggaacaatcttctctacttcctagagttacaaagccacaaaatacgaagttaagcgaataatgcatctaatttcctacaagtactaaaaaccaaaccgaaattgaaatccctaaaaaccctaaccgggtctcttcaagagctagtaaacttggtaaccgccttggtaccttcagagacggcgtgtttagcgagttcaccggggaggacgagtctcacagccgtctggatctcgcgagatgtaatggtcggcttcttgttgtacctagcgagtttcgaagattcctgagctagcttctcgaatatgtcgttgatgaaactgttcataatccccatggctttgcttgaaattccgatatctggatgaacctgcttcagaaccttgaagatgtagatcttgtaggtttcgacgtttttcttagatcgcttcttcttcttgtcaccggcttcctttggtggcaatttcttccccgccttgggtttcttctccgccggagccttttcagcagccttgttctcttccaccggtttctcagcggcggtttttttctcggcgggcttcttctcggctcttggtgccatcgtgaattttctttctgattttctcgggaaaaggaagttgattgaagtagtttagtggtgaatggtgataataggtttactcgacgcttttagattttatagagaaggaacaaacgtattctattggatagaaatcttcacgaggatcattgacgtgtatatttctcattcgttaaatttatcaatgctcaaattagatctgacggctgagagaaacatcattcattcatttttacaggttcaagttatagctttgataggcttcaatggtcgtgacaaagaacgccattgggcctgaaatgaagcttgagacgcagcgcataacacatgtcaattggtttctttgattttccctagtataaaaagcgataagaaaaccctagctcaccttctcttcttcctctaattgcttttctccgtcactgagtaccttgcctctcgagctcccaatcttaaggtacaattgatcttcactatagtcgttcagaatctgatctgcttatcgaaatattcagaagtgtgagatagctgctaattggtctttaatttgtcttcttctcttgcttcacatcagaaaatttaggatcttagagcttttttgttgatgtaaacatttcatagtgaacttaagaacgcttttcgaattagttagtcttagctctattttgtctgtgtgtgtattttctgacgtattaaccacgagacctatgtttcaatttctataagtgatttcgttttacattttaaaagcttgatttattcccattgaaatcaatattcatgatgcagaattctgtgcatttgtatcaaattctaagtgctttgcagattttattttaacgcaagctcttgtttgttgtttgacttgtttagtagaggattgagcttaaggcaagatggtaagaaacttaaatatttattttgaatatttgatcaattatctatctttatgaattattgatcaagaaacaaaatttaaagaacatcggggacttgaaaaagtaatggaaatttcacaaaaccgaaaagcaaacggttaattcggttttacaaagaccaaacagaaaattcaataattcggtttggttcggtttaattacacctaacaaaaaagttggtatattcgtttttatttttccgccattcttgtcgatcttcttcagtcgtaaaaccgccgcgtctctgctgaccctcctcttctcatttcatcgacgggagaaaatctcataccatctgagatttccaacagtgaaattaagatg

SEQ ID NO: 16377 - DNA, 3003 bp, Unknown; identical to SEQ ID NO: 16376
  misc_feature (1)..( 3003): 2750-1469P.txt file - cDNA_ID_1399019; gDNA_ID_2926278; Annot_ID_205401

SEQ ID NO: 16378 - DNA, 3003 bp, Unknown
  misc_feature (1)..( 3003): 2750-1469P.txt file - cDNA_ID_1399068; gDNA_ID_2214506; Annot_ID_133757
atttaagtgatctgaactaacgacatgtgtacgaaattaattatctgtttctttatgggtcaaagattaaaaatgctgtgcttctttctctatcagactatcacatggaaagacgaaacgaaatgagagtttttattacctagcagctcacagttatacataattaaattcatagaccgacaaatcacagttttgagaaataagtaaacaaaagtactgaagcagcgagcatttgaaactccaaagaccacaaaagatcacagttagggacaaaccatagctaaaacagagtcttctttaaaaacaatccgatgaagaaaaaaagttgaaaaacaggcaaaaattttacagatggaagacgataactgatcgaatcatgcaaaggggcttgaggacattttttagtagtgtgttttgttgttctctatcgatttgttgttgtgttgttgttgccaaatctaacaagagcatcctcctgattgctgctgagcgagagatgcatttgcattggaagacttgagattgacatcaaccatatcctcttgctttgttgaagacaatgtctccattcccggcaaagctgctgctatcttgcggaagagcgcctagcaatacaaaaaggtttgaaatcataagaaaacaagatttgcacggagtgatagcgttatggatttgcggtaattgtttagagagtatcagtgaaagatccatacaaatgaggaggatgtaataatcagcaggttgggttaaaaatttataagtctaggttaattaactattgaatattgatggaactaaacaaagttagggcttagttgaactaagcagcaagtttttgttgtgcaagaaaccctcagaaatgtgtcaagccaagatctttgttaccttaatgttgaagcccgctttggcactggtttcgatgaacattacattaagttcgcgtgccttagcttctgcttcctctattgacacttgcctgagaaacaaaatatttaatacaaaggcccaattggcagtaacaaatgtagtaggcaccatcaagtgtcaaagcgtgttgactataaagaaaccctgtaaagatatgcagttgagcagcaaatgattttccatttattatcttgtagggtcgtttggcaacatactcaataccaccagaaaagtaagacgtggtttaacaacagtttgtacttgagtaaaacaaaaaagacacccattcgtcttgtcaacatacttacgaaatcagagcgtgtttaaacaaggaggactaccaaatttcagtctcaattgctattgaacagtaatttgcacatcatggtttaacaagaaacaagtagaggaagagatggtagatcattattaccttttgtccactagatcagttttgtttcccacaagcacgactatgacatcactaccacgttctgtcctaacctcatcgatccacttagtagtgtttaggaaggactgcctgcctatatgtcagtggaaaacaaaataaatctcgagtttcacaacgcacaatggatcaacataaagaagaaatcgaaacgcataaattcataagattactgaaaaccacatccccaagatctcagatatgggaaaatattcatgtgtttgagagaacgagtgaaggtacacatacttgcaacatcatacacaataacagcaacggaggaatccctgatatagctcggaattagactcctgaatcgctcttgcccagctgtatccctgtcatatgatttcggctctcgatgttaatcatcaaaaaatgatctgcaatgttattcttcagtattcgaaaattgaaagaggctcaagatcttaccacaactgaagtctgaccgttcgatcttcaaggtacattgtctttgatagaaaatcaataccaattgtggcctgatgattatgaaacaacataaaaactacttagaaaaggaagaacattctgtaaaatgacgataagcaagcatggttcacatattattaggagcttaaacgtaattctcataatcacagaacaagatcagatgctttcattcatcaattgagaactaattcgattagataaacaatgataacatgatcaaagaaacatcctcatattagtgttactgcgatcttctattggactgaattctcgactttgtacaataaacgagagtgagcgattacgatgccaaaatctcattcagctgattgttacgtcctatacattgactaaaacacgatctacaaatcagatcacacataattacgcaaaaccaaacgcccgatcacgtaaacgagtaagaacttcgaactgaaaaacacgattcccgtccatgaaaacggatctcaaaatcaatcaaaccctgggattttcccgactataatccctcaaaatagaagcaaacgtcgtgcatcgtcgagataatacctagatttgaacaatggaaatttacctggtaagtgttgtcgaatttgtcgtacatgaatcgagtaatgatactggttttgccgacggattgatctcccagaaacaccagcttatacttagcgagtgccgagaccggagccatgatttctcaaggatctaactcgccggacggatctgagaaacgtcgagatctcgctttgctgagaataaaagtttccgatatttaccggagagagatcccgtcgctctggaattgcaaatactgtattagtgagagtttgttattcgtaaattgcagtttattcctcgagtgacccaattgggtcatttatgttaaattagaaactatttgagataagttacaaaatatataaaaacttagaagctgattaaggaatttactacattatgggcagcatttataagcccacgtaaggatttgggctagccttatagtagggggcacgtgtcatctcgtatgacctgaactatttttgccccttttggctacttgactcttctgtgtctctctcatcaaatcaaatccctaattctcgagctcgaagaaagagacgaaaatg

SEQ ID NO: 16379 - DNA, 3003 bp, Unknown; identical to SEQ ID NO: 16378
  misc_feature (1)..( 3003): 2750-1469P.txt file - cDNA_ID_1399068; gDNA_ID_2214506; Annot_ID_184121

SEQ ID NO: 16380 - DNA, 3000 bp, Unknown; identical to SEQ ID NO: 11121
  misc_feature (1)..( 3000): 2750-1469P.txt file - cDNA_ID_1399134; gDNA_ID_2214479; Annot_ID_133202

SEQ ID NO: 16381 - DNA, 3000 bp, Unknown; identical to SEQ ID NO: 11121
  misc_feature (1)..( 3000): 2750-1469P.txt file - cDNA_ID_1399134; gDNA_ID_2214479; Annot_ID_183257

SEQ ID NO: 16382 - DNA, 3000 bp, Unknown; identical to SEQ ID NO: 861
  misc_feature (1)..( 3000): 2750-1469P.txt file - cDNA_ID_1399202; gDNA_ID_1620330; Annot_ID_153608

SEQ ID NO: 16383 - DNA, 3003 bp, Unknown
  misc_feature (1)..( 3003): 2750-1469P.txt file - cDNA_ID_1399210; gDNA_ID_1621088; Annot_ID_170569
aatcttttcgacgtgaaaaatattattctaaattatttatcgcaaatatgtttccttttactcttatatataaaccatgagctttttaaacccaaaatatgttagatatccatctctatttccaacgtcggattataagtccatgttttcatattttacatgataattcgactctagacaagttaggctggtgacattggactacttcactaccatgacaaagaaatatatcccataattttgaacaccactaagaagataatgtcatcaatatcttctgttgtcatttaattttccactcttaatgaaaatatattcaaaatacacaattacaaacaactttacaaactaatgttgaaaggttttaactcattaataactacccaaaccaaaaagggtactataaatatagttaatcatctaatagtttctccaaaattcttatacgatcatatatgatatctatagatagatgtaataaatatattagatgacacataattgtcacctctgatcatctagcctcttcccatcacatgccattaatggacctatgcggtgctgatagtaacgtataaccatgacgacgtctgagactcagaggatcttactctaacataattaaaaacataaacttgcactagtgaatttgtaatttcatataaggaaacattttggagcaataaacattatatccttttttcctttccctgtatattgccacatttatgcacataaaatcagctcatatccatcgatcggtccccaatttttcaatgattagtcaattttttcttccttttgataaccgctgtggtccaataagacaagtgaatagggtccatttagggctagcgtacgtggtacatcgcatgttcactatcacttatgagcgcatgcaagtgaaattacatgtcaaaaaaccttacgctatatataagtgtatatggtatctgtcaacattactatacaaaacaaatcttttatttttattgatcacatattttgtcaaaaagtatttgttttgtatcattaggcccaaagaatgtttttgtgtcagttttcttttcctaataaaacagaagaaataaacaataagattcaacttttcacagttaatacagtatttgtaaaaattctgaacaacagattttcaaaactacgacatttaaaattagaacgaagattaacacgcattagtgagtatcaaacgaattcaaaaacttatgtaaatataccaagaatatgtaattataattaactaaacatttttaatttttaaattaaaatgttaaatttcaatgctatttagaacattttggttatgattattaaaatcgtgacacgatggatagtaactaaatgaaagaacaaataggttgaaagctatagggaaataaataaatgaacggtttatagtaacatctttatcataaagctggactgtctcgttgtgatataaaacaacgaagataagtaaggagatttagtactgttgtcattcgccaacgtcaacttcactaatgatcactagtccttttagtttttagagagtttccatcagaatttgcaaacgtaattacaaatattgggccttaatttgaaacctacatagagggccgagtatttgatgaagcccaatcgtctaaagtcgaaaaacatgtaaatagtcaacacacagtgaaaatataaacatatgtaaatacgtttgtgatccaaattaaattacgatgataagatggaacaacagaagctaaccctgagatcatcttctatgacaggtgttacttagaactagtctggatagggagggagatatgtgtcctagaaacttcaaataattcaaactctattatcaaaaaaagtcagaaataaatatagtcttgaatcagttatgcagatctcgtttgttatgtttttggacagtcgacgaaagaactcctagttaattaatattatctattacaatatattctcgcaaaattaagcttatatgtgacagctagagctcagcgttgatattgcctccacacttacattatataattctaacgggaattatatacataaactataatcatgattagcacgaaatgtacgaagaaaagtctgaccaattagttttatcctacacgtgaagacttgaagttgatatgtattaccaatatatcatcaaattattgatataataataagttgttgtttggtcgagaaagcgtgcttgcatgctataatgctaattcatatttaaatgctttgttgctttgattcgctaattaacccaaaattttgaaaatgactcaaaacaaacatacagtttttacatatactattctgttgatcgtgcatgcagagataccacagtttttctgaaaacttcaatattccgctgacaaaactaatatttcacgtgttagtttttagttttttactaattaagacactagactaactgattcctactaataggttttctaatgtaaacaacataagagactctagctagaaaagagaggaaaaacaataaaagcaaatcttgagatcttctcagtcaattgacagatgtctttagaacaagtctaaatagtggattgagaagggaaatgtgtcacagcaaatccaaaaaatccaaactcatcagtttttgaaacttttggacgcaaaactcgcttggctgtgttattcattatttcaaagtccacgaaagaaaataattgtctcgtaaattaattaattaagcttatgacagctcaaggtcgacgacataattgattttgttccttactataaattatctattcaaaggaaaatatatactagctatatatataatccttattcgtacgaaatgtatgaagaaaagtctaaccaaatatttttttcgtttttttaattaaatctatacgaaattgtgcatttatatatcttgacctctatatccaaaactttaccaaaatctcgatttataatcttaactcaaaagaagatcgatcaactattatg

SEQ ID NO: 16384 - DNA, 767 bp, Unknown; identical to SEQ ID NO: 505
  misc_feature (1)..( 767): 2750-1469P.txt file - cDNA_ID_1399782; gDNA_ID_1591502; Annot_ID_151078

SEQ ID NO: 16385 - DNA, 3003 bp, Unknown
  misc_feature (1)..( 3003): 2750-1469P.txt file - cDNA_ID_1408073; gDNA_ID_2214481; Annot_ID_133272
agtatagggtctgagagattcatgttttcctcttctttttcaggctgtaaacttacggacagcagccattcctcgtcctcaggtaccatctgaattagaaaaaaactatctacaaaccattgtttctcgttacgttttatacctcaataattttgtattcgtgttttctagtatctttcaagtagtcaaagagatgccttagctgaaatacaagatgttcttcgaacagtatgtcatgcacacaagttgcccttagctcttgcctggattccttgtagaaaggatcaatctataagggtttctggacaaaaatctggtgaaaattgtatactttgcatagaggagacagcttgttatgtgaacgatatggagatggaaggctttgtgcacgcatgtttggagcattgtctaagagaaaaagaaggaattgttggtaaagctttcatatccaaccagccgttcttttcttctgatgtgaaggcatatgacatcagtgaataccctattgttcagcatgctcgaaagtacggtctgaatgctgctgtcgctataaaactgaggagcacttacactggtgaagatgattacatacttgaactgttcttgcctgtaagtatgaaaggaagcttggaacaacaacttctattagacagcctttcgggtacaatgcagagaatttgtcgaactttgagaactgtttcagaagtggggtcaactaaaaaagaagggactaaacctggatttcggagtagtgatatgtctaatttcccgcagacaacgtcttcagaaaattttcagacaatatcattggattccgagtttaactctactagaagcatgttttcgggtatgtcctctgataaagaaaacagtatcacagtatctcaaggcactttggagcaggtatgtgatttatgcaatttggttattctgtaaattttgtgaaacagttcgttaaactgaacactgatatttttccttacaacttttcataggatgtgagcaaagcaagaacaccagagaagaagaaaagcactacagagaaaaatgtgagcttaagcgctctccaacaacacttctctgggagtctaaaggatgctgcaaaaagccttggtggtgagacttccgcatatttccaagcatgggtttatttttgttagcacacaaactatctgaccctcgacttggattttcttctgcagtttgtccaactacattgaaacggatatgcaggcaacatgggatcatgaggtggccatctcgtaagattaacaaagtgaacaggtcactaaggaaaatacagacggtactggactcggtccaaggtgtagaaggaggactaaagttcgactcagcaactggcgaattcattgcagttagaccttttattcaagaaattgatacccaaaagggtctgtcgtctcttgataatgatgcacatgcaagaagaagtcaggaggatatgcctgacgatacttcattcaagctccaggaagctaaatctgtcgacaatgccattaagttagaggaggatacaaccatgaatcaagcaagaccaggtaagaacttctctatccataaaccatagatggagcgattagaatcttaatccattttcagtttttgcaggatcattcatggaggttaatgctagtggtcagccatgggcttggatggccaaagagtctggcttgaatggcagtgaaggaataaagagcgtttgcaacttaagctctgtggaaatttcagatggaatggatccaacaatccgatgcagtggcagtattgttgaacctaaccaatccatgtcatgcagcatatcagattcatcaaatggctcaggcgcagttctgcgtggaagctcatctacttccatggaagattggaaccaaatgagaacccacaacagtaatagcagcgagagtggatcaacaacgctgatcgtaaaggccagttatagagaagacactgtacgtttcaagttcgagccatcagttgggtgtcctcagctctacaaagaagttggaaaacgttttaaactgcaggacgggtcgtttcagctgaagtacttggatgatgaagaagaatgggtgatgctggttacagattctgatctccaagaatgtttggagatattacatggtatgggaaaacactcggtgaagtttctcgttcgtgatttgtctgcccctctaggtagttctggtggcagtaatggttatcttggaacaggcttatgacgtcgtaagacatagacacacacagttatgtattcccagtgaaagaatgttgtttatttctctagatattagtatgcttataaataggcatgaaggagaaagacaattttggtatagtggagttcagcagaaaatgtatatgttttttcgttttatatgaatcagagaataaaagttggatgttatatctacgttgctaatgttgtacctgctcacccatctttcatataagaaaagagaacacttttagttatccctgtgatgcagaatcgtattctttgttatctctccattcctgtggaaaccaacaaagtcaactaaatttcggtttaattggttggtttttaagtcaacgaggacttgattttagttgggcttgggcctataattgtgttcatcattgggttttttcccccttatcagtttaacgtccatatccatatctttttctttttttaacggcaaagttcatatccatatcttatgatgtgcctaaaagagggagaagatgcgaagacagaattttcatatttgaaagggttcgatatcgatattgggaaacgaatcaaggtcaaaaaactcagtctaatagttgaaatttaaaaattttattaattcaatccgattggtttcgttttgttatggttcggttctatatcatcaaaccaatcggtttggtcctaaagataattataaatattcaccaacaccagtgttaaacacatatcaacaaacctaaagttagataaacaaagagaaaatg

SEQ ID NO: 16386 - DNA, 3003 bp, Unknown; identical to SEQ ID NO: 16385
  misc_feature (1)..( 3003): 2750-1469P.txt file - cDNA_ID_1408073; gDNA_ID_2214481; Annot_ID_183359

SEQ ID NO: 16387 - DNA, 3003 bp, Unknown
  misc_feature (1)..( 3003): 2750-1469P.txt file - cDNA_ID_1411691; gDNA_ID_1620775; Annot_ID_167663
ttggtgaattttctcttcttcttagagtttctttccctgtgtggagcagcactaaacagaccattcaatttgtctctttcaggttcaccctcaatggtatcattgttccttctagaaagattactaacttgatccctcatttctgatacactcccaggaattgggtctgattcacaagcttcttctgtagtacagggagcatacactaaagcactcattgcttcagcagcaatttgagtgttaataccaatgtcaataaagtcttcctcgggttccaagggctcctttggcgccttatcctccaactgagcatccttctgtgagataaacataatgccctcactcaaacccgatgcttgttccatcttgagatgctttgcagaactgttcttcataactctttgtgtgggatgacttgagacttttctaatatcacacggatccctagatcgtttcttcactccaaaatcatcacctgcaacctgatcttctcttatcttggagcatgtaatacttgcacgagtgactggagaggttttagggtcactcacatcacactgatcactactccaatcaaagacactcattttcctggttggacttctgctcataattcttttggccagagattgacatccttttgcacctgatacaggagatgacttccttctgcaactattaaccgggagatcaactggagacaaatttagatctttgtccatcaaaaagtggtcaacaaaaccaagggcatctgcttgtgttgactctcctggttcttgagaatccaaaaaatcaagccctggaccatggctactagcagtaatccgcaatgaaccttggaaaccggtcactgtatcacaatttgattcttgcttgccttgaagaaagagatgtagtaagatttatctgagttaatacaaagaagaagatagaggcaacataacaacacaaggatatgtttacctgtttgacattcgtgatcatttgatccatcagactccaaaagtatatctccagctttcgggcttagctccggcaaacacatcggctcaccagcagcgacacttccatcttcatcatcactatcatccaccaccacttggtcgagaccgtaacattcctggttcagtgattcctcgtcaccacaatttccgttatctactagctccgtatcgtcgtagagcacttgaaatggggtttcaagtaacgagctattaagtactaatgcttcatcaatcgcctctgtatcttcaatttccccacatcccaaaatccgattaacctcaaaccctaagagaatccagaaatgaaattggtactacgaatctatcacctcaaaaatctacaattatcagcaagaaaaagaaaatgtaaatgaatcgtaatctcaaaactcactatgatccgaagaagctgaaggagactgcaaatcggaggcgaaatcttcggtttccataagattgaccatcgaaactcgaatttcaatgctgtccaagaagaaatggaatcgctagaagctcccgattcgtatacggttggaatcagagaagaaaccctagaggttccattggtgctttagtcgaggtgattggcgggagagagacgagtacagagctgtgtcgaatggttttgaaaagctcagttccgtgaaacgatattttagttactatatatatttaattatgtcaaacgatacatcaaatagggcatttggtctagtggtatgattctcgcttagggtgcgagaggtcccgagttcaattctcggaatgcccctctattatcttttgttttttgggacttgaaaattcttacctcattttcttctcagtatttccactatgttcttatccctttaatcttcttcacctatgttgcaggaaaaaaaaagattatatattatgtcttctagaaggaaaccaaactacttattcgacacctcataaatgctttgctatttttctactctttgtgtgcgatttggtgaagaatctttgagaatttggtcaaatgaacatttaagaatgttacaatttatcgacatgtcaaagattggtaacactttggttttcttttccatcccatgaatgtgaacttgcttacttaaaatatttaactgtaattttataacattactttacgatattaattaatttagatttaccagcaacacatggtattaggattgtgtacctttgtaattgttgatatatgagtcacttgttctaagaacacatttcattactttggattttgaaattctaagttgaaaatctttgttttattttcttggctagatttgatgcgtgtcataatctaatccaatttgaaaatatgtaatatgttgtataaaaagttaatatgccaacaaaaggatagatcttagttggtggaatcaacaccattagatatcaaattggtcgtatgcaatgtttctgtataatatatcatttgtctactgaataatatatatcataatgttaattgttagctttctgtcgggttatgaagatggtattggtaggtacgttgtataacataagaattgaaaacgtaaatattattcattagtagacagctcataataagcacacccacacatgcatgccacaagcaatagaggttttttaaaaggttttcttcttttaacaaaagaaaggcctttctttgatttcaaattttcaatgatattaatattgcaataaaataccatgatataacatattttagatttatattaatgatttatgaccccaaaagaaaaaatatattaattaaaatatgtagttcaacaataacctcagcctatatggctattatacaatcttgttttgggaagaaatcaacacatgcttatgaacttttatgttcctttttttgtcttcattagcaaaagataaagggatcaagccttttttacaaacacttgcatgctagtatgcttcaggttcaatcaccgccccattagattctctctccctctctaaagaccacacctttatg

SEQ ID NO: 16388 - DNA, 3000 bp, Unknown; identical to SEQ ID NO: 909
  misc_feature (1)..( 3000): 2750-1469P.txt file - cDNA_ID_1411707; gDNA_ID_1620336; Annot_ID_153783

SEQ ID NO: 16389 - DNA, 3003 bp, Unknown
  misc_feature (1)..( 3003): 2750-1469P.txt file - cDNA_ID_1411786; gDNA_ID_1621125; Annot_ID_172274
agatatcaaaactcctagagagatctaataaaaatgaagtcttttacgttcttgattctctttctctttgcagcacaatctatcagcgtctatgcaggcagcttccacaaagacgttaagatacattggggtgatggtcgtggaaagattcacgataatcaagggaaacttctatctctctcgcttgacaaatcctctggttcaggtttccaatctaatcaagagtttctctatggtaaagccgaagttcaaatgaaacttgtccctggtaactctgctggaaccgtcacaacattctatgtaagtaacatgtaacgttcttgtcatgttttgctatttcataaaatgttcgtaccacttgcttatatgatgttctaatttgtgtagcttaaatctccgggaactacatgggatgagattgatttcgagtttttggggaacataagtggtcatccatatactctccatactaatgtttacacaaaaggctcaggagacaaagaacaacaatttcatctatggtttgacccaaccgctaactttcacacttattgcatcacatggaatccacaaagaattatgtaagtgtcgaaactccttcctttgtaccatacataatatttatgtttgaggatataaactcatgaaccaagaatcttttattctctccagttttaccgttgatgggattccaattagagagtttatgaatgccgagtcacgtggagtcccattcccaacaaagcaaccaatgaggctatatgcgagtctatgggaagcagagcattgggctacaaggggaggattagagaaaacagattggtcaaaagctcctttcaccgcttattacagaaactacaatgtcgagggatgtgtatgggttaatggaaagtcagtttgtcccgcaaattcccaatggttcactcaaaaactcgattcgaatggccagacaagaatgaaaggggtacagagtaaatacatggtttacaactattgctccgataaaaaaaggtttcctcgaggtgttcctccagagtgcagctaaatgattgattctttgattcataaataagttacttgacgttgtctttgtaactcaatggttcttcttatctataatttttcaattcatttgttaccaaatatatgcgtgtttgtgtaagatcttttttacaatgaacaatgagttcttccattctaaaaaccttttaaaacatgtcgttactatatacgtacaacgatacttggggataaattgaataatatataaccttacttgatggataatgaatggcccaaatttcgacctttttctgaataaaatagaattttttccaggttttgtttcaagcttagtttcaagcgcagtaggatataggtatttatactttaataaaagaattcagcgtgaatggaggcgagaagcggtgcgatattttagctgtgttgaacgtccatatcccaccatatcttcatttagcataatgcatgtgagtatgtgacacatatatttatattattgtgcatttgtgcttccatagaggttggcatcttattttgtatgttaatgtgcggatatttagttgattaatcaaaaacactttgaaaaacataatataattaaattttattgatcaattcaacagtctttgtaagaaaaattatttctgtaattggaagtgtttttaaggtttagttaaatatgacgactattatgctcttttgtatcgtttttttttggattgaacgctaaactatacgagtgcatgggtgggtctgtttggtcgtaactcgtaaaataaataaacatcagaaccctctatgcggcggggagggtttgcgcttaagtcaaaagtcagaagccgtgttgacaaataacctcaacgcaggactagcatgtgatatacattattaatatctctgttttgtaacagtaaacgagtaaagaaaactaaatattgaaggacatatataaatgataagcttactactttactagttactggttggatgacgcacgtactggtccaagattcaacatcacaattttttttacagtccaaatttccaaaatatactttatttttgttcaaattaaaggaacatttttcttgatctagatatgtttgttatgtttaaggttcgtttcaagctaatattaagaatggcttgtttcaatgtgaaaaaggttatgctcatttgtaaatggatattgttaaatcagtttaagaaagtttcctacgcactaaacgtgtcaaactaaatctcaaggctataacttattttatgtattttgatcgggtactagctttaatcatgctgttacaagattcagttacattctattacaccgtccaaacttatgttgttatcttcacccaaataaaatgaaatgttttctgctgggagatcgattaaaaccaaaagaaattatatttgacaagactatcagccaaattaaaatcaagattcaactatggaaaacttgtagctatttttcaatacctaagttttaggaaactttgccattatattggtgtttatctaaggattagaacatttattttagttaaattaaatcaataaatcgtaaagttgttaattaggaaaaaaagtattaaaatgcaaatatatttgtcattcgaacctctatgcggtggggagggtttacgctcatgtttgaaagtcaaagcagtgttgataataatctcaacgcgggaccagcatgtgatatacgaatgtctatatacattattttctctgttttgtaacaataaacgagtaatgaaattatattttattggtttcaatttgtaacaaccagcaagaggtctaatgagccaactagaatacagcccacgataaataatcaaacccatgaaacttccttctctctttcctttgccatttccaaacactatataaactcatgtcgcttaactcaatttttcatcaacaatacatttgagatatcaatacacctccaaaatatatacaaaaatg

SEQ ID NO: 16390 - DNA, 3000 bp, Unknown
  misc_feature (1)..( 3000): 2750-1469P.txt file - cDNA_ID_1411786; gDNA_ID_2926197; Annot_ID_141342
tatcaaaactcctagagagatctaataaaaatgaagtcttttacgttcttgattctctttctctttgcagcacaatctatcagcgtctatgcaggcagcttccacaaagacgttaagatacattggggtgatggtcgtggaaagattcacgataatcaagggaaacttctatctctctcgcttgacaaatcctctggttcaggtttccaatctaatcaagagtttctctatggtaaagccgaagttcaaatgaaacttgtccctggtaactctgctggaaccgtcacaacattctatgtaagtaacatgtaacgttcttgtcatgttttgctatttcataaaatgttcgtaccacttgcttatatgatgttctaatttgtgtagcttaaatctccgggaactacatgggatgagattgatttcgagtttttggggaacataagtggtcatccatatactctccatactaatgtttacacaaaaggctcaggagacaaagaacaacaatttcatctatggtttgacccaaccgctaactttcacacttattgcatcacatggaatccacaaagaattatgtaagtgtcgaaactccttcctttgtaccatacataatatttatgtttgaggatataaactcatgaaccaagaatcttttattctctccagttttaccgttgatgggattccaattagagagtttatgaatgccgagtcacgtggagtcccattcccaacaaagcaaccaatgaggctatatgcgagtctatgggaagcagagcattgggctacaaggggaggattagagaaaacagattggtcaaaagctcctttcaccgcttattacagaaactacaatgtcgagggatgtgtatgggttaatggaaagtcagtttgtcccgcaaattcccaatggttcactcaaaaactcgattcgaatggccagacaagaatgaaaggggtacagagtaaatacatggtttacaactattgctccgataaaaaaaggtttcctcgaggtgttcctccagagtgcagctaaatgattgattctttgattcataaataagttacttgacgttgtctttgtaactcaatggttcttcttatctataatttttcaattcatttgttaccaaatatatgcgtgtttgtgtaagatcttttttacaatgaacaatgagttcttccattctaaaaaccttttaaaacatgtcgttactatatacgtacaacgatacttggggataaattgaataatatataaccttacttgatggataatgaatggcccaaatttcgacctttttctgaataaaatagaattttttccaggttttgtttcaagcttagtttcaagcgcagtaggatataggtatttatactttaataaaagaattcagcgtgaatggaggcgagaagcggtgcgatattttagctgtgttgaacgtccatatcccaccatatcttcatttagcataatgcatgtgagtatgtgacacatatatttatattattgtgcatttgtgcttccatagaggttggcatcttattttgtatgttaatgtgcggatatttagttgattaatcaaaaacactttgaaaaacataatataattaaattttattgatcaattcaacagtctttgtaagaaaaattatttctgtaattggaagtgtttttaaggtttagttaaatatgacgactattatgctcttttgtatcgtttttttttggattgaacgctaaactatacgagtgcatgggtgggtctgtttggtcgtaactcgtaaaataaataaacatcagaaccctctatgcggcggggagggtttgcgcttaagtcaaaagtcagaagccgtgttgacaaataacctcaacgcaggactagcatgtgatatacattattaatatctctgttttgtaacagtaaacgagtaaagaaaactaaatattgaaggacatatataaatgataagcttactactttactagttactggttggatgacgcacgtactggtccaagattcaacatcacaattttttttacagtccaaatttccaaaatatactttatttttgttcaaattaaaggaacatttttcttgatctagatatgtttgttatgtttaaggttcgtttcaagctaatattaagaatggcttgtttcaatgtgaaaaaggttatgctcatttgtaaatggatattgttaaatcagtttaagaaagtttcctacgcactaaacgtgtcaaactaaatctcaaggctataacttattttatgtattttgatcgggtactagctttaatcatgctgttacaagattcagttacattctattacaccgtccaaacttatgttgttatcttcacccaaataaaatgaaatgttttctgctgggagatcgattaaaaccaaaagaaattatatttgacaagactatcagccaaattaaaatcaagattcaactatggaaaacttgtagctatttttcaatacctaagttttaggaaactttgccattatattggtgtttatctaaggattagaacatttattttagttaaattaaatcaataaatcgtaaagttgttaattaggaaaaaaagtattaaaatgcaaatatatttgtcattcgaacctctatgcggtggggagggtttacgctcatgtttgaaagtcaaagcagtgttgataataatctcaacgcgggaccagcatgtgatatacgaatgtctatatacattattttctctgttttgtaacaataaacgagtaatgaaattatattttattggtttcaatttgtaacaaccagcaagaggtctaatgagccaactagaatacagcccacgataaataatcaaacccatgaaacttccttctctctttcctttgccatttccaaacactatataaactcatgtcgcttaactcaatttttcatcaacaatacatttgagatatcaatacacctccaaaatatatacaaaaatg

SEQ ID NO: 16391 - DNA, 2639 bp, Unknown; identical to SEQ ID NO: 1185
  misc_feature (1)..( 2639): 2750-1469P.txt file - cDNA_ID_1413191; gDNA_ID_1620368; Annot_ID_154898

SEQ ID NO: 16392 - DNA, 3003 bp, Unknown
  misc_feature (1)..( 3003): 2750-1469P.txt file - cDNA_ID_1440790; gDNA_ID_2684236; Annot_ID_192419
attctctgtaaccctccattgactctcttaccatctgcaccaaccttgtcattatacttccacgccaattgccatccaccgcctatgcttgtagccgtcgctgtctcacccacgtttgccataaacaagctgctctgtcgcctatgcatggtaccaacggtccgctggtggtagtcatccggctcagtggtttgcggagaaagcagaggactgtttaagttttcatcttggtcagaactatcttcattgtttctctctggatcccactgggactcctgccttcccatcattcccagtatacttcccatattggggaagagcatgctgcgggatgatgcgttcatgttctcggaagggagattctcatgaatgctaccaaagagagtgacaagtgggtccatgagggatccgccacgcggtaacatgctgccttgtcgggaagccaatgcgagagaactctgtcctttcactggcttagccatccatgactgtccatcctctggaccatatagttttatctgatctttcctcggcagttcatttccaccctcgttttcctcgttgtctggtccaatcacatattcttctatcgacgtgtcttttcccaccccaagcccttcaaccagcagagcaagctcgcctaaatcataccccgagttagtataagttcaaagatcgataatctagaggtcttagtgttcatcaagacaaacctgaaacatcttctctgccacggagtctctgcagaacctgtctagcttcatccatacggcctttgctgacaagccaccttggagattcaggcaagaagaaagccgcaagtacaaagtaggcaatggacggaattgacaaaacaccaagcatcagcctccagcttggtgattcttgaagcgacatcccaaacacaagacaatacgacaaaaacatcccaccggatccacaaaactgcgggaaagtgttgagtaatcctctgatctcagaaggtgcggtctcagagatgtagattgggacgagagtgacagctaaaccgatcccaaaaccatcaagaagccttgcgaaaaggagaacgtagacattgggagaccaaaacataacaatgctactcagaaaatagagaacagaggagagtataagcattgatcgccttcctactttgtcagagacaggaccagagaaagttgtgatcaaagtggctccaatgagagacattgccacgatcagtccttctatctttggttctttctccaaatgaaattctttcttaatgtaaattacagctcctgccaccaagaatcaacatcaaatcatagtgagatttcgttagtatgcaaaggaaaaagaaagagaaatatagaaagagagatacctgcaatggtggcattgtcccagccctgcaacatattccctatcgcagcggctaaagcaacaagcactacactcctcatctttttctcttttacagtgattttactttccacgaatcaataattctgttgatagaacatcatatgtttctttcccttctgcaatgtcccagattcatttcacaaaccaaaaaaacgagttgttaaagatattttagtgattaatcaaagcatgtagcagtttgagaagtggtaataacggtaggagagtgaaaaagagttggtcaagcagagagatataaggagaaagtgacattgttattttgaccgattcttaagtcttttatataatggaattacctgataaacaaaacaaaaaggaaatattacaacaactacttaaccatatgaggatcacatttcttcttaatcacacaaatgtctaaatacagttgagtttggaaacctctagtcggtccagagtgtcttacgcttttggacctttggtcagccaattattgcaatctttaaaatcagaccggacattaaaaccggtataatgtctaagcccctttaacggggttttacggtttgaagtcaatgtcggttctacactaaaaatcataaaagccaaaccgaactcaatcttcttcccgcaacttcataatctgctttcccaattctctctcgtcggcgaaggtcctgtgaaaccctagacaaatcgcaggtaagttcgactgtagaaatacacactgatatctcaatttatgttctattctctgcttttgaattgagaccatcgaattccattgtttctctgatgcttttttaatctcacaaaattgttaattttgatgatctttgagcagagatgcaagattcaaagattccacctttctctgaagcaaaaagaatgaagattcctactccaaaacaacccttgactcaactaccaccacgtatcgggaaaaaagtttcaaatcggagcaaatcgaaccaggttcatgcgatttcacatcaacttgagatgtctccaaattcagattcatctccaggaaacgagtacagagcactgagacgcaagtatttgctgctagaggaagatagtttcgcgttggagagagagttaaaggaagcagaggatgaggttaaagcacttgaagatgagaaacttgagctcttggacaaactcgttgttatggaaggtttagttgatccttgattctatagcttagcacttgttttatttgccacattcatatgtaaaaaatcgccttatctagtaacattgtttctgcttatataacttataagcttttgttgtgtgttgagagaattggagatggtaaagaaaactgttgtgttcacttgttgtgtctttcgagttaatacaatggtttgggagtaaagacttaaacttgctacagtttttactagattctagtgctaaatttaaccaaaactgtgaccaaatgtcgtttatttgcaccacgtgtccttcatccacaacagaatgatgatggattagatatttctattcaaaaactataacgtgtggctgcaaatcgattcaccgcttcagactctgttttagaccaaagtcgagtgagtgctttcatcttcttcttaagcatctatg

SEQ ID NO: 16393 - DNA, 3003 bp, Unknown; identical to SEQ ID NO: 16392
  misc_feature (1)..( 3003): 2750-1469P.txt file - cDNA_ID_1440790; gDNA_ID_2684236; Annot_ID_137710

SEQ ID NO: 16394 - DNA, 3000 bp, Unknown; identical to SEQ ID NO: 9965
  misc_feature (1)..( 3000): 2750-1469P.txt file - cDNA_ID_1440840; gDNA_ID_2096296; Annot_ID_195560

SEQ ID NO: 16395 - DNA, 3003 bp, Unknown
  misc_feature (1)..( 3003): 2750-1469P.txt file - cDNA_ID_1440865; gDNA_ID_1971974; Annot_ID_177555
ttcttcttcttcttcttcttcttctttcttgatctttttggttgttacgagcttcttcttctctttctcttctcaagctcattagaacatcaatttaaaacagaaacttttactatagaccacgataacaaatctgggtttttgttgttgttctctccatgcagagaagagtttcaaaaaggaatacaggatctgtggcttttgagtaggttaattaattagtcgacaagaaaacaaaggtatgtaaccatttgatcattctccattgcttgttgtctcgcttagatccttatcatatttaaatgctaaaatggatgattttttttgagacttttttatatatatatatatatttataactaaactttgatagataatctagtttagttagtagttgcacaaaatacattttgaattctccgttaaataggcgtttcaatttataagaataagatttatgataattttcgggttcaaacttacatattacacgttttgttatatgttacacctagttaaacatatagtgtttcatctagctatgcataagagtgtctcaccataaatcaaatgggcagtttgtgtttttttttctttatatagactacacagaatatatagtgtgcactatcttacgtttgtccggtgtgtcaatgttgatttttgcatcaagttctccttcgacaaaacaaaatgacgatatatatctatctatatatatatatacaaactgtattggcttcgtactatatacatacgtcagtcttattaattctacaacgcagatcaaaatttgaattttgactaggctttaatgtgtacgattaccttatacaagtgaaaaagggtcaatcgtacgtttacccttaaatttctttttgttagtaacatatcgaaaaataaaccgttttatatatattttcaaaatacttattcttcttgttaatgctgtcacatattataaatcattacaatgttttgacaaataaaagaaaaatcattattacaaatctaatcgttttaaaatcctagggaatcctactagattattattactattgtagaccttgtttcttttgtcacattaattaataacaataaaataatatatatttttaaaaatatttttgttttgttttgcattgtatattatttagctgtagatttgtaatgggccacgtaattgggccatgctaagacccggcaaacccatgtgagatatatgatctcccgcactatagtccacgttatctcactgatatctcattattttaacaataagaccgtctcttaattttattacaagttttcttttactcttgtagccttaaattttaggctgaaaattaaagttttgaaaaaagctatagggagggactatgtaaaataaaaaaatgtacgttaccatcagattttaccataaagagccaaaaataaaatatgcaaaactccactaaaaataatattaattcccctagccaacaaaaaagattcagattcatatcccacgcgctcgttcaaatcctctcattcgccacctgatcaaaccaatctcaatttgaaaattgaaatagacaaaatcgtgacattgggacataaaaaagcactaggacaaaattctagtcgacgcaaaaaaaattcgaaaaacgtgagtcagcgtatgtggtttacacgcgccaaagtgggagcgtgagtggggtttgaatgcacctgaaactgtctggtcaataagttaaagtgcatgggaaaaatcttggttgctgtttcctatatatctctctttttaccatcaacatgttacatatatatatggacaaaaatctgtatatgtgaatgcatataggagtgtgatgtatttatataagttagtaagctttgttctctttctctatttttttggcaggtatataaaattttaaaatggaggaggaaaaccaaaagtcgcatcgagtttcacgtaaagaccagagtggatcccactggagtcaaggagccgatgaagagccgagagccagatgctccgggaaaaggtgccggtcttgggcggcggcggcgatcgctgactgcgtggcgctctgctgttgtccctgcgccgtggtgaacatcttcactctcgcctttgttaaggtcccgtggatgataggccggaaatgtatcggccgtggtggcccgagtaagaagcggatgaagaaaatcaaccgtgaggatcggtttcatcaccatcaccaccacaggaggtcggccgagatggtgagtggtggatgttgcggtggcggagatggagatggagagttcgatgaccatcggtttgtggtggaaagagacgggagtttgaccaaagaggaagccaaaacggcgtcgttaaaagaagaggaagagacgagaataagtgcgagagtggaagcagagagagtttggttagagttgtatcagattgggcatcttggctttggtagagtctccttcactggcattcatcaatgataatagatgaacttttaattattaggcgtatatgattaccaaaactaaaaatagattttgtgaaattctttagtgcagcaagtaagattccacaagtatgcatagaaaaaaaaaaaaagattacacaagtattaatttatagaggttttagtgcaacatgtaactcataaggattaaggaaacaaaaagtatttgtgaaataagagagtacattatattatagaaatgggctaatatacatttgggcccttgttaaagggctttcacatgaaccgcattaaagggtagtttaggacatttacgatagaacttggtaggcgtagctagctgtcctgtaacagaaaaaacctgcgcattttagcatgcttatgaaattcatttgctaaaagacgcatagacacgtcgtgggcgaagggttctttgtcttcttcccccaactgagcaagattgttttccttaagagcttcatcgtcatcatccgagaattggagcagagatacgaagatttggcgaaaaatg

SEQ ID NO: 16396 - DNA, 3000 bp, Unknown; identical to SEQ ID NO: 10989
  misc_feature (1)..( 3000): 2750-1469P.txt file - cDNA_ID_1440942; gDNA_ID_2214470; Annot_ID_133056

SEQ ID NO: 16397 - DNA, 3000 bp, Unknown; identical to SEQ ID NO: 10989
  misc_feature (1)..( 3000): 2750-1469P.txt file - cDNA_ID_1440942; gDNA_ID_2214470; Annot_ID_182986

SEQ ID NO: 16398 - DNA, 3000 bp, Unknown; identical to SEQ ID NO: 11750
  misc_feature (1)..( 3000): 2750-1469P.txt file - cDNA_ID_1441000; gDNA_ID_2214515; Annot_ID_133927

SEQ ID NO: 16399 - DNA, 3000 bp, Unknown; identical to SEQ ID NO: 11750
  misc_feature (1)..( 3000): 2750-1469P.txt file - cDNA_ID_1441000; gDNA_ID_2214515; Annot_ID_184405

SEQ ID NO: 16400 - DNA, 3000 bp, Unknown; identical to SEQ ID NO: 2129
  misc_feature (1)..( 3000): 2750-1469P.txt file - cDNA_ID_1441072; gDNA_ID_1620491; Annot_ID_158617

SEQ ID NO: 16401 - DNA, 3003 bp, Unknown
  misc_feature (1)..( 3003): 2750-1469P.txt file - cDNA_ID_1441170; gDNA_ID_2214589; Annot_ID_135399
aacatcgatgattagaaactaaagtttattccttgatgtatctttagttggtgctcgtaaatcttactactgtttgcttagagcataactatgtttataatctaaagtgtattccttgatgaatccataatcggtgctcataaatcttactaatgtccacttagatcactacccatgttttcctcgtgatgatttataattggtgctcatcaagtttactaacatcttcgtagatcatctcccacatagagtttctttcttgatgaatctataatttgtgctcataaatcttatgttgatttgtccatccctgttcaggttcctttggtagaggtcaaatgcagaaaccatttgaggaagcaacttacgcgctcaaggttggagatataagcgacattgtcgatacagacagtggagtccacatcattaagagaacagcttgaccttatctgatctgatagaaaatgtattgaaggtgcctgcttcgtttcccttctcttcttgaccagaagaacatagaagaagaagaataagaagaatttaattcaaggttattgttattgtggttttgattctgaatctgtctacgaatttgatacaactcaaacatatgataaaatcagacaagctatctcatttcttcttaaaggcttcataagcactccctgtcgtagacagtgacttgtataatcacatttcagtatctttgtcatggtcttactgcaacattctggcatcttgtgtgttgtcattttgctcttaaactcttgatagtctttggctctcgtctccactcttaatatttgagaaatcgtttactgttaggcgtaattcaatgtttaaaccagtttagtaggttctgagcgggatgtctaggtttttgacttttcttaacaacatttaaggttagagccatttagcaattaatctaaacaggtttttattttaaacaagtcatgcagaactccattgtatgggatttaaggattcaaataattttctctagaaaattcgaataaatcggtttattggtttaaattttgagatatatactggtaactgattaattatgtgaagccggttacacttttattgctctttgtagtcaatatttccaagttaatgttacttgttttcttggagtttcaactctatttatacttataaaacaactattgaaatttctaattaaagcatccaaagatgttaaagtaagataattaatgtcatagtttcacatttcattccatataaataatcaaaagtcttattgttgttcatcaatcaaaagcaaatataaccttcagcatatatttggctatactaaggttctttttactcaatttctcattatgtctataaaaaatatgctttcactcctagcggttctatgcatcatcgtttctgtaaatgcttagatgcctcagtttccggctccatttcctttttcatttctattcgaaccgattcctggtatgtcaggattacctgacataacaaaatgttggtcatccgtgatggatattcctggatgcattgtagaggtttctcaatctattttcactggaaaattcggcaatttaggtccatcttgttgtaaagcattgttggacgctgaagtcaattccatgccgaaaattccattcattctgtttttccctccgatgctaaaggaacaatgctcaagaattgtgggtgcaactcctcctataccaaaatagagttttagcttagttttaaaaatctatgatttttttcttttcaacttatttattgaaattgtagcttactctacatgttatactccaaaaagaaaaaaacgatgatacaataataacatagttgtatttgggttcaatacttactcatttttcaattataatgaataacaccttgaaacattaactccgtaattaatttagtcttgcaatttttcataaattgtttatatatgtcgtaacacaaaatttgcgaacggttaataactttactagataaaacctctctaaataggtagatgtgaaaaataaataaatttttgttttaataaatttttcaaatgataatctatatatattttatttaatatatattttctaaaaccaaatttcaatcttaccttttctaaaaccatattgttaaaaactaaagaaaaagttggaccaagcaaagcctctcggtaaatgtggtaaataaatagaacgatataactgagaagaagaaaataaaacaaaattaagaaaataaaaagataaacatatttaagttacaatatttaaaaatattaaaacacttctttttaagaacaaaatggggaattttatttatgttttgaatagatcaacaattattaatagaatgagtttagtttaatatattaaatataaaaaattgaatatataaacaattgttttatgtatatattttttttttgatagggttaaggatttttttctatttttgtttttaaatgtaataaaatttgaaacacatgtaaatatcgtattagtaaataccgaccaaaaaaaatattgtattagtaaatttgacacatatcgcaatttttgtgagctaacaattttaaaaatcaaataagatgacgaacaaagctctggtttaaactttctcccatcaattttttcattaaaccaaatttaaccaattatttggcctaataactgcgtctacgttattaagaataagaacttattttgtgtttcagtagaaaacacactcgttcacaaaatgcctagtaagagtaaaggacgatcaccgccaccaagtgtgtttctcggataaacacatggaatccagccattacttaaacgacacgtgtacgctcatgatttattaatgcacacgtaatcgatcctctgacaaaaaccataacgaatacagaaaacacacgaatacacttccctgcgctataaataagctagcacgaaaaaatttaacagatagagacaagacaagcaaagcaacactttcactaatcctctaatg

SEQ ID NO: 16402 - DNA, 3003 bp, Unknown; identical to SEQ ID NO: 16401
  misc_feature (1)..( 3003): 2750-1469P.txt file - cDNA_ID_1441170; gDNA_ID_2214589; Annot_ID_186733

SEQ ID NO: 16403 - DNA, 3003 bp, Unknown
  misc_feature (1)..( 3003): 2750-1469P.txt file - cDNA_ID_1441174; gDNA_ID_1972143; Annot_ID_179292
tcaaaatatcaaaactttgttctatgtttgtgtcagatagtgattatgtaagagtgaaaccagtatttaagtacccgaaaccagaacggagaccagcgacccagtcttccttgtaacacaaggctcttcctctaagatctgctactatacctctgaatagcctcttcgagctatccactctttcttcctccatatccagaatccctcaaagactccagaactcgtcgcctctggtctactctttatatgacctaaaccacaaaaacaggaagctatatattatgtatgacatctagcaatgactttaaatctagcattttgctgactacatttaatacaaaataatcttcatattatatttttctaaatttgtgacgattccagtctttttccacctctcaatagaaaaagaagcttatagctgttttatcttttgttacttactagtaatgtcaattttctatgcttttatatgaataagaaaacgcaatgtgcccaactcaaatagagaaacatcacaaagcacataaaacaaagcaaaacgtaatgcaaaatttcttcttatgacaaagatctaagtctcctcgtctcctctctcataaagtgaaatttgaaattgcatatgcacccaaaaaaaaaaaaaaaaaaaaagaatccaactttttcaataaaatccattaattaatatccgtcgtatattgaatctacacctttttcatagttttgacaacgaaattagcagtaacaaatcctttcacatctcacaaaaacataatcagacaaaagaaaggattaaacaaaatcagacaaaggagttaacatgcaataactcggaaatttgaggcgtaaggaggagcaaactaccggcgacgaaagagaaaaggagaatagccggagccgagaagtaactgtgtagcgatttatagggtttaggaagatttataggccaaagacgaggcaacgttagcaaatggagagacagggcccatttatacacgtattatgttgggcctacatccacatgtcagtaatcgagtgggtgattctgacatctgtgatcttgacgctttaacactctgtctgttcttttcgtataagaaagtgacatatatatagagaggaacaattcatctaaattaaataatttattattgaaaattttaacttaatatagtttttttgtataatgttgtttcctttagtcttcattttttcttaagttatttccattttaaaaaacataccaatatgttatattctttgcttaaattgctttaacctgtatctagaaaatgtaatcttccatattgttaatttcataaataaaataaatttttttgcaagttattggaaaacgaagttaaaaattaatgctgcaccaagtttgtgaaattttaaaattacttgtagttggagtgggtgtagatgtttatgtgtagaaataggcatgcacacacaatttaatatagtcctagttacttatacaaaaaattcactgctgacgtgatcagtaatgcactcatatatgcatatatcactccacgtcaatggcacttgcccgtgcaaatgcctttattgtgccagaatcttcgaccggtcaaattgcgtgtgtgtgtatatatcgaaatatatgttatcaaaagagtttgaactttgaacccatatctaatacctgagtaaagttttagcattctattcaaagataacatgtagtacatactaaacaaactatatgtatcggttgttatcaggaataataagaattgtataatgcaatatataattaagtggtacttatgattaatacatacacatggatggtagatcgggatttgaaaaaccaattaaaatctagctttgaaaaggactcgagattctaaacgccgtaccaagaaagttcagattattatttcatgatgaatcattgagtcaaacacttaagcatcatatttttaatttcatagtttatacgttatccacatatataatattaattccgtcgacgacagtatttatatcagaattaggacaaactacatgtatatatttagtcaatcttgaaatttaaaaaaatgcctttgctaagaataaaaattatggttaggtgaagttctcacgtaaaactattcaatcctcacgcgattgaggagtgactgaccaaagtttatttctataggggcaatttaataactattgtaaactttcaacgtaaaaattaattactttgaagttatggggcaatatcatcaatagtaataaatataagcccttactcgtaaaatacaaaaggtttatttgttttctgaattgagagcgtgtaactactaccatcgtcgtctccgcgagttcttctctgcgtttaagccatagataacaaaccaaactaaaaaaaaaaagtttctccttttatcattccttctcttcccttgtataggtgtgatcctcttcaaggggatttctctggcgggtcatacattcgcaccgatcaaagtcggattggtctttcttaacgcaatcttgacccgattcaaaaaatttctggtatcctttttaagaaatgaaattaattgattccttgtcttccaaacgagtaaatcgactaattgattagattttgttcattagggtttgttagtgaatagataagaagataaatgggagctccgttagtgtgccacgggcattctcgtcccgtcgtcgatgtggcttatagtccggtgactccagatgggttctttctcattagcgccagcaaaggtatgatcttcgatcgatttgtatttgactatctatgatctttacttggaactgtgcctattttggattatgatttgcatagcgaatgtgctttgacgaatttgattttgctgccttttattatatatcgtctgaagtttgatttgtggctgatctaatggagaaattaggatgataagttgcatacattgttgaactctagctgaggtttctttgacttttgatatttcagattcgaatccgatg

SEQ ID NO: 16404 - DNA, 3003 bp, Unknown; identical to SEQ ID NO: 16403
  misc_feature (1)..( 3003): 2750-1469P.txt file - cDNA_ID_1441174; gDNA_ID_1621154; Annot_ID_173417

SEQ ID NO: 16405 - DNA, 3003 bp, Unknown
  misc_feature (1)..( 3003): 2750-1469P.txt file - cDNA_ID_1441291; gDNA_ID_1620627; Annot_ID_47168
ctctattatcatcaaatctccttcttaaattttttttttttttttttgaaacaaatggattttattaaaaatacaaaaaaaattgtatatttggattacgtcaactcttacaattttgctagtctcatagaaagatgtcatacaatgcttgcatgtattgcttataacagtacgtgtgcttttgttatttcttttctagtattgtaattgcgtcgtacaagaaaacttataagatgcgtcggaattcgaaataaaacaaataaggttggaatgtatcacatgattttcatacgtttttacaatttctgataagtcccccttggtatgatggtatcgactttgttttcagaaagttgagtttgtttcttttccgaaaactaacgatgtcaaataatgtgaattcacaacatatataaaaaaatgataagaagagagcttaattttgagcgagtgttacaaattaattaaaaactgtgtctagtttaacacttaaaaaaattgcaatttaaatgataactacccctggattattttcataacaattttgtacatgaaagaatttaagataatatattattttaccaaattagaaaagctaaaaaaataagtactataatttgttgtatttagtgaaagaataaatgttgctgggaaaaaaagtgaaagaataaatgctttgggtatataccttatattaaaaacaaaacgaaaaaaaattaatgatatttgttaccatatatattatatacaatctataaacagaaattaagataatttatctgaaaagtgttttcaatgaggaaaataacaataaacagaaaaaatgaggtgtatgtacaaagatttgttaccaaatttaaagtattcaaacagaaagtacccatctgtttaggcaaaggattcgatcatcaaacgtcctacaatatcttgttttgcgatctcacccacaaatttatttcctataaattctcttcctctgtctgatctcttctattcaagcccacttcttttctctttctcttgtcttcgtggagttttcggatcttacacaacaatatctttgtcttactgtatttcttgtcctttttcttcttacctttctaacaattattaagaagagtaaagcttgaatttaaataaaaatgatgggagacaatgaaggaagaagaactccgttattgaatcttggggttcaagtatcgatgagagtgttaaccatcggagctgcaatggcctcgatgtgggtcatgatcactaaccgtgaagtcgcatctgtttatggcatcgcttttgaggctaaatacagctactcctctgcctttaggtatatatttttttaaatttattctccttttctatcatcatctacttcttattttatgaaggtgcaatgatctagttattgaaataattcatatatgatacaacgaagcatccatctgcatgaaatgtcatcattcacgttgaaaatatgaagaaaacagatcacacattcggtagaaaagattgaaaagatgaacacatttttctaaaaaaaaacatccctcacgtatgatgtaggaagaacaacatgtgggacaaatcataatttggcatttttcattcatcgatatgatcatctttattgaaagtaagagatcgagtgattaaagtgtatgatttgatgtttgacaggtatttggtgtacgcacagatagctgtctgcgccgcgacattgtttacgcttgtatgggcttgtttggcagtccgcagaagaggacttgtttttgcactcttcttctttgatttggtaactatattacatgtttttgatctaaacattttcatttctatacgtgaatactctttatcttttaatttgaattagcatgttcacaaattatataaataaacgttttgagatgggtttgatattttgatgtacagcttacgactttgacggcgatatcagctttctctgctgccttcgcggaaggttacgtagggaagtacggtaacaaacaggccggttggcttccgatctgcggttatgtgcatggttattgcagtcgtgtcactatctccctcgctatgtccttcgcctcttttatcctcttgttcatccttacggtcttaactgcctccgctgctcgtcattactgattttcttacattttatatcatacaattcaattccttctactccaagataattcagtctttgttatatataattggatttcatgagatgcaaaattgatttgatataatgaaatgaaattgtatgattacttgcatgtatttatctttgagatcacttcttctgttctttgctgtgcttaattagtctcctatttgtttttcttggagaaaatctaagaaacaacaaagtattgacaagaaagaaaacgaaattaagatcttggtaatcggaagagcatttttctaaaacgtataattgtacaataatccttctgccaccaaaagagtgataacatgtttcaaacatgcatagataaaacataatcttattaatgttacatatctcttcacaaaatctattcttccacatatttctcctaaatagggttttagcagagccaacagaaaataaaatgcatacgatctcatcatcactgtatgatggatttccaaaagagaatgttacatatatacatcatcataattcataacatttgcatcagaccaggctcaactagatgcaaaagaaccaagatgggcccgttgaagtaacttatattttggactgggcctgtcacttggcaactgtgggacccacatgaacatgtgccgaagataggcctgaatctccgagaacaaacctccgccacaaaaacagaagacttgttgcttgcgtatcataatacgacgccgtatctctacttgctcgaacaaacccaaaaagatacatatcaagagattaaaccttatccaactaagagaagccatttttattttttttgggtctctgagttgtgtattgagcttcatctccttcaaatg

SEQ ID NO: 16406 - DNA, 2606 bp, Unknown; identical to SEQ ID NO: 3716
  misc_feature (1)..( 2606): 2750-1469P.txt file - cDNA_ID_1441291; gDNA_ID_1620658; Annot_ID_163691

SEQ ID NO: 16407 - DNA, 3003 bp, Unknown; identical to SEQ ID NO: 16405
  misc_feature (1)..( 3003): 2750-1469P.txt file - cDNA_ID_1441291; gDNA_ID_1620627; Annot_ID_162524

SEQ ID NO: 16408 - DNA, 3003 bp, Unknown; identical to SEQ ID NO: 16405
  misc_feature (1)..( 3003): 2750-1469P.txt file - cDNA_ID_1441291; gDNA_ID_2926186; Annot_ID_140812

SEQ ID NO: 16409 - DNA, 3003 bp, Unknown; identical to SEQ ID NO: 16405
  misc_feature (1)..( 3003): 2750-1469P.txt file - cDNA_ID_1441291; gDNA_ID_2926186; Annot_ID_200654

SEQ ID NO: 16410 - DNA, 3003 bp, Unknown
  misc_feature (1)..( 3003): 2750-1469P.txt file - cDNA_ID_1441391; gDNA_ID_1620568; Annot_ID_160796
acgtatacatggatgttagaaaccgcaacctctagaactatatgacacacgaattgcagaacttctaaaagttttactgcagtaaaatatcaatcattaaaccaaaaagtctcctataaaagaaatttgattattgattatatgattttgagtgaaactttcttagcagttagcagtaccttttcttttttcgtaggctaaacttaccaaaataaaaactacatcggttcatgtcaagtcttgtaatatatagctaatctagtactagctataggctacagcaaacaaaaatgtttttattatttgtcacgagaaaacaataaaatgtgttatcaaactaaataaaaaccatatattatactaatcacaaattaaacgggaatcttttatttaattaatagtatactctctcacacagacagacatctctggatttatatataaatacagttcatcttctttaatccacaaactcacacacacacacacacactctgttttcttcgtccattctattaccagaaaacagagtttgatagagagaaaagaatggaactgtcgactcaaatgaatgtgttcgaagagcttcttgttccgacaaagcaagaaacaaccgacaacaacatcaacaatctgagctttaatggcggatttgatcatcatcatcatcaattcttcccaaatggatataatattgattacctctgtttcaacaatgaagaagaagacgaaaatacccttttgtatccttcttctttcatggatctaatctctcaacctcctccattgcttcttcaccaaccgccaccgttacaaccactgtcgccgccgttatcctcctccgcgaccgccggagcaacatttgactacccttttcttgaggctttgcaagagataattgactcttcttcctcatcgcctccattgatccttcaaaatggtcaagaagagaactttaataatccgatgtcgtatccctctccattgatggagtctgatcagagcaagagcttcagtgttggttactgtggaggagagacgaacaagaagaagagcaaaaagcttgaaggccaaccttctaagaatctcatggcggagagacgacggagaaaacgacttaacgatcgtctttctatgctccgatccatcgtcccaaaaatcagtaaggtaaattacaaaatgctaatcttttttttctttcaaaccattaataataattgtagtcaaaatcagcaaaagatttgatcatttttttaatgagtaggttaatgactgtattattatatgtgttcataaagaaaatgacctttttaatcttcttgatttacctcaaaatctaaccctagctaaggtttttgtgttctttgaagatttatttaacatttaattcaaaaaattggtctcaggaaaatcaacaaaagattcgtccttttaaatgagtgaattagttataaaattggtttcaaattcagccttttgtattttaacattatgtgtttgtttcttcttttttgaaaccttagttttcttcttcaagattgtttaattattgtgttcttacttttaagggaatctacagaaccggctgaaaagtgataaatcatttaaaagtgttttaaaataatgattattggtatgttcaaaaaaatcagatggacaggacatcgatattaggagatgccatagattacatgaaagagcttttagacaaaatcaacaaattacaagatgaggaacaagaacttggaaatagcaacaattcacatcactctaagctcttcggtgatctcaaggatcttaatgcgaacgaacctctggtcagaaactcaccaaaggtacaaagatattttacattgctcttgtttttttccttctacatattagcccttgtatttatgaattgttataaacaaaccccctgtctttttaacaaatctttttgtaattctgtttatgttttgcatagtttgaaatagatcgtagagacgaggatactcgagttgatatatgctgctcgccaaaaccgggattgctactatctactgtgaatacattagagactctaggcttggagattgaacaatgtgttataagctgctttagtgatttctctttgcaggcttcttgttctgaggtatcgatttaatataaagtatttatgcatggaatgttaattatatagtattcgtaatgataatattgatgagttttgttgtatatatgtttatagggagctgagcagagagatttcataacatcagaagatataaaacaagcattattcagaaacgcaggttatggtggaagctgcttgtaatgagtcatgattgaaactaataaaccaaaactattgtttatttctaataatactagcgcttataaactttagatgttgttttaattcccttgtgagtttggtttttttttcctaggggaaaacattatgagttcagttgtataaacaaaagaaggaaatttaaaaagagatgtttctcctaaattatatcaaagaacaaattgagatataaaataaaaggttatattatgttgctttgagggaaataaaccacttcgataattgaaattagggttcgtatatgacagtgaccgatgttcgaaggatgcatcatcaaataaaaaagctgtattaatcaaaaagttataaaggctaatcataagcgtgattataatgttaatgactgtgcctccaccaatcaacgcattcatcattactgcggcacttacgtcaacgaattaatcttttatcgataaaattccaagaggccctaacttaggcttaatcaattattgggcctataaagaacggcaactgatgtagatccaaatgggctttatttagtaagcccaaactttatgttttctcttatatcttcctgctctgttattagaaagaatctccgatttagatagaaacaacaatcctccggtggtcactcgctaatctccgtttgatctcgccgacactcgagccttttaccgatg

SEQ ID NO: 16411 - DNA, 576 bp, Unknown
  misc_feature (1)..( 576): 2750-1469P.txt file - cDNA_ID_1441963; gDNA_ID_1620491; Annot_ID_158627
acggcgtgataaacaaaccatgctgatcctcaaaggaacgtataaatgtcttctcttcgatatagaaatcatgattttaatcatcgaaaataatcagatgttagaagttaactgtatcttgttcttagtttcagggacaaagagtttttgttgtcagtaacttcaagctctaagctatggctgtcaccaagatttatattgtgtgagtctttaaagtttaaactaatcagtgccaagttaaacaactggcgatcaatttcccgatcaagagtaatctgcgattttgtactactgactcacacaggacgagattgaatcctcgtaccagtttggttttgacgaaaaattgggttcttggacttttctgttaggtactattccttgcacggccacgtcgagacaatggcacgagaggtacttcggggagtaaactctgttccagacgtggaagcaacactttggcaagtgccagagacattaccggagaaaatattggagaaagtgaaggccgttccaagaccggacgatgtgccggatattcgaccagaacaactggcggaagccgacggattcatg

SEQ ID NO: 16412 - DNA, 3000 bp, Unknown; identical to SEQ ID NO: 14927
  misc_feature (1)..( 3000): 2750-1469P.txt file - cDNA_ID_1441974; gDNA_ID_2684234; Annot_ID_192364

SEQ ID NO: 16413 - DNA, 3000 bp, Unknown; identical to SEQ ID NO: 14927
  misc_feature (1)..( 3000): 2750-1469P.txt file - cDNA_ID_1441974; gDNA_ID_2684234; Annot_ID_137676

SEQ ID NO: 16414 - DNA, 3003 bp, Unknown
  misc_feature (1)..( 3003): 2750-1469P.txt file - cDNA_ID_1442104; gDNA_ID_2214686; Annot_ID_189343
caagtctattgcctaagttactaatgctgcagagtcaattcctagactaatgtgatatccggatggcaaaccgatatagactagaggacatccacgtttccaacataatccattaaggctggagctaatttttctgcttttccttttacctcttcagtaaggttagtatttgtagaggttgactccttgttcatacctgataatgaggccatagtgaaaaagataatggtatttttcttccttataaaaactgaatgaaatgattttctttagagtaaaagggtgagaataatgtccgatgaaccaagtattttacttaagaaggaatgattatacaaaggttggaagaatgctgaggatatctttccaatgatgagagtactactttgtctaaatccgtaaaaagaataattgttggggagaaaaagaataccaaaactatgaaaatggtcgacttaacatggttttgtatgggaatgagtctaaaaagttcttgaatattaactttattgatgagtcctagcaatgaaagcctattagatatagttgtagaatttggtttaaaatttaggatgatgtgaatgcatgcgaataattacatggtagttatgatttaattagaactgttaagcatatgaatttggtttgaatgatcaaggtaatcggctagagaaattgggagttcctgcgtttttgaacttcttccacgaattcgatttttgtgttttggccaaggaaaagctaagtctgaagagttgatatacagtacctcaattttcactgctgtcagctacgatctaggtataggtattagagtctttttgttatttctagagtctttttagagtcttttcagctatttctatgaccgggattggattgaaactaataaagcattttggagaaaaacggaaggagttaagctaaaagacgaatttggagtctgacaaaggcatcataccgacacttccatggtgttgatcgacacggtttgtggcgcaacaagagtctaacggtttaaagatttgaagatcccagaatttacacctaaagatttttctatttacagaattagtccctgcacgtttttgagaacatataatatattttaaaaggtcattgtttagaccaaagctttatttttaggtcttctacttttgccctacaattcaaggagatttttggagagttcttgagagatttcaaaaccttgtagagaaaagatcttttcctaaactctattcttcttttgatttcttatatgcaatcttatacaaacatgttttatgtttcgatgatcatgtttgagtaatcccctagctgggtttagtgtttttcattagggatttagatgaattagtatatcgataacctgttaagatttatatttatagttctttatctttgattgtttttaatgctagttctagagtacctaactagaacttgatcctaagttaataggtaagattcgagaggcatcttattgccggaactagatgggcttaattagctaaatgaggataggtctgatttagatacttagctgaacttatcaaaccggattataatgtttgcttagttctagggatctacatataaagtggggtcaatacaattaagcatacttagtccatgcaacaagagttgattgattatagaattgaggtttgtagttctagaatagtgcaataacaatcctaattaactgctagaactattatttgtctatttcctgagaatttctgaaatccgacgttttaaacatctgaatcttacatcaatttaatatgcttttgtcttttgatatacaattacttttttttttatataattacttgatttagtttcatttctagattttaactttacgtgtgaacaaaaaagatttgtgagattcgacccttaaatactaatgacgatctcttatttgagagagtggtcttaaggtactttgatcacaaccaccttgtgttaactgtagccaagcaattttccaagttcttaaaaatttaattagtccttagtagctactttgtatagctcctctatgatctactttcagtgcatatagttttgtctttatccagctgtttaaaatctatcgcttgcgatttttgacaaaatctttaaaagataataaacagacgatttttttttgtcaactgaattatattagagaaacttgttgaggaagtatggtgaaatacaaactctcaaacgagggaaaaaccgacggatgacgaaaatgtccgcagaaacaaagccaacgaaaaaagaaatttcttcgaaaactaaagtcctaaagaaatgaactaaaaatataactagaaatacaaagcaagaaatatcaaaccaaaatcgaaagaggacaatcattcaagagaaacaaatagtcttgaaacctaagaaacatcttctaaaaaaaaaaaaaaaaaaaaaaaaaaaaaaatgaaacatcttctcctgaatctcctgcaaaagagatttatcaatggtgcacttagccaacccaaagataccatctactatctcccattatgaagacaattgacctctctaaacctagaaaaggatagactacgtccaaataataaagaagagaaaattactacaattaaagaatatataattacttgatcatccaataatagatcgctatacgtgtgtgatgacgtagataagaaaagatctaaaacacttgtggggtttgtgctatttatggtgtttcaaacttattcacagtaaatccaacgaccacccatacgggacccgacaccgtatacatactttgatacttatctccttaccactttgtttttttctatattgtgatacattacttcccttttaacattttcttttattactaaaattctttcgactgtggattagtttatttgacttttctcattccctcgtcctcattttcattataaatagagagcatgcatggggacatattattcatcacaagttttaagcagtatttgtaagaaaatg

SEQ ID NO: 16415 - DNA, 3003 bp, Unknown
  misc_feature (1)..( 3003): 2750-1469P.txt file - cDNA_ID_1442179; gDNA_ID_1620362; Annot_ID_154689
ctttcttttgttttagaaatatatacagagaattgatttagttctatttcagaaactcgattttggatcaaattgctttgatatagttcagttttgattagtatgctgctttgacttagtttgtctgtctagagcttagtatctgtatgtataagtgatcttgatccgtcgtagttcaattctgagattgttccaaattgtttcagtagttggatgcatttggctatgttatcaagtaacctctgattaaatgttggtttggttcacagggaagaccacatttgtaaagagacatcttactggagagtttgagaagaagtatgaacgtaagtactctcgcaagcaagccccatcctgaaatatatcacttgtcattaaccttttttattctcacaaaagattctcatgtgttcttgtgtttttgcagccactattggtgttgaggttcatcctcttgatttcttcactaactgtggcaagatccgtttctactgttgggatactgctggccaagagaaatttggtggtcttagggatggttactagtaagtactttcttctcatacaaatcacttaaaaccgaccttgttaataatctagaatcatctactgtcatgctataatctagaatcttctagtgttggaagcttggttatggtttgaagctcaataagatgattgtagctagcaacatgaaaaactattgataactgttgcaaatagtttgtgtttgatacaataatgtgttctgttttgttgcagcatccatggacaatgtgctatcatcatgtttgatgtcacagcacgactgacatacaagaatgttccaacatggcaccgtgatctttgcaggtatgatgaactcactcacagaaactagcatttgttgtatgtggcaaattgctaaacagaaaatgtcatcaaatttcatggtgcagggtttgtgaaaacatcccaattgttctttgtgggaataaagttgatgtgaagaacaggcaagtcaaggccaagcaggtaacattccacaggaagaagaacctccagtattacgagatatctgccaagagcaactacaacttcgagaagccattcttgtaccttgctagaaagctcgccgggtaagaaacaattcatcaattcaaccctcattgtagttattgtgaaacaacggaaaaatgaaaattgagatgttgcttgtttgtctcagggacgctaatcttcactttgtggaatcacctgcccttgctcccccggaagttcaaatcgacttggctgctcagcagcagtaagttctctaaaactaattttgttttaatttgttgctaaggtttgagttcgaggcttttcttcaattaacgattatatatttgtaggcatgaggcggagcttgcagcagcagcaagtcagccacttcctgatgacgatgatgacaccttcgagtagagaaagagagatgtgatctgtcactgattacccgttagggcttgtctgaacttttttttgttcatggtgctatttttatgtgtccgtactttgaaatgaatcgatgacattagtaattttcatttttaagtttttaactgtcgctatgaaagtgaaaaccttttgattacaaaccttacatgcttcacaatttcaattgtatctctattaatcctagccgcgcaatctcatcaattctccacacccaacacacttaatagtttttttttacatcaatcatttcgaaaccacaagttcttagatactcaacaacatttttttttttttttctgtagccaatcgatgttctaaagatcaagaatgttgtattatttctaccacttatggagtcaccaaggatatgtgaagggttttctttgtttatatatttttttaattgcgttttaggacatctccaatagaagtatctaaatgtagatactgatctctatcaaaacagattatggatatcatactagagtacattaaaaatttgcttctaagattttgagttcttggagtcattaacgcatcgctaagggtattttcgtaactttaaataaccccaaataatattttgcttcctccccaagaacctttttgcctctttctacttccgtcggccggattcagagtcataaataaatatataaaaaaaagtttcgatttttgcttttcttcttcgattcattgcgcgaatcatccgtgatgttggtgtctagggttttatcaagagtttctcgcagcgcaggcttacgctcgtctttctcctccgtcgttactccgaagaggaatcagattccgattgttgcaagccgatttcactccctcgttcacggaacccccaacaaggttaggcttttaagctgattttacttgtaattcgttctggattttatcgtcgggtttatgctagggtttaaggggtttgtctaaacaaaagattgttatgttctgattctattgctctggtcttctttattacagtgtcacgaatttaattgtgtatgtctgaatgttaatgttttgattgctctttcatatgtcttaatttggatgtgaaattctggcaatccttgtgaatttgaaagctgagataaagctcattctaggatttgtgtacagtgaatttacttaatttggatcattttttttaatggcagcttgttgcagttccagtgtcgctccgaaaccatggaactctagatttgaatgttcttcaaaggttcggctttttttcctcttcctcagctgaaccgaagggaaatgagagtaacaccgaagtaccaaagaccggcgaaacttctgagaatgtggaggtggggaaagctacaggtgaggcaaaagattcatgtattttgacttagaataaagagagattactgtgtctaatactgaacgagtttctttttctgagttccagatgcagagattgacttcgacgatttgtcaagagacgatttagtgaagcttgtgagtgagaaggaagatcttttgaaggttcagcagaaagacataatg

SEQ ID NO: 16416 - DNA, 3000 bp, Unknown; identical to SEQ ID NO: 9987
  misc_feature (1)..( 3000): 2750-1469P.txt file - cDNA_ID_1442222; gDNA_ID_2096299; Annot_ID_195641

SEQ ID NO: 16417 - DNA, 3003 bp, Unknown
  misc_feature (1)..( 3003): 2750-1469P.txt file - cDNA_ID_1442233; gDNA_ID_1620510; Annot_ID_159082
ctaggttcttaagccctttcaccttcccccacatagttgttaaccttttgtactcttccaacatctccatcacttctcttacaatcctccctgaccctcttgctatccgcattatccttgactcgttaaacacctttggatttgagctgtccagttctgcacaaccaccaatcagttattgctcaaaactactattacttttacagagaaactttctccaaagaagatattgctctcaccttcattagtcatagagtccatcattgtcatgtatcgctttatcttcgcctggctttctttctcatgtccctctggcatcatttcagcacgcattccaggtagcatggagaaaacctacaaaccaacaccgtattttcatatttttgtcttatcagcatcacgttgtgctctttagcttactaatatttgaccagagattctgacctccttaagtgggcccatgttcagcatgttctggaactggtcgtacataattctcaatgtaaatttaccatgagagagcatttccagaagttcaggctgttgatctttaggtaccacctcttgtagtttattcacgaatccagacatatcaccatttcctattgtacatatacattatcaagattctgagtcaactcctcacaatcagtcaatgccatgatatttacctaagagacggctgacaaacggtttagcatcaaaaacttcaaactcatccatatgctctcctgttccaatgaatatgacaggactttttgtagctgcaacactaacaagatggaaaatagatgagatccacttgcccaattggaaaagcttgcatgattttcatatcaccatttcgagtacatgacaactcagcagctacaagatacttacgcgctaagagtcccaccacccttggcatgaccatccatcttagtaataattacagctcccacagcaacagtttgtttaaatgctcgagcttgttcaaacgcagtttgaccaatactgctatccataacaaatataacaagatctggtttctgtaaagtgaaaaggcagcaattagcgcctccaacataattaaggaacaagaacagaagactttaagataagagagtaaaaccgttgcttcagaaatttgacgcatttcttcaaagagagaagcttgttgtttatggcgaccactggtgtcaacaataataagatcacaattttctttcttgaacctatcaactccctcaacagcaattttcacaggatcggatcctgtgtaactgcaaagaatcacaaatcagtattagcacattctgctatcacagtatgccctggctaatggtttcaatccataagagttttttattttatatatatttcgtcatgttattgacattgaagtaaaaccaaattgacaaattgcaaaatagaaacagaagataacacaagacctcaaaatatccatttatgtatactgtacaaatctatgaaaaagacgtgagatcccttgttacagtggcactgtaaaatgaataccgaaaaaagagcgcaaagaaaaaactggcaaaagggatttaaaggtaactggagagggatatattcagtaaccgtagtggcgtagtcctcgagtgtaaaccaaacaatttcataaatggtgtaccatggctctaccgtcaaaaataaaattacatcacttttgtacgtgagctaatatatttggaaatgcaagcaccaaaggtcttccaagcacgcaggaagaaagctaataactaagatataagattttttaacactgcaaaaagggttgatgtcagtaccttccataataggggatcttagatttggtggcattctgtttcagctgatcaaaagcacctgccctgaaagtatccgcacacactagagctggtttgtacccttttcttctgatgataataagcatacttggtacaagttgtggtttttccagcacctaacacacagtcaaaaagttttggacgattttaacaatgaatttacaactacacaaaagcatagcatcttacagagagatcagatacctcaccttgtaatccgacgaacataactacactaggtttggcctttttgggagcaaatgcagactttcctggatccaacatcttacagagttcactgaagatcgcctgaaagagaatcataagaacttaatcacaaaaaaaaaaaaacgtaaacctatttaatcgaaattagacatgcagaatctgcggtaaagcctaagacctgctcaatgatacgacgcttgttatggccggctgctagatcctcaaggttgacgattttcttaatattggtctgcatctccttcacaagggggaaagaaacatcggactggagcagagcacgagtgatctcgttcaagcaatcattcagagccttttcatcgattattgtcacattgttcatcttctgtatggcgctcataatccgacctccaagctccgccaacaccattttcgctgctctctgtattcttctacctcaaattaggttgatctatatatctgttgtcggattttggaagatctagcgagacgggagaagctgagtatctttttttttttttgggggtcaaacattgagtatcttagattcatttctatattctaaaaaattataaaccggttaggatcaaaacgatgggcttaacatagctccataggcccaatagtaagttgttcccctactgaattgaattagaaccaaataagtgctaaaccaatggtacaattttcaaaaaaattcatcgtgaatacggaaccggcctaattaatttacaaaaccgcgtccgtcttcaatagtaatgggcctgcgaggcctttttatccccttcttaaaaaacgacggcgttacactactctaattccgactacggacgccgtgtcggagtcgtcagattcgaaaaacatacaaaaccaagtcgaagcttttaaaaccctaaatccccaaatcgggaactgagattccgattcgaagatg

SEQ ID NO: 16418 - DNA, 3000 bp, Unknown
  misc_feature (1)..( 3000): 2750-1469P.txt file - cDNA_ID_1442383; gDNA_ID_1621108; Annot_ID_56041
cgaatttttcaaaggtttttaaggtttttgtttttgtcttgatactaaatttatataaaaatatatatgaaaactaatctgattttagatccagcttcggtcgttaacaatttcaaacatttatgtagattttagtatccaagtttttaaaataggttttcaaattttgatattttttatttagatttataaaagtttttaaggctttttttttgttttatactaaatttaaatatatatatatatatatgataactaatcgaaatttggatacgttttgggtcgttagcataccaaacattcaacttatttttatattatttttatgtaaattttattatccatgttttttatttagattataaaaaaagcttttcaaatctttaaaaactagctgtgttttgcatccatcattagtctctagagttcttaatattcaacttgttcttttatcattgttgcatagattttagtattcgaattttcacttttagaatttttaaaacaatatttatcatttcaatagtttctatttgttggtatggataatgtggtgttctggtctgattttttgaaatattttgtttaattttgtctcatttagaattcaaatctctgttttatgcaatttacttgatcagaatttctgaatcgaaaatgtattggctgatactaaaaattaattcggttctcgttttagttacttcggtttaatttgaaactcggaccggttttcgtggattgaactcttccacgtcacctagattttgtgaaacgactactatacccttagaacactggataatttgttcttgtttcgttacttgctcagagaccttttcaaatccaaaacagaggaatataagagattaaggaaccattgtgacgatgcctaacttgctccacaccaatcaatctcacttcttcttcctccatcatccgccaatctacaccgtcagttcaaagacgcaggctttccacttcccgcaatcaatggcgccggtcaacctccgtacgaatctctccgtgcgcaggaccgtacggtgtatggcgaacccgaggagagttaagatggtggctaagcagataatgagagaactctccgacatgcttctaacagacacggttttacaacacgctgtcttacctgaagctgcacttggagctgaccgctacctctcttctctcaccaccattagcgatgttgaagtctctaatgatttgcaggtgatgagaaaccctaattggaaactcttgtgtaatgtattcatgtgggtcttgctctatttatgcagctggagtggaaatttagggtctttcgaaatatttgattccagaattgcttaacttgatcttttgattaaacttatgctatactgtggcttgcacggattgaatcctgattcttttatcagtttttgacagaagcaattcgtattatgtgttttatgatttgtgtgctggacctagccgctggtttgagagtattattacttcagagtaatgttagaagctgaaaatggtttcttttggggttgtaggtggttaaagtatatgtatccgtgtttggagatgatagagggaaagacgttgcaattgcggggttgaaatcgaaagctaagtacgttaggagtgagcttgggaagcgaatgaagttgagattgacgcctgaggtcaggtttattgaggatgaagccatggaaagaggaagcagggtaagggattctaatatatctttcacttaaagtaaactagcgtttaatgaaatttagtcttcagttagtaaatgaatgtctcaatgatgcggtcaaaatctctatcttgcattcatagtcatgagtgttgagtcatgaactagttgatcttgttgattgtcttctctgaaaatcacctcttctgtgctatattagaaaccggaacttggtggatgctgatatagtcagtcaagcaattgtaataccatgtacggttatcactatgagcagaaactgaattggagactgtttcaggtaattgcaatactggacaaaataaaagctgagaaaggaagcggtgaagggaaaacagaaccatctgactcaacagaagatgatcaagattgggaagtggatgaccccgacgaagacataatctatgtaaagtaatggtctgaagccgtttaagcaacgagtgcatattactctgatagaacgctccgcggtaagtcatcatatgtgctcaactcatctatgagcttggtttaggagagatcattcatcttagtgcatgtcagtcatatgaacagaaagcattggataatatatgctgctgaaaagcatctaatagaaacaagtgttaataaatcaacgcatgactctgaagagaatcattttccatgttttgtgtgaagttgttggacaagactaaggcggaatggagaaccggagaagatgaataccgatggtagttactcattatgaagcctgaaagcttctttggtccattactcggggatctctccaacaaattgttattttggataatatcagtgtaagggtttggtcatgagctcaagtttctgcctcgttgtttcaatgttttgtccttgtttggtgttacagttaatgtcagctctcacaatgactcaagtagaaattaaccgattcggtttcatatatgcctagatgagttgtgtacttgtgtcattgggcccgtatctcatgtatgcagtaacattttaggcccaaacaaaaatcagaacctaatccattgtttatgttacttatactacatcggtatcttagaaattgggcttttaatctaaaataggcccaagccaaaatgacgtggtcgtccttgttacagaacaagcagcgttgttcccttccactcatctgaaaacaaaaacaacaaacaaaataaataaattcaacagcgatatatcttcatctctctctctctcgccagattttcatcgactcgatttcagatttaagatctcagatacaaaactccgacatg

SEQ ID NO: 16419 - DNA, 3000 bp, Unknown; identical to SEQ ID NO: 16418
  misc_feature (1)..( 3000): 2750-1469P.txt file - cDNA_ID_1442383; gDNA_ID_1621108; Annot_ID_171695

SEQ ID NO: 16420 - DNA, 3000 bp, Unknown; identical to SEQ ID NO: 16418
  misc_feature (1)..( 3000): 2750-1469P.txt file - cDNA_ID_1442383; gDNA_ID_2926208; Annot_ID_141821

SEQ ID NO: 16421 - DNA, 3000 bp, Unknown; identical to SEQ ID NO: 16418
  misc_feature (1)..( 3000): 2750-1469P.txt file - cDNA_ID_1442383; gDNA_ID_2926208; Annot_ID_202376

SEQ ID NO: 16422 - DNA, 3000 bp, Unknown; identical to SEQ ID NO: 6455
  misc_feature (1)..( 3000): 2750-1469P.txt file - cDNA_ID_1442397; gDNA_ID_1621094; Annot_ID_170865

SEQ ID NO: 16423 - DNA, 3000 bp, Unknown; identical to SEQ ID NO: 6455
  misc_feature (1)..( 3000): 2750-1469P.txt file - cDNA_ID_1442397; gDNA_ID_2926162; Annot_ID_198822

SEQ ID NO: 16424 - DNA, 3000 bp, Unknown; identical to SEQ ID NO: 10387
  misc_feature (1)..( 3000): 2750-1469P.txt file - cDNA_ID_1442431; gDNA_ID_2213646; Annot_ID_132389

SEQ ID NO: 16425 - DNA, 3000 bp, Unknown; identical to SEQ ID NO: 10387
  misc_feature (1)..( 3000): 2750-1469P.txt file - cDNA_ID_1442431; gDNA_ID_2213646; Annot_ID_181447

SEQ ID NO: 16426 - DNA, 3000 bp, Unknown; identical to SEQ ID NO: 981
  misc_feature (1)..( 3000): 2750-1469P.txt file - cDNA_ID_1442548; gDNA_ID_1620343; Annot_ID_154060

SEQ ID NO: 16427 - DNA, 3000 bp, Unknown; identical to SEQ ID NO: 10958
  misc_feature (1)..( 3000): 2750-1469P.txt file - cDNA_ID_1442595; gDNA_ID_2214467; Annot_ID_133048

SEQ ID NO: 16428 - DNA, 3003 bp, Unknown
  misc_feature (1)..( 3003): 2750-1469P.txt file - cDNA_ID_1442595; gDNA_ID_2213639; Annot_ID_132235
acaagaatagaaaaaaagaatgggctttttctgagctaaagaaaccaaaaaaggtgaaataaacgaagaagaagaagaagcagaggaattatttgttataaaaaaggattttctaaaaagagtttcatggctggattcacggttggagttttatttagaattttaaaaattgaatcaaaccactctcttgctcttatacgacaaagacagaagagaccatcttttgtttggttagctagatcttagttcacacttaaaaacgctcagcatcatcatcaaataaagcagacaaaaacagattgtatgaattagcacatggagaaaatgggtccattggatttgatatcttattggctctatcctgatatttccatctctagattagcaattcgattggatgatgtgtataaagctgatcaacttcatgaattgttatatataaaaaaagagataactagctattctttgtgttggtgaaagaataaaaacaaattttcattttacgtcatgacttgagcataacgaaccctaataaattatgatctctcccaactctgctttaatttccactttgggcagaactcagaagcatacgtgtgaaagaaacaatacacaactagtgcagttgggaaaatcataaccctttgtttctctcagaaaccactttgatatttacgagtgatgattgttatgtaacgtctacgacacctacacatatgctagcaatcatgtgttgaaacacgatataaaacattctcctaagttcacgatataactgttttgatttctttcgacgcaatcatgtcaattaatttacacaaactactaatttaaaggaaattttaattgctttaggttttactacttaaagtagtttcatcaatatttttttggttagaggtcatgttgatagatgtcgtataggaaattcactctacaaatgcttactataagtttaggttttaactcaaaatgtttcaacaaaataaaatcatatattttttactatcctattaaaaaagagagagggtctgcctaataaagaaatgcaacaaacataagaaaagaccaagtgtgcgttgaagaacgagaaaaaatggtcttggtctcatgcacatcaccacatgttgatcttacgccgtggtcgtccacttgcctcttgtttctgaatttttgtttagttgtccctgctttttcctattttttcctgtaagaaccctaatgtttccatatgtctcatttcttgttttgcataatttaatgggctcaatgaagttaatgggcctaagagtgctacgacccaatagcacttgaagatatgtccttcaaggacttcctaagctctgttcaggtcaacatgactaactttctgcttcacaggtttatggaaattaatcaaacatttggtgttttaatttgaacttttattttctttagcatgaactcatgagacttcttgtgtcaaagaagcgactaattataaacaggggagggacaaacaacagagattcatatttgagaaaaagaaataaacaaaaaagcatgagaacatgatgaattagtattggctaaatacaggacttaacatgaaggctatggtacgcgatatatgactcaaagaatggtgcagccgcttccactttcataggtagtaacagacacaacatcacaactgttgcagtaaggtggcttgcatacatgctttggtggttcaggtgctggtggaggctttggtttttcaggctctggaggctttggtggctcaggaggttttggtggtggtccaacgctaatgatcacaggtttctgtttaatctttttcagccttgttgctacgcagaccggatccattgtccccaccacggtaagtatactatttccttcatctaatgaaatatgattcacacctgcaccaaatctcatgttcaagatgatatgttaagacttaagagcacatatttcttgagtcttttttcgttcattaccttctatctctgtgactgcttccatgattgcgctgttgcattttccacagtttatatccaccttgatctcaactttctgctcacaaccacaacaaaaactcaaacattcggtgtcggatttgaaaaggaactagtactaggatgtttaccttgacagtcatgatggattagccaagatcgagaaaaatggattaaaggaatgaagaaggaagagaagaagttattaaaaacatgtgaagacaaacagagatgacagattggaataatgttgaagcagttgaggttgtgtttggtcagtattgttaattaaataatcaagagattacaccatctacgtgcttagatgcatgtttttgtataattgaataagaggttttgggaatttgcttagttggtattcagccaccatcttatggacttacttgggacattattgtggatggaatttgtttaatcttgaaaatttatgaatatattattgagtcccatattctatctaattttgtacgttcttgaccccaaatgtttatttatttattttaatattgtatatgttatgatcatgcaaatgcatggatagagaaattccaagccggtttaaggttttggttttatttctatcccggtttggatttagctgaaccaaacaaacctcttgagttctttcaccagtaaacaaccaaaatcatcaatcatttcgagtttggtgattattagagtttgaaggtgtttttgttatggtgagtgtcatcctataaactataggctaattaatgtgtccaacaaaacaaaactctttttaaacaccaaattttaaccaacgatcagaacacctaaacctaattatggcaaaattttaaaattaacacatctatggcccctctccataattatctcttctccattggttttccattggttaaatcttctttacgtagatatataaattgagaaacaatgttaaagtattttctcaaactcatcaataacatcttacaaacaacaacaatcaacaatg

SEQ ID NO: 16429 - DNA, 3000 bp, Unknown; identical to SEQ ID NO: 10958
  misc_feature (1)..( 3000): 2750-1469P.txt file - cDNA_ID_1442595; gDNA_ID_2214467; Annot_ID_182885

SEQ ID NO: 16430 - DNA, 3003 bp, Unknown; identical to SEQ ID NO: 16428
  misc_feature (1)..( 3003): 2750-1469P.txt file - cDNA_ID_1442595; gDNA_ID_2213639; Annot_ID_181165

SEQ ID NO: 16431 - DNA, 3000 bp, Unknown; identical to SEQ ID NO: 9573
  misc_feature (1)..( 3000): 2750-1469P.txt file - cDNA_ID_1442644; gDNA_ID_1972155; Annot_ID_179453

SEQ ID NO: 16432 - DNA, 3003 bp, Unknown
  misc_feature (1)..( 3003): 2750-1469P.txt file - cDNA_ID_1442763; gDNA_ID_1621174; Annot_ID_57307
cttgggtggtgttggtgctgaagctgctacagctgcgggttatccgtatggatacttgcctcctggaacagctccaattgggaacccgggaatggttatgggtaacccgggcgcgtatccgccgaacccgtatatgggtcagccaatgtggcaacaaccaggacctgagcagcaggatcctgacaattagcttggcctaataaactgtgagttcttggtttagatttgtgctttatcgttacatggacacaaaacttgatttgattgttcttgtttgttttccgcagagccgtctaattcgaagctctccccggtggatctactcaagaagaagaatgttaatagaaaactattgcgacataaaaagtttggtgtagtagaataatttctgttttatgatccatggatttatctattgttattcagtttggtttatcttgtcatcaaactgttttcggtcaatgtaacaaattcataaactgagaattgaacttacaaaaggctagattactacttataaagttcaaagctacagtgatattgtaaactaaccagtccttacacatagttttcaaaatggcttagctcgagtttaaatagtccgtacttatccctacccataaccaaaaccaaaaaccgacgcttcctatatcactaccaaacgtttacacagtttgtttctgcaagtttttcattacgactccttcaagaattccatctgttccaaagttgccagaaaactcgtgtggatggacaggaccggggaggcggaacgagacagaaaagttaccgggagggcagagactccgcgtttgcatttcaaacacatgagaataccgtttaactcgcttcccgcctgttgtagtgactcctctaactagtaccttcccattgtcttctacttcacagctaaaatatcctgcaatatctcacactcatcaaatcaagaaactggtttagtgggatgagagatcttctagataaagcaaaaagtaactcactttcatctcttttcacaccaggaagcgatacacggaagagataagcgtcatcacattcaccaatgtccatcagtcccaccattagtccaccatgagcttcagatttcacctcaggttttgcagcaacatcactttcttcaccgctagtgcaagtacccgcattatcctctttcacaggttccacgctctcatcaatctcaaccttaacctcattagctgcaacaacgccgttacttttagttacatcaacactaaggctcaaagcaaagctatccaatcccgtaagccgcttaaaccgcgcaacacattcttctctcatacaagaagtatctggatcattaatgaacacaatgctccggataaacttaaacttatgcctaacatgggtttcagggtgcaattttcgcggaaaaagatccacgaaaagagggtaatccctgttcgaatcattgcgtttcgcattgaaatattcacgtaactttttcggcttcatgactagagacggatcaacatttctaataatgtgataatacacacgttctagctcagctctcttcataagtgagccacttaactcatctaccacaacattcttcaacgcttgaatctgaaaagctgattgctttggacgatgatgttgttttcttaaatctggtccaaagtaagttcctatgatgaaatgtaagagaaacaacttgtcttcttcaatatccaatgaaattaacacactttcttcttgttcttgagagttttcagctactaaaggagacacgatctcaggcattgtatcactcatatcctaaacacacaacacaacatcaaaagtttgattctttatgagtgtttatacaaaaagattgaaactttaatagaaaatttgaaaaatactggacatgcaataagaaattataaccaaattggataaaaattggacacatttcgtatcaaaatgggtgggaaaaaacgaaactttttaaggagatttaagaaattgaagcaaatagaaacataatttgttgataaataaacgaaattgagataaaatgttactaaccaggagtgtaaatttagggttgctgcttagtgaatttcgttgtctctcatcagagaaacagaaagcgacttgggaaaaaaactcaagacatggcaagaagagggtaaaaatggtattctttcggcactgatttgtccacgtggcgattataccaaatgtacatcttaaagaaaattaagagaaaaaaaaaaaaaaatcaacaaagcttctcggagatttttgccggcgacttctgaaacatcgtctccgatgaggtaaagtaactaatttttctcaaaaattcgtcagttttgtttctactcttgctcttatataacccaagtttgtgtattttcgtttgattctgtgaaagatttaatttttctttatgggttttgtacattttcactgattgaaattaggttacttttggctaaaagtctgaaactttgatgaaatacttgtgtgccaaacttattttcaggtttaaaacttaaacttatgtctaagatagtataatattcattacttggctaaacccttgcttacaaaattgggtcagactcatgtgtgtatctaacattgttgtgtaagaccttttcgataacataaaagaggacaaatgatgaatgttgcctcttcgtttgtctaatttgtggtcatgaaagtataagaagtttccgtttgtatgaatattcgtaagcattaatagtggttatacatcacaagacttagcttgcttattggatcttaaccaatatagttcaatctcttgctctcttactgattctagaatctagctacctctatagccttataatgtttcaaagattaagcctttttagtccgctgctgttttaaagaatcgttgtagtttcgtgagtgattctgttatatagcgaatctgagtcaagtgtatgataaaaggaattgttgtgcttcaggtcttcaagtggtctaaatgggatg

SEQ ID NO: 16433 - DNA, 3000 bp, Unknown; identical to SEQ ID NO: 11332
  misc_feature (1)..( 3000): 2750-1469P.txt file - cDNA_ID_1442899; gDNA_ID_2214490; Annot_ID_133446

SEQ ID NO: 16434 - DNA, 3000 bp, Unknown; identical to SEQ ID NO: 11332
  misc_feature (1)..( 3000): 2750-1469P.txt file - cDNA_ID_1442899; gDNA_ID_2214490; Annot_ID_183634

SEQ ID NO: 16435 - DNA, 3000 bp, Unknown; identical to SEQ ID NO: 11096
  misc_feature (1)..( 3000): 2750-1469P.txt file - cDNA_ID_1442932; gDNA_ID_2214478; Annot_ID_183196

SEQ ID NO: 16436 - DNA, 834 bp, Unknown
  misc_feature (1)..( 834): 2750-1469P.txt file - cDNA_ID_1443067; gDNA_ID_1564295; Annot_ID_149194
atacaaggaggaagaggcgtgaagcacgtgcgaatgaagatggtgctgaggagcacgtgcgctgaagaagaagtcacacgtgtgaagtgtatatattgagacttagctttctttagaagatttatgcattttgtttgtaactgcctgtgacgtatgtgtctgggtttgtgagagtaatgatctagatttgtgttttagagctctctgtatcgaacaaattgtattgactatttcagataataagttttacagttttcttgttatcagaagacctgcaatttctagattaattttcatcaattttttctccttttaatattattataaaatattatatatttttatttgcgtgatatggagaatatgatagattagctatgtgttctggtgaatcgattttgagattagctaccagaacaaatagtaaaacaacwtcgtttgcaaagtgttttttcaaatcacgcaaataaagttacatagccacagatgcagggtccgattctggtagctatgtgttttttgtattatttattttaattaaaaaacgatgttgttttactatttgacagaaaatgttattgttgactttatacgttaaattgatctgttagttgattatctaatatcttttatttggcaaaatcgaaaaaaattaataatttactttgatgattttatcattacaggtaaagttgatgctttgtttcgacacttttggcataataattttaatgacattttttcggtataaaaactataataatttaacaatatcaacaataaagtttttatttatctatctatccaattggagacgaatcatatcgagcgatg

SEQ ID NO: 16437 - DNA, 3003 bp, Unknown
  misc_feature (1)..( 3003): 2750-1469P.txt file - cDNA_ID_1443075; gDNA_ID_2214499; Annot_ID_133629
tcaaagctgaaatcaaggtgctgcctaactacgatgttgctttggtatctttccataactttctctttttgtgacttttttttttttttttttttcatttctaaattccttcatttaacttttctaaagtattgtagtattactttaaaatcaaccaaaatttatacagtattgttactatgatgtgtgtatgcatatggggtcaccgcgtttgatggtggcgtgtatttgtcaaaatggactatgcttttaattaaacgttagatctggggttctctattcttcttttttagtcataaatcataatatatacgttatgatataatattgtagcctctatgtttcgatttttgttcctcgatgtatcaatcttgaaaagaatcttagtttcattctaggtaatctcaaggtgtgaaaatcctatgtacataaatatgtaaagaattctcaaccattattcttaaaccaaaaatctctatcaaaaccggtccaacaccagaacatcttgatgatctagacaaatcagtttcttaaaaaaattattgatatgcaccactttactaagaaggagaataacaaaaaaaacaaaatgaaggtaccttgtcggtgtcacgtggggaagaacatgtgaaaacaaacgaacaataattggaagaaaaaaaaatgtgaatcttgtgatggatcaaattaggtatattctttgtagctctttagtgttcgttcactcacagcctcaggccctcagctttggtcttatccaaacgactggcccgcataacagagacattacacaatacgaatgcgtttctatattactgctccatactcaaatcgaatcctggagacagattcttattttttttgttatattcaattgtttagattactaaaagccaaaatcataaaaactttaaacgatttgattattatatcaccaaaatattggcttttaatccatgttaatactgattaacttgaaatatacttatatttttggttattggggaggaaggaatacaaataatctttttcgacactgaatagtttcctttgaatgaaagctgataaaatagtgtataagttcatttttttataacgtaattttttttttggtaatgtgaacaccctaaaaagatctccttctgatgtagaaatattatacccatacacatcgataagttagtttgtggaaagaaaaactaactaacaaaataacaccttcaattcgacaaaagagcataagtttaataaaatacctacagaaatttttgacgatgataccactaccattcgccaaaaccacaataattcaattcttctaaatgtagattctattaatatggtcgattgtcattattccaaataatttatttttttaaatgaaaaattcataactctaaatatacaaaagcaattgctgatttggattcaaattttcaaagagaacttgtagttatgcatatacataaaaaggtaagtcagtttttttttttggctaataaaaacggtaaaatcatgttattgataaaaaatttgaaaacagtaaaagaaatatgaccatatttgaaaatttacctaaaaactataatgatgtaatagtttgatttacttacatttaactaatttttaaggtctgttgatcgaactcgttaccttgaacaattagtaggacaactcaaaccactaaaccattatactttaaggatttatgtaaaatttcaaatatatatagtttagtagatgcacttatcatcacactcaccaattggatgtcaacacctggttctagctttttaattaccaaagtgaaaaaactgactttttctaaaaaaaattcgttctagatggatgctcttcaaattcgttctaaaaaaaactgacataataccatccctttaaaaacacagaattttttttatcatctctgaaacaaatcatttacagtagtaaatgtcaacacaacattaattctgtttgttgttggcatttacaattgcaaaatcattttctcatttattattcgtatttattttgtcaagaacccttgtctctaaaatattcatagaaaaagaaaagagccattaattaatggcttgaagaaagattggtgtataagcgtctacgtgacctttaattaatttacttcccccaaaaaagtcaacattcaacatgtgaataaaaatcaatattggtttctaagtaagtaagtaccatattattaaattatttattttggtaaatacgcactcaatttttctctcaacggtgtatataaacaaaaggagtctcctttggaaaaaacttgcctatcattttgccaacgaacgttctttcttcttaatcacagctcagcctgacgcaaccgctcaggctgatctcttccaatttacagccatttcccagctcagatctctgatccggtgagatctctctcaaggtaatgcccctgcaattttgcttacttctctggttgtgatatgcatgttcttcgaattttcatcgtttgtgatttgaattctcattttgtatttgctgttgttggtttttaattcgattttccggaacagattatgggatttgtattcgaatcttcgatttgatgacataatgtcccagccttttatgtttaatcttgaaatgatggacttttatccgatctgggtttaaagctggaattttgattgtgggtactattaggtttcattgatttattgcttggtccaacatttttagcagctggtattgagctcttgttgtctgaattttggaaagaactatttttgttgtatcgttttgatttatttggatctgaattcattcacctttttctctgattattgttttgtgtcggttgcatccactttgattagatctgaatgaatcatttttttatgtgctcaagttattgtatggattgttctgtttctagcatgttttggttagacattgttaagatctgacgtttgcattttcaggaaaaggagttagagcatcatcaagatg

SEQ ID NO: 16438 - DNA, 3003 bp, Unknown; identical to SEQ ID NO: 16437
  misc_feature (1)..( 3003): 2750-1469P.txt file - cDNA_ID_1443075; gDNA_ID_2214499; Annot_ID_183923

SEQ ID NO: 16439 - DNA, 3003 bp, Unknown
  misc_feature (1)..( 3003): 2750-1469P.txt file - cDNA_ID_1443114; gDNA_ID_1972172; Annot_ID_179884
ccaccaagagcaaaaccatcatgctcctgttgtggttgatgatagagactcattctcaagcattgcagctgttataaactctgagagtcaagtggatactgcagttgagatcgattctatggctctttcgacatcgtcctcgaggagaaggaatgagaatggttcgagggtttctgatgtagacagtgcagattctcgtccgcctaggagaaggagatttacttgagaaacataaataagaaaagctttcaacctggaagctgacgatgatgatgattaagaagaagataagaagaagattgtgtaactttatttttcttgtgttgctttgttgtaatttgtttttgtatttttctcgatagggatggttttttttaatcgaaaattttctttcatcttttttttcttctgacggtaaaatatcataaacctttgaatccaatatggaatgtgttcttgataactattcttataaaacaacaaacttgaaaattttaatcgatttccaaatgataattagatagcttgaaattttgttggatttgaaaatcagtaagaaaatgtagaataaactattaacctttttaaaacaaaacttttaggcaaaatgctaattttattattaagtaacatggtgtgttttttcaactttgtagactaaagcaagttagtatataaatcagttatgaagcaacgtaacaataagacactttggccgagtggttaaggcgtttgcctgctaagtaaatggggtttccccgcgagagttcgaatctctcaggtgtcgtattatttttattttcttttccttgtcccctaacttttttttttgacagatttgtttagaaacgatgattatatggtcgtagaaaaatccaatttttttttgagagtacatgtcacatgcgcacagcgacatccgacacgtctattattttctgttgaatcatctcacttcatatggttttcttcaacaattatttcacttctgattacaacaaaaaaacttatttttatactatcatatgatattttcttggcaatataaaaaaaaaaaacaccgcaaaaatacattcacacgaggggagacaaaaaataaataagaacccccacaaaaacagacatcttccaccattttcaggctttcatcatttattaaattataaagtttcttggattcttgttaacttaaatataagctgccaaatatatatcagcttacacttataatggtcctgttttaattgaatttaaccttaaatctcattggaaagtgattgacaaaattcaaaaaaattatgaggaaaaatgaaaatttgaaaagtgaaaataaaataaaaataaaaactcaaatgatgtgtgcgggaaacgagcgacgtcgcgttattcgatgcacgaactcgagccaataagatgtttttaaatctaaaaatggctattagattcgtcattacttttgtatttttccacaatttaaattgacttttgccggagatgtaacttttaaactattttactacttctttttgtttttactcataaagatcacaaagattcactcacaagcgtatgtatatctgaagcaattaaaaatgagaaaatatttgtccttttacagtttttgtttttcttctctgttacaaaaatgtaattacatctgaaaacaatactagaaaaaagaaagtaatcgagcgttgtaacgcaccataatggagaaaatagtaatacaattatgaagatagtacaaaatctcagatgaaaatatagtaaataattgtaattaaatgagataaaatcaatttctaaaaaaaaagtaaaaccaccttcgtgaattgtgattcggtgtttttaaaaagtggggaataaagacaaaacagagaccaccaccattaatggctttcttcaccgatacgaacaagacaggacacaacaaactcaatcccagcctcctcctcctccgtcttctcccttattcccttttcgtttaatcccccaattttttcaattaatccctccttttctcctcttaatctgaatccgaagcaacgcataatccataacaaagtctggaaaatttcttccgggtaagagaaaacttcttctctttcttttcaatttggggttttttattttgaaatcgggaacaaaagatccagaattacctaattccgaaatttattatcgggttggattatcgtgtgacgacgaatctagcttgctttttggggggggaaatataattctcggaaggtcaatttttttttttgcttcattttgttgtctttgaatcttttggtttatgaatggattgttttgaaattgtttcataggtcaaagagacaaagatattgttgagatttatgatattgggatttgtatttttgaacaccgtttctctatagatttctgctttaacctgatccttttaattgcaaaattgtgaaactttgcttgcacgatctttgtttagctttcacaggttagatgcgttggttcttgttctctagttagatctattttcatgtttatctctgtttagttagattgaaaagagaataggtttttgtttgttctcttggaatttttctcttttgatgtttgatagtcctgtgattgattactgtttaactgttgaagtcattggaatgtgcaaaggtctagctttgttcatagctttaggcctattgctttgtttacctatctgaaagtgcatttattgttttgcttcaaatgtttgattattttattttattctttgttgcttaagaagctataaaaagtaaaagacttgatcagctgaaccaagtatctgccccttaatctacttttttccttctcaatatatcaactatatgtattagccttctcaatataagcttgtattgctaatgattccttttttcctgcaggataataaagagatccattaggagtaaattatctgacaagagaatacaaagggcaatttcattttagttgaattagggatttgggctcgtcatg

SEQ ID NO: 16440 - DNA, 3003 bp, Unknown
  misc_feature (1)..( 3003): 2750-1469P.txt file - cDNA_ID_1443212; gDNA_ID_1621148; Annot_ID_56818
aaatacccaagacaatatattcaaaaatcgtgagatgaaatgcgatacaaaatcaaacaagatatgacatgccaatgatttttttttttttttttttttttaaatcatggtttaccggctgtgtcgaaaatacgagcagcataagcacttatcgccgaactcccacaaaattgttgcaagagcattaggcccaatccaatctaatcgttttcaacgaattaataaacaaacaaaaacaaattaatctttatttatttcactaaacaagttaaaacatttttttccgttaggacttgggagtatttcattcatacgtataggcagaatgttagatctacatacgcataaatacatgtctatctgtttattaagttgatcatcaataggtcacaaaactagataagaactcgatctcttctaaattatttgtataaatgataggtatttgatgagacttacgattaacggatgtgcgtttttcatattgaacaaatcttttagtccacttcgagattctcttctagaggtttccactgtttcctgtttcacattttaaaccgaattaatagttaaccaaaatacgtatatgttagccaaagtagtagtagtattttcggaacaaacaataatactctgatttcagctgcttcttcgagaatatcaccattttctcctcttagcctcttcaaagtaacctcaagctctcgttctctaccatacatagcctaagatgaacattaatatgtagactgtaccttttaaatataatattaccaattaaacaaataaaaaacaaactttaagtgtgtgaattaccagccatctaggtgattcaggaataaaaaataaacatatcatttggataccacatgggattgcacctagtcatagattgaaaatcaagaataagttaaataatgtgaattaagtacacacattataattttttatgatttgagatatagttcatttagagaaaaaatatagttacttaaaagagctaatgttctccaatgaaaaaagtttccggtgaagaacatgagcgatatcccaaaactttgtagaagctgcaagttcaaacgcaagataacaataataaattaaatattctgaaattataagctgtttgatataatttgtttcattcttacttgattggaaaaagagaatcctccacgaaatgctttgggcgtaatttctgctatatatacaggaacctatttgttttgatcaaatcaaatggtgtaaaacgaaattactatatcaacactttataaaagtaacaaataatttgttttcaaaacagatgataaagttaattaccacataactaatgagaccaaccccaaaccccaagaagcctcgaccaatatttaacagcattttatccttgaaaataaaccacagcaaatgaaatgttaactttattaaaaaatactaaacttgtgaaaaataaatttaaaagatggagatttggagaaacaaacatgtgcaaaggctacagcgagccaaccaaagatgcagaaaacatccgcgatccacattgtctgcgatcaaagagatgaacaaatcataacgtgtatattacgtcatcttagaaggtcctacaatatcaaaaacaaaaaaaaaaaaacagtggcataataacatttgaatacgaaacaaaatttaattacctgtcgacgaccaataactgcagcaatttttccactaaacgcggccgtaatcattcctcccaatgtcattaccgatgtgaaaaacgaatactggccaaaatataaatagaccattattttagtaaattaggagtaataattgattatcgatgtaaaaaataaaattagttattgatttggtcacacacatggatgacttacatctgcaacggaaagtcccagttcttccatgattttggactgagcaggcgatgaatatgacatcttcaaattatgatagtgcacaaaattaggccacaagttgacatcaactcaaaatcacataatattcaaataacaattttgagacaaaacagctattgaacaattaccaaattcaaaacagattttgattaaaaaaataaaaattccaatctgaggcatgttagttgagatccatgaggaacactagaaaaccaaatgaaagaaaaggaaagagtgatgatgaaatctcacagcgcagccataaacgaaagagccagtgacagcgacggaggtactaagaagaagaccacaagtgatggaagaagagcttcttgcttcttcttgattattcaccagaggtgttttcatacttccagattccatcttcttttgttccttctcctaattgcttttccctgtatttctctgttctttaatagtcttcactcttgaagcttgtatttggcagtgactcattggtcgtgtcccatgtgaacaactgttatagatatttgttgactatatatagtaagataatagaaatctctttatgtcggctatcgtataaattattgatttattcttgttgcttgatcaataaaggttacatcatagaactaaaatcatatgaaaccgaatcgatcaaccctggccatcttttaaataaccatcaatacattgggatgatcaatccacaataaatgtattgatgtaaattaaaaatatgaacttgtaacagatcaagattcagggtctaaaattatagaaagcttaataatggaggactatttcactaaaatcacttttcgtttgtacattattttcaaaaagtaaaaggagatgtacgaaccatagatcacataataattgaaagggtagatgatctgccacgttggcaatccgtgtgatctaaagtctaacaaatcacaatcaatcttagtagcctatacatatagagaagagcaaaaccctaaagcccactcatcttctcaattcccagatcatctacaatagtcatttctcttcgatttcttcaaactctcatcaaatcgtttatctgttctaaatttcgaagaagacgatg

SEQ ID NO: 16441 - DNA, 3003 bp, Unknown; identical to SEQ ID NO: 16440
  misc_feature (1)..( 3003): 2750-1469P.txt file - cDNA_ID_1443212; gDNA_ID_1621148; Annot_ID_173147

SEQ ID NO: 16442 - DNA, 3003 bp, Unknown
  misc_feature (1)..( 3003): 2750-1469P.txt file - cDNA_ID_1443214; gDNA_ID_2926132; Annot_ID_138794
aaaaaaggcacaaacatatttctcactcataatacacaaagaaagagagtagagatattttgtagtggcgttgacttgacacgactccaagttaagaagaacaagtagacaaaagatctaaagaacagaaaattctgaattttaccttagtaatagcgtcctcctgggtacagttgtttattagataaccaaaagttatggaatcaggtttaacgccagcttccttcatttgcttgacgaccattaacgcactactcacatttttcttcaaaacatacaaaagccatcagctgaaaacgatctaagagacgttgggagctcacagaaacatggacaatctctcaggtcagaatttgcaaacatgaaatgggagcttaagatattacctccctaaaatatccagccaatatacaattgaacatgctagagtttggttccaaattgaagttctttaaattaccaagcatattatatgcaccttcaaactgcacatgaaaccaaaagatatagagaaacattttgtggttagagaaacaagcgaagcagcaactgtaagaaacagcacagacatgtcctcatctgtaacatagggtttgaggaagttacatctttgattcttgtgcacaaacgtataatgctccggaagttctcagtattaggtttcacactctttgtgcacataattgaatggattcttcgcaccttaaacagcaaaagtatgaggaaatccgtttcatatatgagcagagttcaactgtatattgtctggatatagattcaagctaaatgaggatgcacaccaaatcaaactcaagaacttcatcaatggcatgtaacaatgaatgtaggatatctgcggatatcatcaaacctgcttcacccattttttcaactacatcaagagcagtgactacctacggcacagagagaatactcattatatatagcacacgaaatacagccaaatttattataaaacaagcataataggaatacctcattcgagtcacagctatacttaacaagcttttcgtacgatgtagatgaaggcataacatcaagttcttcatgcatcttgttaaattttaagattgtatcctcaacctttaattgtagaaaaccagtaaaacatggacaattaggaggcatcgattatctaaccaaagactttaacaacactaatctgccactaatattcatgagaagtccttaccgttggatttggggtgcaagtagaatagatagagatgagatcagaaacgttcttcactccttcatctacgcatgttaatgagaaacatataaaacatgctataaaaatgatgttctacaggcataaacatgttattggacaatgcagccttaccactttctcttagctcccaaaggaatctactcgcaacagaatccaatgaaaacctcccaagatattcaaatatgtttgccaataggtccgacgaacgaacttttgttatgtctacaatctctaagagcctctcaagatggtacttttggtcttttttacatagtgcaagcagataattttctgtttttttaaggatcaaaaaggttaaatctttcagagtaagagagagccacaaaacaacagagtgcacaaaactgaatattgcttaccttgcaagactgataagctttcaccgttatcaccatcaattgtactgcaaagttcctcaatcttctctccatcaccaagatggatccaaagaagcatttcatagtaaccaagtctctcaacggaaccgggactagcctccctaatcacatccttgaaactatgaaactcatctaccatatccataccaatcaaataaccaagaagaggaccataaactctttcttcaatcaaaaatccacgatctctcatagatttcaaaagctcaaaagccttctcaatatggccaagagcataatctagatcattgcttttctcagcatgctctaagtaaacaccaatcattgcattgtactctgtcacactcatctctttagctactctatcaaaagcaccaaacatagcctcagtgcctaatttctgagcagagtctctaaatatcttagcgaaacgccgtgacagaccgttctgcttgtaaacacgtctctctttcctttcacgagacaactctttcgttcttaacgaaatatcataagggatcttagtggtgaaacttggtatctttaaaaataagttcttctccaaagagcttttatctgatgttgttactgaaatgtgattcaaactatgaatgaatgagagtttgttgaagaaaatagacaaaattggcaacacataccatgtaacaatttcgatactcgatcttgtaatgatgcttcctcaagatctacacacaattttgcatgaaatcaatcgaattctaaacattacccagatacagaaaaatatcaaatttacaacgaattcattctaaagatcacatttttcttatatttgttcatatcagaaaatccgaattacctgaggaagagtttttggaagagagaagatctttgacagcttgagaagttccggcgatgtctttgttgccggaagcaattgaagattcgccggtgggtctaatacgggatttgaagactgaacttaataagcttttgttaacctttgagacaaccatgttcggatttcaagtgagattgagaagatgaagaagagcaagtttataaaaccctgaacaaaaaccccgacagggttgttctatccaattttaaaccttaggggtgataatttaatcaatcatataaattaggggtaatcatgtaaattaacaagattagttgaagaagaatcgtcaaattttgattttgtcttgtggattcttcaattcaaagattataaatttattgatgaacatcgtcaattcaaagattctctttttatcattcacgctacttcttcttcttcaatcgtcaatcgttgaatccgattcgatttgcctctcttccggcgtagcttcgacggtggcaatg

SEQ ID NO: 16443 - DNA, 3000 bp, Unknown; identical to SEQ ID NO: 554
  misc_feature (1)..( 3000): 2750-1469P.txt file - cDNA_ID_1443346; gDNA_ID_1591920; Annot_ID_151694
  misc_feature (2504)..(2504): n is a, c, g, or t

SEQ ID NO: 16444 - DNA, 102 bp, Unknown; identical to SEQ ID NO: 442
  misc_feature (1)..( 102): 2750-1469P.txt file - cDNA_ID_1443346; gDNA_ID_1591026; Annot_ID_150414

SEQ ID NO: 16445 - DNA, 3000 bp, Unknown
  misc_feature (1)..( 3000): 2750-1469P.txt file - cDNA_ID_1443346; gDNA_ID_2926234; Annot_ID_142712
agtgtaacgggttagtacattcgactcgatcttgcgtttttggtgtagctatatgtgtcctaggttcataataatatgaattagcttaagttttgacagaaaccctttatctcaatttgtgaccccagttggttaaaaggttctgaatttgtgattgcagaaagggatcaaaatctggagcctccttgaaatgtggagggtgtcagggatctggtatgaaggtgtctattaggcagcttggacctggaatgatccagcagatgcagcatgcatgtaatgaatgcaaagggacaggtgagaccatcaatgatcgggacaggtgtccacaatgcaaaggagacaaggtcattcctgagaagaaggtgcttgaagtgaatgtggagaagggaatgcaacacagtcagaagatcacatttgaaggacaagcagatgaagcggtatctactctcatacatttactccagctttgattactagtatgtttacttttcttctggagactaaccttttgttttatgtttttgtgttggtgcagcctgacactgtcactggagatatagtgtttgtccttcagcagaaagagcacccaaagttcaagagaaagggagaagacctctttgtggagcacacactttctctaaccgaagctttgtgtggcttccaatttgttctgactcacttggatggcagaagtcttctcattaaatctaatcctggggaggtcgtgaaacctggtacgtattcagatgcatcgtcatactcagattttacagttactataactgtctctgattgaaacatgatcacttatcttatgtgtttgacagattcatacaaggcaataagcgatgaaggaatgccgatataccagaggccattcatgaagggtaagctctacatccacttcacagtggagttcccggactcgttgagcccagatcagaccaaagcactggaagctgttctacctaagccgtcaacagctcagttgagtgacatggagatagatgaatgcgaggagaccacgctccacgatgtcaacattgaggatgagatgaggaggaaggcacaagctcaaagagaggcttatgatgatgacgatgaagatgatgaccatccgggtggtgctcaaagggtgcaatgtgcccagcagtaagtaactccttagagagactttgacccacatgggtttgggctccaaccaatttgtctcttgctttttcattctaagtgtattggagtctttatgggagtttggtacggtttaagaatttgcccacttcggtggaacatcgaaacttgttttctctttttcctctgactttaaaaattaaggccttattacaattttgtgttttttctttatgattaaatttgtagtaatttaatgtctaagaacatatatactgtgtgttttctatattgatatggatttaaaattcaataatttttgtgttcatgcagaacaaatgctgctatatagtctaagatgttcatatttatcctttttgttgtatatgtcaccatgttttgggtgttaactccgatgacatgtacgtacgaactacagtaaaaactctataaattagtaaaaactctataaattagtaaaaaatgtattaataatgttcggacgacgcaattttattaatttatagtgatattaatttattttataaactaatatttattaatttatcttataagttaataaaatattaatttatagaaatatttacgtaaaatataatattatattttttaaaaatgtttcttaatttaattttctatatgctttgttgtttgcatatataattatgtcagctttttatttttctttgacttctttaatttattttttggcaatatcttgtgactgtatatttacgaaattaacgtgaatgtaaacgtaaacataaacatgaaagtttaatccaatttctctttacacaaatcttagcaatgctttctcaaataaaagattttataaaatcaactatgacggatcaaatacgcaaatagttatgtgagtacaatagagatcataccagttgtattttaaaaagagttgtaattgtagcttgaacaaaaattttatataaaattagttttaaaattagcaaaaaaattgtaccaaaccaaaccaaaaattagaaaataaaataaccgaattaatactaaattttataatcaaaagaaccgaactaaatcgataccgaatcaaaatattttgggtaatcgaaaataacagaaataaaaatattttttataactattagttatttctaaactaaataattaaaaatatttaaaaatatatataatagtaaaaatattaaaaataataaaaaatatccgatatatctaaaataaccaaaaatatctaaaatattcaaaaataatcaaaatatctgaaaatattcaaaattaaatagtcgaatgtatattaaatttaaaaccgaaagaatcaaaattaaactgtaaccgaaccaaaatttcaaaataatcgaatagatattaaactttagaaaaaaaccccgataatccaatggtttcaaactgaaactgaatagataacatattaccttgcgaaacttccgtaggtcaaatgggcttaagcccatagaaccatagccacacaactgatgtggtggactggttaatgccgcgtagtcagagtcttttctggttttcgtttgaaaaaaacatcatgtaatttagaacgaatagagatagagaagcaacatggagccctggtgctggaagcagctacagctagtttagtgatgagacacgtgcacctaattctaataaataaataaatcaattcccaataagtcaaaacgactaaataaaaaacattttctctgtaaaaaaatctagaaccgttagattgttagatgtgttcagagaccgttggattccatttctttgtcaaaagactcaaaactacccaaaactcttccatcttcaccaaattctctcaatcactcatcaatg

SEQ ID NO: 16446 - DNA, 3000 bp, Unknown; identical to SEQ ID NO: 16445
  misc_feature (1)..( 3000): 2750-1469P.txt file - cDNA_ID_1443346; gDNA_ID_2926234; Annot_ID_203793

SEQ ID NO: 16447 - DNA, 3003 bp, Unknown
  misc_feature (1)..( 3003): 2750-1469P.txt file - cDNA_ID_1443575; gDNA_ID_1620821; Annot_ID_169465
ctgacaaactcgatccccaaagtgttgcttgcttttttagatatactgctgggcttgataagaaccttgttggggattttcttggaaatcatgacgaattttgtgttcaagttctcaatgagtttgctgggactttcgatttccagtacatgaatctggatactgcactccgactcttcttggaaaccttcaggttgcctggagaatcccagaaaatacagagagtgcttgaggcgttctctgaaagatactatatgcaatctcctgagattctggccaacaaggatgctgctcttgtgttatcatactctattatcatgcttaacactgatcagcacaacgttcaagtaaagaaaaagatgacagaagaggatttcattcgcaataataggcatatcaatggaggaaatgatctacctcgagaattcttgtctgaactctttcactccatctgcaacaatgagatcaggactactccagaacaaggtgcaggctttcctgaaatgactcccagccgttggattgatttgatgcataaatcaaagaaaactgctccatatattctggctgattcaagggcttatcttgaccatgatatgtttgctatcatgtctggtccaaccattgctgccatatcagtcgtttttgaccatgcagaacatgaagacgtttaccagacatgcatcgatggattcttggctatagctaaaatttctgcctgtcatcatcttgaagatgtgcttgatgatctggttgtctctctctgcaaattcacaactctgttgaatccatcatctgttgatgaacccgttcttgcatttggtgatgacgcaaaagcaaggatggctactatcacaatttttaccattgcaaacaaatatggagattatatacgtacgggttggaggaacatattggactgtatcttacggctacataaacttggacttctgccagctcgtgtagccagtgatgcagctgatgaatcagaacattcatctgagcaagggcaaggaaagcccctcgcgaattccctatcttcagctcatctacagtcaatgggaactccgaggagatcttccggattgatgggaagatttagtcagcttctttcacttgatacagaagagccaagatcacagcctactgagcaacagcttgcagctcatcaacgaacacttcaaacaattcagaaatgtcacattgacagcatatttaccgaaagcaagtttctacaagctgaatctttgttgcagcttgcgcgtgctctcatttgggctgcaggtaggccacagaaaggaaccagttctccagaggatgaggatactgcggttttctgtctggaattgcttattgcaatcactctaaacaacagagacaggatcgttctcctatggcaaggcgtctatgaacatatagctacaattgctcagtcaacggtgatgccctgcaacttagtggataaagctatttttggtctacttcggatctgccagagactacttccttataaagaaagcctagctgatgagcttttgagatctcttcagcttgtgctgaaactggatgcacgtgttgcagatgcctattgtgagcaaattgcaattgaagtcagccgtcttgtgaaagccaatgctaatcacatcaggtctcaggcgggttggagaacaatcacatccttactctccatcacagcgcggcacccagaagcttctgaatcaggatttgatgccgtatcctttgttatgtctgaaggaactcacctgtatccagccaattatgtactctgtgttgatgctgcaagacagtttgctgaatcccgcgtgggacagtccgaacgctctatccgtgcccttgatctaatgggagattcattagaatttttggctaaatgggctctctcagctaaggaaaacatgggagaagaagatttcgggaagatgtcacaagatattggggaaatgtggttaaggcttgttcaaggactaagaaaagtgtgtttagaccagagggaggatgtccgaaaccacgctttacagtcattacagaagtgtttaggcggagtagacggaatcaacctagctcatagcatgtggtctcaatgctttgacaaagtaatcttcacggttttggatgacttacttgagatagctgctgggtcacagaaagactaccgaaacatggaaggcacattgcttctcgcaatcaaacttctctccaaagtgtttcttcagcaactccaagagctatctcagttatcaaccttctgcaagctatggctcggtgttctaactcgaatggagaaatacatgaaagtgaaagtaagaggcaaaaaaagcgacaagctacaagaatcagtaccagagcttctcaaaaacatattgctggtgatgaagacgaaaggcgtgctattgcaaagaagtgctcttggtggagatagcttatgggagctaacatggcttcatgtgaataacattgcaccgtctatgcgactggagctattccctgatcaagaatcctcacaacttggtgatgatgaaaccgtatcgaatggcttatcttctcctgaaaacacaactggttcgtgaccttacaagtgagatcattaggtgagtttctttcgaatatccatataagtactgtgaaagtgaaagcttcttatgtaacacctctctacgtttttttttgtaatatataagtctttctaattcagagactcgtattaattaagcaagtttcttaattacgactttgttaatcacggacctttggaacgaggtagaaggtcttgaacatgtgtggaacccaccaaaggaaaaatatcagtagattcaggagagttgttaaattttgcctccacgagtttttttcttttcttcttgttgagtcgtttacgtcacgtcgagaattttctcttttcccgagaaaattaagaaaggatcgtttgattttctaagaagggaaagataaacagtgaattagaaagagaaggaagtttcaatg

SEQ ID NO: 16448 - DNA, 3003 bp, Unknown
  misc_feature (1)..( 3003): 2750-1469P.txt file - cDNA_ID_1444123; gDNA_ID_1620346; Annot_ID_154161
gtgatcaaccattgcgaagaatcgggaatcggtcgagcaatttggcagttattgtcagcgatgaatgaaattccggtgagttctagaaagtaccaagtggttcgatcgttggcggagagactaatcaacgataatcaaggagaaaactcagtcgccttgttggatttgaaccgtagggttttaaacgcgtcgtttcgtacaactctaagccggttagagacggcggttgagcgtaaccctaaccggagagatatagatgaaccggttcgtcgtggattaaaccgggttgtcagagctgtggttagagccgtgggagatgggtttatcggttggggtggagaagagacggcggatcagacggcggaaacgtcggagaaactggcggcggaattgctttggttggcggagaagatggcggtttatggattcgtggatgaagccgttgagaaatgggcttcggcttctaacttagcttggcttgctctttcgtgtgagccacgtcttcaatgctctttgatccaaatctctggtaaatatttatttttaccgcatgattttttaatttttcgtaaatatggtaaatactatatagaataatctctttcccaatctggaaaaaagaaagaaaataggattatactctttttctgttcaggatattctttttttattttgtatgataaaaatattttgactttccaaaacaaatttcatttttactgtgaagccttactattcaaagaagccaaggacattaaaaagggaagcgaagaagaagaaggagaggaagcaaaattgagagagataaagaagaagatgcttatttcgtggattccgttgctgtgccgagccagcaacggagctgataaaccggtgttaagaagtgcggaacgagcgtatctagagaaagtgttggagaagatgatatctgaactaaaagaagaggagcaagaacgagttctctcactctggcttcaccattacacacattgcgcttcctctgactggcctgacctcaacggctcttatgttcgttggtgccattcttctcgccagcttttgctcttaggctagtcgtctcatatatctccttgataaacacaagtagaaagttgctacaatatttgcaatagcattgatcttttgtatgtcttaatcatatgtactaagttttgccctttagaaatcacttttatcaataggaaattacttttgtccacccactgatctcatttatgttaatttcctccagaaatttcttgcatgttttgaaggtgttattataccttagggatcaagcacaaaaatgagttgtgggttcaatgttggacatggcttgataaagggccaatattgataaaatcaggtcctaacgctttgtctgttatcagatccaaatccagtccattcataccaaatttcccttgtgctagctttgggatagaaatcaaactacataatcacttacaaaaaatgaaaattgcataaaaatttagattttcatatagtattttataagagaaaaagggaaaacttaaaattaacaaagttactaaagttactaaactagtacagtaattaagtttccttgtgaaatttattttattaggtgatacttataaatatatatataatattcaatactgcctcattatccacgctcaatggtcgaatcgcacggtttagtaccattcggataacgaaaacgggtggcatgaatcctacaaggaggtagcctggaggagtcaattctgatgaagaaagttgataagacgaagagtattaagaggcaacatactacaattcctctccatgtattattcatctcgtctcaaacaacacgaaaactttttattttctttttcaaattttcttttttctgtttttgttgtttgattttcctaaacagatgattatgtgtttaataagaaatgtaatttactattaatagtctggagtgttttttttgtggtgttttttttgtgctaattttaaggttatgaaataggatgcatggtttacgccttaaacatagtattatcgacgattggttatgaacacaagaagaatattgaccaaaaatctgtaattcctacggcctatcaacaaaaaaaaaagaataagaagtaattgatgatctttcaaatgaatgttaaatgtttccaaaataaatatatataaatgttacagtttcatcgctaaatggcttgcaattcttgtgaaagtcaaagaaaattctagcgggtatcattacaatttacaatttagcctagagatcatagtatttgtgattactaaatacaaatgtgaccttatttacgtggtatgtatataatttttggaatactaaattaagtaaattttatttattttcataataagttaaccactaatcgtctcaccttaatcacatgaatttgcattagaacaaaaaaatattacataaatttttaggaacacacaaaaaaaaaaaagatgaagtatcatcgagatagttttatgtcgcaatagttaagttttaaacttaatttattttgttcattagtaataccttttaactgtaagataattttattaaaaatgaattattcgtttgtgttatgaaatataaatgcttaaatattatcaaaagtcatactttttaattattattttccaaatgataagcttatataataagtttaatggaccaacccaaaattgtaaggaagtgactttagtggaatagatacgcgatagactttgacaagaaaaaaaaaaaaaaaaagatacgcaacagagttcaataataaaataaaataaaaactttcaaagaatcaaattccgttccgaattgattcacataacaacatgcatggaagcttaataacgtggacaaatcaacattccacattttattcttttcgtagataagaacgaataatatcattctctttataaactcatcactcaaatgcatttgttgcaattgcaaaaagaaaaccaaaacaaagctcaatcatg

SEQ ID NO: 16449 - DNA, 3003 bp, Unknown
  misc_feature (1)..( 3003): 2750-1469P.txt file - cDNA_ID_1444196; gDNA_ID_1620441; Annot_ID_157187
attctccgccacttagactgatgtggaaaattgatcccccaattgataggtttatttcgcactttagaaaaagtttggaaagaaaagtagacggaactggccaaccgctgcttatcacaatctctggtgccggtggatcgtcaaaatattggaaagaagttaggggattccggcgcggatgatctgtcttagagggcgcggatgatctcctcccacgtgagggcgaagtcatgactcgacgaggccaatcacgaacgctacaggtgtgggagcgatcctggtcagggaaggctaagacggcgcctcgcatatgggtagcactactcgtactatcttgaatgttgcataacagttagaggcctagctagcattagtttgagcagctagccgaaaatcggacaccaaattattgtagactgccctgccggaagaaaagtaattaagttaaagagtgtcgagtaggaggagtcagcttattctatagatactgtaaaagccaactcatgtaggttatttaacttcacatatagcccatcagcttgtgacttcttacaaaataacaacgggggatcctttatccccctgtcttaggaatcacttccccttcattgaaaacgtcctatccatcgtctcgcaaagagacgcccaagatttatagcaagttttgacttgagcgctgccaccgatcggtggcccgttccaaatgtaaaaattttaaaatcataactttttcaaaaaaccccaaaaatttatcatctactacttttacaatttcatgatctctttcaaacgtttcgtctttactctctataaataaaataaaaatcctacattgaaaaatttacacattctcattaatcatcatcgacataggcacacggcgactccatcattctctcccattaaaaaaaatattcaggtaaaaacttttaaaaaaaagttttttttttctttttttcaattggtaggaggttaattcccaatcaattttaggtttaagcatatatagaaaaagaaaaaaaaaaactcaaattcatccattttttttgtgtttttaaattttttctttaaatgatataggagtgtagatgaaaaaattaaagccattttccaaaaaacaattgatatgcatgaaaatcctggaaatgagattcatttaatttgttgtctatatctcacttactaatcttctcctttttgtaattccaaaccctttttattactttaggttagtcacttactctcggctctctcttttcttagctctgttttttatatctaaaataactttttaaaattgttgtgcttgatttgcagagatttggagaaaaacatgattgttgaaagtttcttataatttggagaagtactatctcaagtttgttaaattagtttataattcaagagttttagaaaaccatattttttccttcatttttgtgtgtataggaaaacatacatttttttaacatagatcatttctcatgtgtctcaagacaaatagatctacaaggtcaagcaatcatatttcttttattttcagtcatcttcttaggctaactcaatttcggaaaggagatttataggaccggacaagaagaatatacagtaaagctaaacaaacaaacagagaccaaactgaatatagtgaagaagaataatgaaagaacaaattttaccgcatgttttttttttcttttgtcaatctaccgcaggccataatgtgactcttatattggcttatgatagatttttgtatgctaactcatttagcaaatcgaagtatttttagtttaattctttaatgtcttataacaacttcattaatgaatttaaatcacaaattaaagttacaattaaatcagttttaagaaaataaaccattttaatataaagtttattgtagaaaactggaacttctagattaatgtttgttaatccaatggaattttacatagttcatcattaacgaatgtgtatgtatatattatcttttaaatccaaacatttataagtaaaatattgcatgtaattaatttgatataaatctaattatccaaaatgctatcatataaataataccaatctaatttttttcccgtacgtcgtacgggtggaatactagttctataataattcaacaaaacattattactaattatttggattaataggtttaatggcggacatcgagaatccaccagtgtgtaggatttgtctagacaagggagatcttatccacctcggctgtttatgccgggatgatatgtctcttgtacataaaaaatgtgcagagatatgattcacacagcaaaatactaggtaaatttatttaataaattatatatatatatatattaaaaatattaataactatttgattaaatttttgaattacaagatttgcgagatttgcagcaccgaagctgcaaacattcacgatttcgtcacattgcgatttcggcttcctcgagagttattattttttaatttttatatttttgtaatttttatctttttctgtttatttttttttgtgttgtttcattttcgtattataactattcagatgtgattgtaaacttattttcttaaacgtgaaaattggatttatacataatgtgactgaaaaaaggttgaaaacatcatttcttaaattgcgtaaaatttatatttttaaaatttttaaaactataattagttaataataattcgatccgtagacggtttgtccgctccgaccaccgtaacaattcaaaaccgaagaaaattgtttatacgaatctattccgtaatatatatatatatatatatatatatatattataagaaatttctttttaaaaaactaatccatttaatctataataaaagtcactcgccattcgacaatatatatatatatatattcttcttcactgccagtctgaggatttccggggaaataaagaaacttgactgctaattgctaaaggtaatgcttctgagaattggaagctaatg

SEQ ID NO: 16450 - DNA, 3000 bp, Unknown; identical to SEQ ID NO: 7353
  misc_feature (1)..( 3000): 2750-1469P.txt file - cDNA_ID_1444414; gDNA_ID_1621142; Annot_ID_56645

SEQ ID NO: 16451 - DNA, 3000 bp, Unknown; identical to SEQ ID NO: 7363
  misc_feature (1)..( 3000): 2750-1469P.txt file - cDNA_ID_1444414; gDNA_ID_1621142; Annot_ID_172855

SEQ ID NO: 16452 - DNA, 3000 bp, Unknown; identical to SEQ ID NO: 14996
  misc_feature (1)..( 3000): 2750-1469P.txt file - cDNA_ID_1444487; gDNA_ID_2684240; Annot_ID_192554

SEQ ID NO: 16453 - DNA, 3000 bp, Unknown; identical to SEQ ID NO: 14996
  misc_feature (1)..( 3000): 2750-1469P.txt file - cDNA_ID_1444487; gDNA_ID_2684240; Annot_ID_137754

SEQ ID NO: 16454 - DNA, 3000 bp, Unknown; identical to SEQ ID NO: 8576
  misc_feature (1)..( 3000): 2750-1469P.txt file - cDNA_ID_1444498; gDNA_ID_1971819; Annot_ID_176073

SEQ ID NO: 16455 - DNA, 3000 bp, Unknown; identical to SEQ ID NO: 8576
  misc_feature (1)..( 3000): 2750-1469P.txt file - cDNA_ID_1444498; gDNA_ID_2926199; Annot_ID_201725

SEQ ID NO: 16456 - DNA, 557 bp, Unknown; identical to SEQ ID NO: 8402
  misc_feature (1)..( 557): 2750-1469P.txt file - cDNA_ID_1444514; gDNA_ID_1971791; Annot_ID_58044

SEQ ID NO: 16457 - DNA, 557 bp, Unknown; identical to SEQ ID NO: 8402
  misc_feature (1)..( 557): 2750-1469P.txt file - cDNA_ID_1444514; gDNA_ID_1971791; Annot_ID_175574

SEQ ID NO: 16458 - DNA, 3000 bp, Unknown
  misc_feature (1)..( 3000): 2750-1469P.txt file - cDNA_ID_1444514; gDNA_ID_2926197; Annot_ID_141341
taaatcgtttaatatgctttgtattttggtaataaacgttttgtaccatatgattatagatttaaccgtctataacttaaaatctctcgaacagaacgcaaacaacacaaaagtgtgtgttttattacccccaaaaaatgtgtatccatcgttgaatcacaatactccaaaccattggtctatataaaaccttcaattgatggtttaggattgaattttgaattggtgataacttactttcaaaaatcaggccataagatatggttaattaccctgaaaatttgaattacatgaactcattaagcactatagtttcaaaaaataaagataatccaataacatttattaatcccggaattgacaagaccagacttagttgtccgaggtatgggttcgttcaaatgacaaatattgttttgagctaatattgatattaggcctttgattaagaattgttgatgaaccattataacattaataaaattaagttcgaaatgatacagctgtaaagtagtgggaccaagttgacgtttggttaggcggtccaaatccaaatttccgtgtcagggaaaaattcatccaatgaatcatatgaatatgatatgtattatgtataattgtatataacttctagtagtaattaatagtgtttgctttaattacgtagcttatcccatctttatggtccatactattacttactcaaaactaaacactatatactatttaaacccaaactatcttctgtacttttctcaagttatgtcactatgtcagcgtaataagaaaattaacttaagttagacaaatgatattattctactacaaaacgtagttcttttatgtgattagtctaacattcgatgtaatggtttatcatttatgttacggaagaaacattcaatatatttttatgaaaacaattttatcattcttatataaactcatcgaactagctttaactaaattattcaaacgtgttagtatggaaagattacatttttctatattctatagttttatgatattgtttggcaatgatgtgaaaactcagtatgattttctgaaataatttagaccacttatttgttattacaacttttttgattggcatgaaacaggagacaaaaatagcaaaaaattagaaatatcaaacattacttgttcctttatatgaacaatgaggatgaaaatagctttggtgcttgaaaacaatacctttgagtttggaccactcatattcattagtcatttccaataaatatcagtagttgccctcatagacaaacattaaatttcttttatttgtggttcctcagatttaattctagcttaagtactgtggacagctgttttaatttgtcaaatgtgtataccaatcaaattaaatttctgaatttgatcaacaaaagaaaaccactctaaccacaaccactaatgcgtgtgcatgcacacaatatattaatatatgattctataaaataaattattttaccttattggttcttaagattaaactgaatatctacatgtatatctcagtggttccgttttttttaaagtaaaacatacaaatattacgtatataattcagctttactttggttcatattctttttttctttgggttcgtattctttctcatacaaaagtttacatcaacaattatatcatttaataggattagaaagaaaacaaataaagtagacctataggtatggttgcacatattgattagtgattaatatagttttgtagtattttgcaatgaaacatcttaattgactcccatcattaattagtgaccaaccaaaagaaattgaccttttgatttagaagaaagagaaggaaagcgtgtgtgtggttacttgcttgcaactttgctaacgcaatcaaatcttttaacccatacactatactcatacttttcttcgttgcatctattctcatttcatttcacacaataatatggagtacaatattattttaatcacatcgatcatagattcatgataatattgccaaacaaaatgtaagcttaaaaacttttaatgttaaaatgtccaaagaaaagctcgacgtgagtcaaagcaagttgtttttattccaaaaccatggtccagttacgaccccataataggatacatacaaacttgaaaagttataaaaaaattcaagaaaaaaagatattcacaagacatattctcttcatatttcaaccaaattcgagaatttgaagtcgaacaattccacacgtaatatccctctagacctctggtttcttctttccttcctataggtctcgccgtagtgatctaagctttatgaaaacatttgaatttcgagattcgtgtaaatacataaataaataacaaaagatgcaaccaattatatagcaaacgatattattaataaagattattaaattataacacaccaagaaaaattattaaagtatatcctagcatttactaatagaagagtctaattttaattttgttattgctcaaacacagtatataattttagagatttctttggtttacgtcaaaaaagtctgtctcaattttaatattttagtcggtcatcagtatcgtccaaacaatcattttacttttgttatgataaaatacggaattcctcccctaatgacaatcaaattcgaattcaaaagagctaaacaacatatttctaacaaataatatgctcatgcatgctaatatttactgtaacatttaaaaaaattaaggatggtaaacataatctgcttaccaaatgatggagatactcaagagtccagctgtaatacatcttgcatgcaatatcttgatattagcctccttttgttcacccactctcttctcttcttcttctcatttatttatatgttaaactctctcccactatatatatctctcccccttcttctctcttcctcacattcctcaccaaaccctctccaaaacacacccacacgtacgcacacacacaaagacaatg

SEQ ID NO: 16459 - DNA, 3000 bp, Unknown; identical to SEQ ID NO: 16458
  misc_feature (1)..( 3000): 2750-1469P.txt file - cDNA_ID_1444514; gDNA_ID_2926197; Annot_ID_201558

SEQ ID NO: 16460 - DNA, 2749 bp, Unknown; identical to SEQ ID NO: 4782
  misc_feature (1)..( 2749): 2750-1469P.txt file - cDNA_ID_1444629; gDNA_ID_1620732; Annot_ID_49407

SEQ ID NO: 16461 - DNA, 3003 bp, Unknown
  misc_feature (1)..( 3003): 2750-1469P.txt file - cDNA_ID_1444629; gDNA_ID_1620683; Annot_ID_48406
aagtaggataggctattacagttgcttcatgtcgtcctccatcgtctggtaacaagggacgcactcggcagaagacacgtatatttccttttaattcctgaatttacagcttctcttagctcagatcaagacagccacatatataagggaaaaaaaaatagtttcttacaagaatagtgttatgaagcttcttccgcaataactctccctcacacagttgatgctccatgtctgcaagccggtcttgtagttcgcacagtagatgcttctgctcctcaaactctgtcctagtaagagatactgatgcatctgccatctgtattcacagttataaatatctatcaaattagctatttgaaatcaagagcatctgaaggtcatgtacatcattaacttccgagataaaattgatcctcctggtaccttttgcctttcattggcgattgctaattgctgctctaacatatttaaacgctccttctgcaacgaacatgtctcctgcagggtaaaactaaatatgagacaggaatgcgaaaaatgcacaactttgaactgacatccaatactaaaacaaaaaaagtactaacctccaacgatcctgattttgctgtcaagatgtctagctcttgcgatgactttccgacattctcctggtacttcctgatctcctcagacagcttctgtgactgtacaacttggcgatcacggtcatcccggacttgttggagctcattccgaagattagtaacttccgaaagcaatgaatccttctgttttatagcgtcatcttgcaacaccttgatcacaaaaaaaggaagaggaacaagttaagaagaaatgagaccaattaaagttagcacgcgacagtaaggccagtggtagagaagaaaaacttactctgcttgaagatagttgatcctgcagcgacttgctgtgtcccctaagtgtactaagattctccaggatgcttgacttctctttttcagcacgtgtgagtgcagctcgaactgtttcaagatcagtctgaagtttgctgttatattgttgcaaacttgtgttgtactcttgcagccttttgtacatatcctcaagtgacgtcacctataaacacaaaacaatttccatattaactaacagatcatgtggaactaacacgagaaacagaaatgaaacacctaagaaaacaccagaagacatatgttatataccttctgcttggcagccattttctcttccttaactttatcaagttcttctccgagagaagcctgcactttttcagctgcaactctagcttctttttctcttctatgacattcaatggcgtcctagtgttcaataagtaagaggaaagcaaagtcaagtaatgaatttcattaaaagaaaacattcacaattagaaaaaccaggcaccaaaacccttgcctgtgtactagactcctcctttgcaagcttttcatgtagtgacactacattctcttccaactttgagatagtggcctgtagctcttcctcttttgtcctagcctccaactctataagagtcaaaaagttagggactaccaccaaatgagtgaataacttgtttcatgtaaaaaaatcgcaagaagaaaataacctttgtggttgtatttttgttctgaagattccaaagaaaccttcaaattttccttctcttggacatgggtttcatcagcttgttggaaccattttacacaaaccttcagcctcttgataatatccgtcatttgctcaatcttagcctgcagggacagagacaaaaaaaaactccttctgagtgaaaccataaatgaaaacatctacaatgcttagagcacagagcaagtgtaactcaatcaatataccttagtatcaaactttccagcttttgctctctcactgagcaacgccaatatttcatcttttgtaaagtcaactttaccacattcttcaatgctccctacatcgctgttcatcgtgacatcttgtttattcacagccgaaaaagcttgtcttctcccagtacctccttgcgtttccactttccttcgcttgtcaaatgaaatgccaccgagaccctcctttttctgaaattgaatcaaaagccacagatttttcatcagtttcataacaaaaccaatatccagctacaagaaatgtagaatcccagaacccacgaccactctaaattctattgataacacccatcagagtaagaaatgcaaagccgatgaagataacaccttaataaattcatctggtaagctcacaaacaaaacccaaaatgcgaaattaataattcgaccagtcctagggtttttctcaaacccatcctccagaacactcaaaagtgacgacgaaatgtagtggaaaagcatgaaaaagggagcttacggcgtttggactgcgaggaggacgattctggttgcgagaagccatctccgagactcaaaattgctacaaatttcttctcctttcgctcgtcaagtgcataaaaatcccaaaatggtagtcttctccctaaattcgggttaccgacaataaaatctccgattgattctcaagatcttagagaatcaaatcgaaaaccttctcaatcgaagtcgagaaactaggattcttactttttcctaatttggggatttttgtgtgtgtgtaagtgtgtgactgaagcaggagcctgtagtttcgaaattcgaacgattttgaaattagatgtggcggacttctggaattatcataacgttatcaatcaataaagtatttaaacatatgggctaactttgggcctacaattcggcccaaatgtttaaataatcttgccacgtggctttaaggcggacaaaaatgacacgtggttttatatgagtggctacaaccatatccaagttatctaaagtacagataaggcgctctgtgtcggagaatgaaaccaaccaatcatataagcataaccaataatcatcggcttcaattttcgtcttgagaaagaaaaacaaaatg

SEQ ID NO: 16462 - DNA, 2749 bp, Unknown; identical to SEQ ID NO: 4782
  misc_feature (1)..( 2749): 2750-1469P.txt file - cDNA_ID_1444629; gDNA_ID_1620732; Annot_ID_166109

SEQ ID NO: 16463 - DNA, 3003 bp, Unknown; identical to SEQ ID NO: 16461
  misc_feature (1)..( 3003): 2750-1469P.txt file - cDNA_ID_1444629; gDNA_ID_1620683; Annot_ID_164553

SEQ ID NO: 16464 - DNA, 3003 bp, Unknown; identical to SEQ ID NO: 16461
  misc_feature (1)..( 3003): 2750-1469P.txt file - cDNA_ID_1444629; gDNA_ID_2926177; Annot_ID_140403

SEQ ID NO: 16465 - DNA, 3003 bp, Unknown; identical to SEQ ID NO: 16461
  misc_feature (1)..( 3003): 2750-1469P.txt file - cDNA_ID_1444629; gDNA_ID_2926177; Annot_ID_199956

SEQ ID NO: 16466 - DNA, 3003 bp, Unknown
  misc_feature (1)..( 3003): 2750-1469P.txt file - cDNA_ID_1444645; gDNA_ID_1620744; Annot_ID_166589
caaccagcagcaccagctgcaatcaaatcctttacggttctttgaatgtttagcgcatttcctccaccggtatcttgaaaagatcaaaagaaacctatgaagagaactataaccaagcaaatccactattttcaaaaagctatgaagagaactataagcaagcaagcgactctaaccaagaaagattgatactttcaatctttggtaaagaatcaacgactcaatgtttttaaatgttttttttccttttttggttttagttaagcttcttgcattctttaatgatgtctttattatactatcaaaattttgcaactttaccagcatctgcaatgatgggtatattaggagctgacgcacacaccgaccttgccgtcgcagccatctccggtggtctaaaacgacgaaagaacacaaataaaacgaaagcatacaaacaaaaaattactaaagaaagaaaaaaaaaaaggtggcgcacgttagcaaaccgaaatcgggttttcccaggagagaagcggataaggcgtaaccggatataaaaccagcggagaatccggtttgctgcacaatagccgcggataaggcatcgtagcatccaggcataagcacaatgccttgttcttcaatcaggcgatgaaaacgtgtttggattctcgctgtcggattcaccaatctcgccgcgcgtgggttccgtcggaatgttggtgaagctgtaaggtttaagctgctacaacagagtgaagttgttttgacagccattaacatcgacattcttcgaagcctcgaacaagttttttcttctctctaatcgagttagactctgacccacacgcttgggattttaatagagagcacgtggttattatatctcggtcttatcttatggtaacagtatctcaaagactcaaaccacaaggtattgtgaaaatgttagaggcaatctaacaataaatgtataatttggttagcttaagctcatcatagaaatgggcctttatgtcaccaaacctatttcacaacataacacaagagcccacaaaacaacgactcctttctccaccagaacaagcacgacaaaggcaagagagttgcaaaagacctataagatgataacaatcgaaaagatgtaaattttgagaaaaatcaaaataaacaagaaagatttcattgtttttcactttttctccatttctactttgattttacatactctatgggccaaccaatttccaacctaatgcttgataaaaaatgattcggttttactatctcaacaaattgggcctacaacatccaatttcatgtagtgacttgtttttgcctttttcacatctcaacaaattgggtcgtttgtatttaagaaattgttacagctttttagactgaattttactttatggctttatgctctctttttccgttttgattaagggtgaatatgtaaactgttgataccatctgattttttttattttttatttttcttgtgtgcaactataccatctgaattcaattgacattttagccaaataaaaaagattggtccacttggatggctgtaaaaaagtttagtggaagtatttatagggcttgttggcaatcttcaccaacggctataatgttgatctttttaaaattaaacttaccgttcgactgtcttctcaacgatttgacaattagccgttagattagtattactgatttattattaacaaacccatttcttttcttatttttgaataagctaaatcaggccaataaaagggacaagtagagatgggctatttctttttttctctttttttttttcttatgtagtagagaaaagcctttattcttagagctatcatttaccacccattaaccagaagctgagaaatgaagcaagccgaaacgaatttgtagttttggacggtgaaattatatcgggcctttaatgggcatgtgaatagagttgagagtctttttgccccaaataatcgtttaagggagtattggctcgttggtttaatattgggccgaaacgagattgggaagaagaacaatgtcggtttaatccggttagggtcgtgggctgattctggttcacctttatagcgtaagcgaacaaacattgaaaatggggaagccaaattagttaccatccctaactcagttttgagacgtagtatgaatgagccacggcagaacctacgacctaactcgataaagtaatggttactcttggagacggaagaaagcacaaagattttgataaggctttctagttggtgaaatggtcaaaatcgctcggagagccatcataggagcggggaggtgctatctgaatatcccaatgcatcaagacaagatggattcagaaaacaaagaaattaaacaaacattttaaaatatgctcttagttttagataatataatgttttcaataccaattatcttacactgatagtggtcaagttactaatcacttttaataaattggtgatagtcaaacgtattgaaaattatcgatttaaaaatatttgaattcaaaaccattttagtgaaagtttgcattgtagttttgattatccgatcaatctttaatataattacgtcaataataactgaaatccttgaattaaccgttacccgattcataagcactactttccgatcaaaaccaatgagataaaataacttttaaaccctccaaataaaaagagaaaaccttaaaaaccaatttctgttcggtggggatgatgatcggactcggaccggtctaaccgactggattaaaaagtctttaacaacgacaagcttaaaaatttgcctcttagtggcttcaaaacgcaatcgtttcgcttaatactattattttctctatctcgtttaaccaaaaaaaaaaacgagttggaggaaaaaaaaaaccaagaaaaaagaataaaaagcaaaaagcattgagcgtctccggagattaggattaaattagggcataacccttatcggagatttgaagccatg

SEQ ID NO: 16467 - DNA, 3000 bp, Unknown; identical to SEQ ID NO: 13298
  misc_feature (1)..( 3000): 2750-1469P.txt file - cDNA_ID_1446584; gDNA_ID_2214613; Annot_ID_187447

SEQ ID NO: 16468 - DNA, 3003 bp, Unknown
  misc_feature (1)..( 3003): 2750-1469P.txt file - cDNA_ID_1447379; gDNA_ID_2926273; Annot_ID_143478
tttcgttacttaagagcaaaagaaaagagaacatatttaggtttatgatgtaaccagaactgctctgttttatctgtcgagagaaggagaacaaagtaagtgggaacttgtttttatttcactgagacacgaaagcaacgacttgtaacttctcggacactgatacccattcacaaccgacacgattgtgttatgacaccgttagacttttacatacacacttaattataggagtataacataaaacggaaattctattacaaactaacacttacaagcttacaaatttttttatgtcttccattaacatgtccatcccatctaggtgaaggatcatcaagaactatacttctataggattccttcatttccaaggtattagccaatctgatgattacaaaaaccacaagaatgcctgcgcttgtagactcggaaatttgttttatcatcgtcggagttttagagtctttgtctaatttgctaaacaataagttaaaaggaacagacattaaaaacatgcaactgaaagaagtattaagacaatatctaagcccaacactaaattatcttcaacttggacgctactagcggagataatctgtaaaaattctctgagaacgataattaacgttaattgaaagataagctgtaacgataatggaaagattcgcataaacaaattcgttccctaaaatcaaaatctcatagcaagttgtaacccatcaaaactagcgaaaacagatacataggttcaaaagaagaagagctttgagttgcaatgcagacaatgaaatggtccttcttgaaggacatgatcaactctattcttctcaagccacaagagtgcttgcagttgtagactcgctgcaaaagcaagaacaagagttggcatcaaaattcaaagtcaagagatgataatcaagaactcttagatgttcaagtacttactacttccagacgggtgggagcttcttggtcttcttgtagtaacgagcaagacgatggattctgctctctacaagaatcagcctgaatttggaatccttatctttcctgttcctctcaagatgcttgcggatagcaacagctttcttgatcaagtgatacagatcctcagggatctcaggtgcaagacctagagagaattacaaaagatctcttagtttcagtgattattcaataagcaaaaaaaaaacaaacacttacaaaagaatcaagagagattgaatagtaccatgagctttcaaaattctgagaatcttgcttccagtaacacttttcacctgtggaattccgtgagagtcacgaagaatgacaccaatctgcgatggggtcaaacccttcttcgcaaatttgcagatggactcatcaacctaattcaattatcaaaacaaacatcaggaccaatcaaagtaaacactttattctcaaagaagtatcaagtaagctaacttggagagtgcaagcaaacacatcaatattgattgcatcacagatagtactcatcaacagattaaatcactaaaacgaactatcacatcaagatcataactctatttcttaatatgtcacaaaaggattgaaactaacaaacaacaaatcacatcaataaaatcaaattcaatgacaaaccaaaactaaaatgcagaagattctcatattccaaatttcctaaccaaaattagaatcaaatcctatgttcagccatgcgagaggtagcgataacattttcgaaacacaaattgaaaatgaaatcaaacagaaatctagattaagtctacgaatcttacatcttgaggggttgtcttgagccagctcggagatgaacgcttgtacggcaaagcagatgccgagatacccttactacagaacacacaacaaaatgtaagagaacaagttttcaaatcaagactcaatcagatacgagaaggaaacgaaccctctactatgcattcgacccatgactgcgacggcgaagtgatcgtcctctcactgagatcgttcttcctcggtttctttcttacggctgctgctgcgcttcagagaatccacaaaccctaaattgcttctttatatatacctcgtatcttatggtcgtgccacaggtctttttgttccctaatctatatgggctttagttttcatacataggcccaattaaaattaaaagtctacaaaaggaggccttgaaactcatgtataaaacaacacatatgtaaacgttaccgtttcgaaaatagataaaaactttcgttagttttaaattagttagcatttagttctttttcataatcagtattagcaggtttaagtatacaattttgttagttgtttattgtgtaatgaacttttaaattgaaactatattattacaataggatgcataagaaagtatccaatcgttctgattagaagtctaatcaagtagtcatcaacctaaggataagtgaacaacaaagacgcattaatagcaaaactcattttaaacaaaaacggaacctagctaaattggtttatgcaataccgatctattcacaatgtatgtagacacaaaatagggataaacgtcattgtatacacattaacctaacaagcacgttacactacatatatatcacagtcccaaacgaatacttaacacattacacatgatcataatcaaaagtcatttaatatgttgcacagggtgtagaatttaaaccctagacctaaagaaataaattcgctatcgacattaaatgttattcaaaacaaaatctaagaatcgaagtgagtaaataaatgggaagatagaagggaatgaaggacacgtaaatgattgggttaaacaaatgtcaacgctaagtccattccttaaagccaaaccacacccatttattaacctaactgcctaaccgtcttgtcatcaccttcctttcctcaacttctctttatatagaaaccctttcttctctcgaaagccaaacatttttatcaagatattaacacaagaatacgatcatg

SEQ ID NO: 16469 - DNA, 3003 bp, Unknown; identical to SEQ ID NO: 16468
  misc_feature (1)..( 3003): 2750-1469P.txt file - cDNA_ID_1447379; gDNA_ID_2926273; Annot_ID_205205

SEQ ID NO: 16470 - DNA, 3003 bp, Unknown
  misc_feature (1)..( 3003): 2750-1469P.txt file - cDNA_ID_1447386; gDNA_ID_1972069; Annot_ID_178546
aaacagggcaatgcagagtagtagttcgaggtttgatatgatcttttcattttcgaaattgttggatgtaacttgaaagagttttagcttttgagaattgtattatgttgtaatttttgtaaactatatatataatttaaaatcttatatataaatatttaaactttaaactttttcgattgattaaataattttagataaattgtcttattttcttaactatacctaatatttttgttttttaagtgttaaattttaaatatgtgtaaactaattgattgtccaattatgtttatttagaattttaacacctatttcatttatcgaaaaacgtttttagtttttagtttatactaatttatatatcaatatttaaaaggtttttcgatgttttccatactcttgatggagtaaactgatggttccttgaaatgtggcatgaaaaaattgcaacacataaaagaatccaaggccataacattcatcattggttcacgagtcacagaatacaaaaatattatataagaaaatgaagtccaaggacaaaagaatacagaaaaggacacaaatagactatgagagagctctgaagatcttgccttggaaacacagtgagctcagcctttgcctgttctgcagtctggctcatatcataacacattgaactttaacttcttgtaacttgaacgtgcagcgatgcgtggacgtgtaacaatcaagaatcacactagtttttaacgtctatcatgtaatccggagagagattcctgaatcagcatggctgcaaatgattagttttgcagattcattgatattaggaatatgcaaaggtagcgatcagcaaatctagtaaactgacgaaaagattacctggaaaactgcacggcggatgtagtgaaagagtggagaccgtgaggtttgagaattgagtcattatttcagtgatcgtttgatgagaaacttcaagtcttacccctatctgattattttctgtctactgatcgttgacccttgtagccttcctgagaaccaactttttgaagattcatcctcttgctttttctgacccccttcaccttttgctcctcaagaagtttctggagcataggatttcctacgaacccctttgatttcatctctgaatagatctctctggccttttcaagccacccacatgacaaaaggccctgtattgtagccaagtaaagagcaggattagccactatctcaaaacgatccatttctgcccagatcttcaaagcattttctggttgctttcccttgaacaattttccaagaataagaagaaaggtctcttctgtaggacctaaatcagagatcttcatttggcctaaaacctctaaagttttctcgaaatttacagcctcaaggaatgcatgaaatgtatcaactgttggactaaggttctcactaatcatggttgccaatacattcctggctacgtccagctttccagcctcacaaagggggcgtatcatcgagttgtaggtcactgaatctggctttaatccttcctcgttcaactttttcataagcttcatagcttcatcaaagcaatcctcacgggtcaacacataaaccaaggaattgtaaacttcaatccctggagccaatccccgtttcttcatttcatcgtatagcctgagagaatcaaaaaggttcccaactttagagaagcaagagatcatgtgactgtaagagtccttgttaggcgtgatacagtaattccccatctctcgccaaatcctctttgcttcagtcacatcagtccaaatgttacaccaaccattaagaattacgttgaatccctcaacatccaccggaaagagctttttgcttgcaagcatgaactcttcagctttttcaatgtggccatgtctacacaatgcacatagcaatccttgaaatgcttcatcataaggagtgtgtttaaacttatccataatatcaaatgtccgaatagcttggctagtatcattagcagcagcatatctacatcaacaccgtcaccaagacaaccaattcaatacctagctagtaaatctttcaatttagcacaacaaaagagaaacttttatcaagaagacgaaaccgaacctgtccatcatgagaaacatggcctttctagtatcctttgaaacattaaacatatcacggatcaaacaccaagcaatgttgaacttttgatgattacccaacacccagatcatcaaatcacaagatttctgatcatcacagccgcgtttctctccccatttgaatgctagaaaggcaagcctccattcatctcttaattcccagattaaggagtagaaagaatcatgatttagatcaaatgatgagtcctccagagaagccatggcatccgcctctgactccagctcagagacctgtctgattaaatcaatcagacccttttctaacggagccaatgctgttaagttgatatcaaatgtttcggagatggttttggtggagaagcgattagaagaggcaaaatgtgggagatagcttaaaacttgagaatgcacatgacctgctcgatgaaatgctgaagagaaggaatgattttgggaaactgagctcgaaaacgacgtcgacactgcacgacgtagcagagattgatgctgaacaatccgccattgtggcgttcgcgcgagtttcctaccaatggcaacgatcgcggccatagcgagtgagtgagaaggcttaaattaatacatttcaaacatggtcttaatgggatgaggatatgaagttaatggggtcaaaaacgaatatatagataatatggggtctaatatggtaataaacaaagtaacactaatatgaatgggcctaaatagggcccattttagatttctttaaaagatccgagagagagagggatctaattcctgataaaccctagaagaagaagaagaagaagaagaagaagaagaagaagaagaagaagaagcaaaacctgtggagatcgagatg

SEQ ID NO: 16471 - DNA, 3003 bp, Unknown
  misc_feature (1)..( 3003): 2750-1469P.txt file - cDNA_ID_1447726; gDNA_ID_2926221; Annot_ID_142427
tggagtggaattgccagagagatgatggacagtatgaactggattggttgttaagcctgtcatcgatgcgaaaggtcccgtggtttgacgcatgtcaaatatcaaaaccattccattttgtagtccagcataaatatggtgagagcttttgagatcccacgagcaagaccaaggtgcagccggtagatcataagataagacagtattgtggctctccaagcttataacagataatttttttcctagagacccaaatactgcaagcccattattgtgaggggaaaggtgaagatctttaattgctctagtggtacgaggcaacaaaatatcatcaatctcacaaggcgaatgtaggctcatctgcaatatattaaaaaaaaaggtcgtatagtgcatcattttactggtataagataaaaaagaaaaatgagaggcaaaacaaaaaagcttacttgcgtaagcacaaacgttccaccaacgcctgagagcctacgggcatataataatatttgtctaccaccatctatgtcaaatatacggccaccgtttattagcagatctccctacgaaaaatggatggtaacgaactttataatttgcataatacacatcaacacaattgcaaaacaaacaatacttcaactaaaccaaaacaatgtgtctgaaggagcactaagccacacctgatgtctgaagctgcaagaaggtgactgtccatgatgctcttggtagatattatgagctgcaggcgtgcacttacaactatttagacgcagagaatttcaagaggaagaaaacaaaaaaaaggggcatgttattgtgtgattaccaggtatatatttctcctgagaagccacattagactggctttgcgaacccttagtcgtactttccatattagctattttctgcaaaaacaaaaattctagccatgacgctaactagagaaacatgtgcgacaattttatgagaaaaaaaaacaaaaataaatataatcttaggttgggagggaaattataatgggaactcttagtcaaactgagctcccttttaagagtaacgaaccaacttaatattccagactcgactagttactagtaatcttaatctgtccaagcacaaaacaaagtgacaagagtgaccacgttacaacaaactcttagagtgtaccttcttcagcttagtaacttctaatcgtagctcagcttcagttattttccattgaacttctttgttactccaactcgcagtctgcatgacaaataagaacatattaaaagctacaatactagtacgacgggctacacacatatgttcctgtcatctaacacagacataacctacatagacgacttatataatgaacacataaagaggttttagtactgaggaaaatcttattgcgaatgatttgaaagcatttcaaataacgaagcccaaaataatgcggactaatactagcaatatcatgaactatctgagcagtaaatttatcctaccttctgttcaattgaccttaacttggcctccagaaataagattctctgcaaatatcaacaaaagaatatcagattttgatactatgatttgcttttacgaatgtatttcggaaaaacaacactcattgtaagaccttgtgtgcttcatcatctactgcagcaacccgtgatgcatagattttccggacatctctcaagctacatattttgttgcacaggggacactacaaaagaagccaatgtgattcgatgagcaagataactatatccactaacagcaaagggatttgaacaacttcataacaaccacaaaccttccctccacttcgtcgctgctgaaaccacttgttgatgcaggaatatccatacaagtgtccacagggaagacaacttgtaccatcacaccagattaaaaaagaaaagagaacattagttgcactcaaaatattagacgtgaccagagtaatcaaatagttaaaagagatactaatcacaatccagttcgaaagttttgtatgacaaaaacctaatcaactaagaactatataattgccagtagcaaattactgtcataattcatcaaaattgatagacctagatcatgagattatcaaattgctaaaacaaaacataatctatacactatagcctctaaagagccaacgaattccaaagctaaattactggaatcgagaataccagacttggtgttggccaccgctggtccaaacttccatacagatagaacaagacaatccctcagtgtcaccttgtttccattcgacatcctcctgcgatccggaagacgatgaacaaacaccttgtgacctattctgattctctatcccttcactctcgttctgtgaaaccctaacaggtgagtctaggacatcgatgtattccctggtttggcgttcggaatcttcttcctcctcttcctcctcgtcttcctcttgtacttcaccatagtcgacatatgcttcctcttcgtcttcctcttcttcgtcttcttcttctccatagtgtccaaatgcttccccaaattcaatgaatcgtgcaattgtacctccgtgaccactgaaggggtaactccggcgaggcggcattaggttcgtttctgttactgtatcagatttcggaagagaagaaggccaaaacgtctcggcagagtcgcagaggtatcgaataagagagactcccggaattaataaaaataatatttaaaagtaaaaaaaaatagttaaaagataaaatattataacaatgcggtgagcgtggatcgaacacgcgaccttcagatcttcagtctgacgctctcccaactgagctatccccgcttgttgttatcatttaatatttaaactttaataatctctaaacgtaagcgtcacgtcaaattggtcgcagtcttcaatgaaatgttcgtgacttttagggaagaaaaggtgtttggagagatatggggagaagcatattttcctttttcactaagaagaaaaaaatg

SEQ ID NO: 16472 - DNA, 3003 bp, Unknown
  misc_feature (1)..( 3003): 2750-1469P.txt file - cDNA_ID_1447726; gDNA_ID_2926221; Annot_ID_203311
cccgatggaagaagcagataagagggtacggacatcagaagttggagtggaattgccagagagatgatggacagtatgaactggattggttgttaagcctgtcatcgatgcgaaaggtcccgtggtttgacgcatgtcaaatatcaaaaccattccattttgtagtccagcataaatatggtgagagcttttgagatcccacgagcaagaccaaggtgcagccggtagatcataagataagacagtattgtggctctccaagcttataacagataatttttttcctagagacccaaatactgcaagcccattattgtgaggggaaaggtgaagatctttaattgctctagtggtacgaggcaacaaaatatcatcaatctcacaaggcgaatgtaggctcatctgcaatatattaaaaaaaaaggtcgtatagtgcatcattttactggtataagataaaaaagaaaaatgagaggcaaaacaaaaaagcttacttgcgtaagcacaaacgttccaccaacgcctgagagcctacgggcatataataatatttgtctaccaccatctatgtcaaatatacggccaccgtttattagcagatctccctacgaaaaatggatggtaacgaactttataatttgcataatacacatcaacacaattgcaaaacaaacaatacttcaactaaaccaaaacaatgtgtctgaaggagcactaagccacacctgatgtctgaagctgcaagaaggtgactgtccatgatgctcttggtagatattatgagctgcaggcgtgcacttacaactatttagacgcagagaatttcaagaggaagaaaacaaaaaaaaggggcatgttattgtgtgattaccaggtatatatttctcctgagaagccacattagactggctttgcgaacccttagtcgtactttccatattagctattttctgcaaaaacaaaaattctagccatgacgctaactagagaaacatgtgcgacaattttatgagaaaaaaaaacaaaaataaatataatcttaggttgggagggaaattataatgggaactcttagtcaaactgagctcccttttaagagtaacgaaccaacttaatattccagactcgactagttactagtaatcttaatctgtccaagcacaaaacaaagtgacaagagtgaccacgttacaacaaactcttagagtgtaccttcttcagcttagtaacttctaatcgtagctcagcttcagttattttccattgaacttctttgttactccaactcgcagtctgcatgacaaataagaacatattaaaagctacaatactagtacgacgggctacacacatatgttcctgtcatctaacacagacataacctacatagacgacttatataatgaacacataaagaggttttagtactgaggaaaatcttattgcgaatgatttgaaagcatttcaaataacgaagcccaaaataatgcggactaatactagcaatatcatgaactatctgagcagtaaatttatcctaccttctgttcaattgaccttaacttggcctccagaaataagattctctgcaaatatcaacaaaagaatatcagattttgatactatgatttgcttttacgaatgtatttcggaaaaacaacactcattgtaagaccttgtgtgcttcatcatctactgcagcaacccgtgatgcatagattttccggacatctctcaagctacatattttgttgcacaggggacactacaaaagaagccaatgtgattcgatgagcaagataactatatccactaacagcaaagggatttgaacaacttcataacaaccacaaaccttccctccacttcgtcgctgctgaaaccacttgttgatgcaggaatatccatacaagtgtccacagggaagacaacttgtaccatcacaccagattaaaaaagaaaagagaacattagttgcactcaaaatattagacgtgaccagagtaatcaaatagttaaaagagatactaatcacaatccagttcgaaagttttgtatgacaaaaacctaatcaactaagaactatataattgccagtagcaaattactgtcataattcatcaaaattgatagacctagatcatgagattatcaaattgctaaaacaaaacataatctatacactatagcctctaaagagccaacgaattccaaagctaaattactggaatcgagaataccagacttggtgttggccaccgctggtccaaacttccatacagatagaacaagacaatccctcagtgtcaccttgtttccattcgacatcctcctgcgatccggaagacgatgaacaaacaccttgtgacctattctgattctctatcccttcactctcgttctgtgaaaccctaacaggtgagtctaggacatcgatgtattccctggtttggcgttcggaatcttcttcctcctcttcctcctcgtcttcctcttgtacttcaccatagtcgacatatgcttcctcttcgtcttcctcttcttcgtcttcttcttctccatagtgtccaaatgcttccccaaattcaatgaatcgtgcaattgtacctccgtgaccactgaaggggtaactccggcgaggcggcattaggttcgtttctgttactgtatcagatttcggaagagaagaaggccaaaacgtctcggcagagtcgcagaggtatcgaataagagagactcccggaattaataaaaataatatttaaaagtaaaaaaaaatagttaaaagataaaatattataacaatgcggtgagcgtggatcgaacacgcgaccttcagatcttcagtctgacgctctcccaactgagctatccccgcttgttgttatcatttaatatttaaactttaataatctctaaacgtaagcgtcacgtcaaattggtcgcagtcttcaatgaaatgttcgtgacttttagggaagaaaaggtgtttggagagatatg

SEQ ID NO: 16473 - DNA, 3000 bp, Unknown; identical to SEQ ID NO: 11702
  misc_feature (1)..( 3000): 2750-1469P.txt file - cDNA_ID_1448051; gDNA_ID_2214512; Annot_ID_133848

SEQ ID NO: 16474 - DNA, 958 bp, Unknown
  misc_feature (1)..( 958): 2750-1469P.txt file - cDNA_ID_1448128; gDNA_ID_1620528; Annot_ID_159620
gatctgataaatcaaatggtgcacgtcgtggtagacaatggagaagccagccgactaatgtctctgagatccctcctcttctgagctctgaggttcacaaaattcataactacgagaagaaagatcataaacaccgacataataaaaggtctccatctccgcaggctcaatctcagaggaaaaggtctagaactgacgactcacggaatgaacaggtctgttattttgttaatttctgttgaatagcaatcaccacgtaatacttggattggaaaattgaaaaaaatgctaaaatagtttattggatgggatattgtgaagacattctcagtgtaaagttttggtcagagggcatctttgcgttctgctttgtatgagactaacaagtcagacgtccgtattactcttatctttgtgttataaggttgccttgttccagtatttgtcctgctgtaaagccaatgtatggatactggttatggttctctgattttgttttctttgacttgtttgatagagggaagctaaacctgatgtctctcgccggctgcttcagtttgctgtgcgagatgctctagctatatcaaggccggcaaatagttcgactgaatcctcattaaaacgtcttcgttcagtggtgtccacatctactcaaaactcatctgaccctgatccagctcggaaaattcgatctgttgctagggttgtgaatcccatggctactgttatgaaagctgtcgccgaagcagccgaagatgccaagaaaccaaaatctgggagaagtgtctttgacagaattagtcattctactggatcagagaccctggaccagaatatggtacttggtgaagtttcccccaaggatgaagaatctaggaattttagccaaggtcaggaagcggtacagcttcaatacacacagagtcttgccaataatggagtgtattttgagaacatg

SEQ ID NO: 16475 - DNA, 3000 bp, Unknown; identical to SEQ ID NO: 10171
  misc_feature (1)..( 3000): 2750-1469P.txt file - cDNA_ID_1448143; gDNA_ID_2213634; Annot_ID_132098

SEQ ID NO: 16476 - DNA, 3000 bp, Unknown; identical to SEQ ID NO: 10171
  misc_feature (1)..( 3000): 2750-1469P.txt file - cDNA_ID_1448143; gDNA_ID_2213634; Annot_ID_180962

SEQ ID NO: 16477 - DNA, 3000 bp, Unknown; identical to SEQ ID NO: 14038
  misc_feature (1)..( 3000): 2750-1469P.txt file - cDNA_ID_1448161; gDNA_ID_2214694; Annot_ID_189463

SEQ ID NO: 16478 - DNA, 174 bp, Unknown
  misc_feature (1)..( 174): 2750-1469P.txt file - cDNA_ID_1448231; gDNA_ID_28141; Annot_ID_146654
  misc_feature (126)..(126): n is a, c, g, or t
gatccggatcgggttgaattaggggtccagattaaaaagtgcgaattaaagcaaacaagggaacgagggtttcagtttccctgaagaaaattgaaaggagcttaataaacagaagccgttctcctnyactttcgttcctctcacttccatacaacatttgaaacctcagctatg

SEQ ID NO: 16479 - DNA, 3000 bp, Unknown
  misc_feature (1)..( 3000): 2750-1469P.txt file - cDNA_ID_1448251; gDNA_ID_2926165; Annot_ID_199036
gcccagttcttttcactaacgttagtgaaacctgcgagtgtatccaacctgtgattaacgcccaatacataaataaactaagggctttgatggattcggctgaacattttggcatatatataagttgggatgaaaatgatcttgatttgtcattaataagcctagaaaaatagatacaagaagactcttctacgacaagacaaccaagctttcaaatatgcaagttgaaactctggtagcaatattttcatagacttttaacatgatcttctttatagggaatatatatctaaatatatcatatatatatgcatcgtgtaatggaagtaagtatatttatgtggtaataatgtacatgactaagaaaaaaatcttcagaaatcttgggagagaagggatatggaatcctgctttcggaaggttaaagcaacaatgggagaaaaaagagaaaggtcggttaagatttggtatatttcaactctacaattatatattcctctctatctgatttttaaagacttctttcagtcttttgttctcagaatataacatatatccaagtatgcccctttttctaatggtattcatgaaccggtgtttgtaagagaacatagcattcgttgtctaccaattttaccaaaagatatttggtttacttattatcgaattatatttcattcatgacagtaaaatatgtggtcactaattggtttgaataaacaatttgtttctctagtcaattggtttctctagtttccactattttccttcatattcaactacacataatgttttaggtacataatattgaaacgaaaattttgattcttttggtctcgtgaagtttttctgtttacaaatggctggcgtctgagtacagtattaaattatttaaaccttctcttctttcttacaagtactaattaagactgaaaccccaccgaaagagtaaaatatttataaaaaatttttgaaagtgagtaaaatatttttctatatattaattttatggaccatgaactaacattcctaaaatatattgtatcatgagattataagattacatttttgattttcatattttactaaattttatcaacataaaaaaatattgattagcagcagattttaatcacatgaataatagcttcaaaagctaaataaaaatcatactagatcatttttgacataatttgtatccttttacaaataatactaaattagagttacaaaagattaagtacttcagcaaaccaaatattccacttaattaattccgggttgacccaaatctatcagatctgatttttcttgcttttaaaccttagttttttacatggaccttatatttttctaagttcttcatctatagtttcggaaattgtaagctttacaagggagatatttcataccttatacacaatttggcgaagatgaatgaacttgttttaataatttcaggttacacgtaatcgattacgttgtttctaactatgtattaaaatccgttgtttctttttagcatattgctacgtgtgagaagaattttgagttaaggataatagataaattcattttcatctttataaaactttttaatgctagaaatgatttgattaccctatttctatggcaaaaaaaaaaaccctaaatattcaatgtttcacttgaaacagtgaaacagatgatcaaattaaaagagtttttgaaatctaacccatcaaaggctggagataaacccctaaatcacaaacgtactgatcattaattaaaaacgattgtgtttcatctttattataaaccataaaaaaaaaaaagaggaagctatacaccgaaaatgaaaaagaagaaaactaaagcaatagactgtaaacgaaatgatacaaacttgctatgtggactcccggaatctatttaccatacatataaaaaatcatatcaacgatccagtggacggtgggtttttaattcattattgaattgataaaaaaatcagtctctctgttaaagaagtttcaacatggcataagataatatttttggttaaagaacttgatatgatatatataatttctaagaagattatcaatcttcgtcccgaatctaaagctattgtatataatttgagatatttgaattcttgttaatattttctaagagataaaggcagaaagattcactattaaacaacattaaattcttggaaaaaacccttaattttaaagaaatcaagttctctatagaaagaagtttcaacttggtatagtataatttcttttcgtgttaaagaacttggtataatataatttaggaaaatatatcaatctgcatcccgaatccaaatatatctttgctttaacaaaaaagcatccaaaactattttataatttgagatatttgaatctttgtatacttttaaaaacagatagaggcggaaagattcattattaaataacattaagttcttggaaaaagcctaaattttatttaatcccacgtgaaagtaatcataaagatcctaagttttataaaaataaaaataaaagacaagtttattttagacaaaaaattctcttatttttagtgggttgtggtattatggtttccttctgatcatttagatgaatttcattaggttacatgttcttgacataaaaaaaaacagagcaaaattttatcatcgattggtaagattttcttatgatcacctattaaggatcgggcagaccgtccaaccgtccgtgatctttgacggatatatacattagtgagggaataatgatttactgaatttgattcaatgtttgtgataattacacttatcatatatacttttcgtaacgaatataacagcacttacaaatttattttaaatttgattccacaaaaaaaaagatcttgttaaaagtttttgctatataaactaaaacggaagatgcatagataacacactaaaagtttaaaacaaaatacctttctaatcctctttaagcttcgatg

SEQ ID NO: 16480 - DNA, 3000 bp, Unknown; identical to SEQ ID NO: 948
  misc_feature (1)..( 3000): 2750-1469P.txt file - cDNA_ID_1450208; gDNA_ID_1620340; Annot_ID_153930

SEQ ID NO: 16481 - DNA, 3003 bp, Unknown
  misc_feature (1)..( 3003): 2750-1469P.txt file - cDNA_ID_1450335; gDNA_ID_1620653; Annot_ID_47775
ggaatctaccatgggatgtggacaatggccgtctagaacagcttttcagtgagcatggtaaagttgtggaagctagggtggtttacgaccgtgagacaggtcgttcacgtggattcgggtttgtcacaatgtctgacgtggatgaactcaacgaagccatctctgccctcgatggacaggtaccctactcttcctcatatatggttatgctaatgcagtcaacatgattttgtgatgtatctcttaatcgacctttcattgtctcttgatttacagaacttggagggtagagcaatcagagtgaatgtagcggaagagcgtcctccaaggcgtggatattaaagctgagatctagctgtgccctctctctctccctatcttgcattttgtttagacgagattcttacactcttcaacgattgtttttggctgaactctgaatgtgaaagttaagctgcttctaaagtaatttgtatcgcttgtttttgatgatctcttattcatagtttaattcctaattgttggagtttcattccctcaatcgcatcgggggatacgacacatttctgggacatgccttgtcggtgacctttagatattagcaactacgaggtttaccccaaaatcggctgagaatgaaaggcttctatagcaaagcacaagttggtcgaggcctaagggaagaagactagaaaggtggtgtcatatggtgagttagtctctgccagtctagaggttcctaaagaagaggattgggatcttcattgtgttcgtaaagggatccactattttaatctcttgattggccactctctaatccaacacttaaacaaaccacacatgaaaaataagtctaaatttaaagcttattaatatggcttacttatttggcttaagaggcctaaactcatgtgatgtatcctagaaaaattatagatatacaaaattatgtatatcacctacgtctagctgaaatcttacccaccaatgccaataaaaagtttgccggagagaatacaagaaattcgtgtacaaatatacacgctccctctttatctttctttcccttgttagctaagaacaaatgataaaaagcttacaccttttatgaaatgctctctcactctcttaccctttcacccatgcccggttcttagtactgggagtgctatggcacatgacccactatgtttttttgtaaagaaaaaatcatttatattctagctccagcttacagtcctgaacttaattgatatgactcgttgaattcactaatctgaatgaaagactcttcttcgagttctgtttgtagcaagtatgtataactccaagccaaatatgaaatcatggtttcacattattagagggtacgtaatacaaactgagacaagcaaaacatgtaatgtaacaatcaaattctaaaacatatagaattagattcaactgatgatggcagagtgaaatatgcatttaaaagacaaaacaataagcaaaaagtctcgatcgtgctcgttgagtcgctttatcaaaatatggaaatgcaacatttgttgggatacacgagattaaatggtccatatattcatgcatgtgtagcaaacagcgtaagaaataatagacgcaatatataaaaccaattaaaaagagaggaaacaaagtgtatgagaatagagcgacactgatgattcattttctaggccagatcttgtcttggaactctcttatcgcccaaccttagccttagcttctcgaccagtcattccaataatttccacacttgtctctttgcttacctctattaattatttttggatccatcgttcaacgttttataaataaaataacattatttaattttcattattgtcactatcattctgcaaaaaagtgtaaaaatgtactaatatttttcttaaacaaaatgataagaatgaagtcgtccaaaatgtgttttaacctattttagtaaacctggacaaaactgacgaaaaaaaaaaaaagtaattggacaaaacaaaaatagtcatttaaaaaaattatatatcatgatatagagctacctaatgcagatacttagaaaactaagattcattattctctgataaagaaaataatcacccacgaaactactcaattataaaaaaactagtccattattaattggaatatacttaagtgtagtttttgttaacataaatggaggtgtatatatagttggtgccggcaagaaaagatggaggaaggattgtatcggtcccctaccccatgatcccgccagtaaattctttctagggcacccaaccatccacgtgtatccctcaaaccctacaacctgtaaatgtaaatccattacattacattgtatcttatttaatactgtacttacccaaaaagtttcttttaaattcaatcttaaatcatgttatagcaaacaaatctagctacacaccaacttgtggtttttagaatcttttaacttgtaatggacttttatgatgatatccatgtgaatcacacatgcatgctatgatttatcatgtgtagtaatatagtatgagaggccaatcacataaactcttaaatacaatgatattggacatgttatgttttgcatttcaaacaaaacaaagaaagaagaaatgtcgttttttgtttgtataaatccaggaataatggttttggtttttagacgcaatagagacagtatcaccattttcgttctggacaaacaaataaaattaaaattttgatacattaaaatatggttagaacttagaaaacaaatttatttaggttcataggccagtgagtctctctctctctatctctaaaagaaagagaagcaaaaaagtaaggaatgtttcctcgcaatcatcatcatcatcaccatcttcgtcttcttctttgaaacctccagcgacttcctcgtagttctctcacttatacacttactaatacagagtaacagagagagacagagtggactcttcttagagtaagatg

SEQ ID NO: 16482 - DNA, 3000 bp, Unknown; identical to SEQ ID NO: 4064
  misc_feature (1)..( 3000): 2750-1469P.txt file - cDNA_ID_1450335; gDNA_ID_1620681; Annot_ID_164435

SEQ ID NO: 16483 - DNA, 3003 bp, Unknown; identical to SEQ ID NO: 16481
  misc_feature (1)..( 3003): 2750-1469P.txt file - cDNA_ID_1450335; gDNA_ID_1620653; Annot_ID_163530

SEQ ID NO: 16484 - DNA, 3000 bp, Unknown
  misc_feature (1)..( 3000): 2750-1469P.txt file - cDNA_ID_1450335; gDNA_ID_2926186; Annot_ID_140785
atctaccatgggatgtggacaatggccgtctagaacagcttttcagtgagcatggtaaagttgtggaagctagggtggtttacgaccgtgagacaggtcgttcacgtggattcgggtttgtcacaatgtctgacgtggatgaactcaacgaagccatctctgccctcgatggacaggtaccctactcttcctcatatatggttatgctaatgcagtcaacatgattttgtgatgtatctcttaatcgacctttcattgtctcttgatttacagaacttggagggtagagcaatcagagtgaatgtagcggaagagcgtcctccaaggcgtggatattaaagctgagatctagctgtgccctctctctctccctatcttgcattttgtttagacgagattcttacactcttcaacgattgtttttggctgaactctgaatgtgaaagttaagctgcttctaaagtaatttgtatcgcttgtttttgatgatctcttattcatagtttaattcctaattgttggagtttcattccctcaatcgcatcgggggatacgacacatttctgggacatgccttgtcggtgacctttagatattagcaactacgaggtttaccccaaaatcggctgagaatgaaaggcttctatagcaaagcacaagttggtcgaggcctaagggaagaagactagaaaggtggtgtcatatggtgagttagtctctgccagtctagaggttcctaaagaagaggattgggatcttcattgtgttcgtaaagggatccactattttaatctcttgattggccactctctaatccaacacttaaacaaaccacacatgaaaaataagtctaaatttaaagcttattaatatggcttacttatttggcttaagaggcctaaactcatgtgatgtatcctagaaaaattatagatatacaaaattatgtatatcacctacgtctagctgaaatcttacccaccaatgccaataaaaagtttgccggagagaatacaagaaattcgtgtacaaatatacacgctccctctttatctttctttcccttgttagctaagaacaaatgataaaaagcttacaccttttatgaaatgctctctcactctcttaccctttcacccatgcccggttcttagtactgggagtgctatggcacatgacccactatgtttttttgtaaagaaaaaatcatttatattctagctccagcttacagtcctgaacttaattgatatgactcgttgaattcactaatctgaatgaaagactcttcttcgagttctgtttgtagcaagtatgtataactccaagccaaatatgaaatcatggtttcacattattagagggtacgtaatacaaactgagacaagcaaaacatgtaatgtaacaatcaaattctaaaacatatagaattagattcaactgatgatggcagagtgaaatatgcatttaaaagacaaaacaataagcaaaaagtctcgatcgtgctcgttgagtcgctttatcaaaatatggaaatgcaacatttgttgggatacacgagattaaatggtccatatattcatgcatgtgtagcaaacagcgtaagaaataatagacgcaatatataaaaccaattaaaaagagaggaaacaaagtgtatgagaatagagcgacactgatgattcattttctaggccagatcttgtcttggaactctcttatcgcccaaccttagccttagcttctcgaccagtcattccaataatttccacacttgtctctttgcttacctctattaattatttttggatccatcgttcaacgttttataaataaaataacattatttaattttcattattgtcactatcattctgcaaaaaagtgtaaaaatgtactaatatttttcttaaacaaaatgataagaatgaagtcgtccaaaatgtgttttaacctattttagtaaacctggacaaaactgacgaaaaaaaaaaaaagtaattggacaaaacaaaaatagtcatttaaaaaaattatatatcatgatatagagctacctaatgcagatacttagaaaactaagattcattattctctgataaagaaaataatcacccacgaaactactcaattataaaaaaactagtccattattaattggaatatacttaagtgtagtttttgttaacataaatggaggtgtatatatagttggtgccggcaagaaaagatggaggaaggattgtatcggtcccctaccccatgatcccgccagtaaattctttctagggcacccaaccatccacgtgtatccctcaaaccctacaacctgtaaatgtaaatccattacattacattgtatcttatttaatactgtacttacccaaaaagtttcttttaaattcaatcttaaatcatgttatagcaaacaaatctagctacacaccaacttgtggtttttagaatcttttaacttgtaatggacttttatgatgatatccatgtgaatcacacatgcatgctatgatttatcatgtgtagtaatatagtatgagaggccaatcacataaactcttaaatacaatgatattggacatgttatgttttgcatttcaaacaaaacaaagaaagaagaaatgtcgttttttgtttgtataaatccaggaataatggttttggtttttagacgcaatagagacagtatcaccattttcgttctggacaaacaaataaaattaaaattttgatacattaaaatatggttagaacttagaaaacaaatttatttaggttcataggccagtgagtctctctctctctatctctaaaagaaagagaagcaaaaaagtaaggaatgtttcctcgcaatcatcatcatcatcaccatcttcgtcttcttctttgaaacctccagcgacttcctcgtagttctctcacttatacacttactaatacagagtaacagagagagacagagtggactcttcttagagtaagatg

SEQ ID NO: 16485 - DNA, 3000 bp, Unknown; identical to SEQ ID NO: 16484
  misc_feature (1)..( 3000): 2750-1469P.txt file - cDNA_ID_1450335; gDNA_ID_2926186; Annot_ID_200621

SEQ ID NO: 16486 - DNA, 3003 bp, Unknown
  misc_feature (1)..( 3003): 2750-1469P.txt file - cDNA_ID_1450357; gDNA_ID_1620652; Annot_ID_47770
cgctggagatttcaccttcctcattggtgattggtttaagcatgaccacaaggtatttctttcttgaattaacaaattatgttcgttttagtatttgtcattgttatacaaggaccataattaaatgtaacattattcaggttttgaaggcaattttggatagaggacacaagctacctttgcctcaaggggttttgatcaatggccaaggagtcagttacatgtcttccatcaccgtccacaaaggttcatcctaaaaacactcaaatactttgattacgaagaaaagcattatattatctcatcatttattttttgttgtggaacaattatcaggtaaaacatacagatttaggatatcgaatgtagggcttcaacacactctgaatttcagaatccaaggtcatcagatgaagctcgttgaggtagagggaacacacacagtccagtccatgtatacctctctcgacattcacgttggacagtcttactcggtcttggtcaccatggaccagcctgaccaagactatgacattgtcgtctccacaaaatttgtcgccaaaaaactcttggtctcatctactatccactactccaactcaagacatagccactcatcttctgctaattcagtccatgttcaacaacctgccgatgaactagattggtctatcaaacaagcccggtccattaggaccaatctaaccgcgtctgggccaaggcctaaccctcagggttcgtaccactatggtcgaatcaagatttctaggactttgatattggaaagctcagcggcactagtgaagaggaagcaacgctacgccataaacggagtgtcgtttgtacctggagatactccgctaaagcttgcggattacttcaagatcaaaggcgttttcaaaatgggaagcatacctgacaagccgagaagaggaagagggatgagaatggagacgtcagtgatgggagcacaccatagagacttccttgaaatcatatttcaaaaccgcgagaagatcgtccaaagctaccacctcgatggatatagtttttgggttgttgggtgagaataattaaagattagctatatctatcgtcctctatatatagtagctagtaataatgcattgcatgcatctgatgtttgtgagtactgtccacaggacggatagaggaacatggtcaaaagcaagcagacgagagtataatcttagggatgctatttctcgctccaccactcaggtacaaatagtttctaactccatatatcttaccaaaaattttaaaaaatcatctcaaaactagtatttggttgttgtaggtatatccagaatcttggacagccgtatatgtggcactggacaatgtggggatgtggaatctaaggagtgaatattgggcgaggcaatacttgggtcaacaattctaccttcgagtttattctccaacacactctcttagagatgaatatcttttgcctaagaatgctttgttgtgtggccgagcctccaataaacacaccactccttaatgactctactcagaccaatcgtcaatggctgatttagggatatgtattttattatattgagttctttattctttataatttcaatagctagatatatgttgcacaattattatatatacttcaaaaattgtaatgtatacccaaatttgatgaaaattttactgttttgtaacggttattgctaagtttgaagttaatttttgtaggcaaatgcaatgttttcatatgaatcaaccaagtaactctaccatatcaccaagcaaaatagtatagtttgaagagagagagtaaattaaaaaaaaaaaaaaaccatacataacatattagaaacattaatttcgaataaacagactttaacgatgaaataaaaatttaaattattatccaccggtagatgtagaatgtttattggtatagaaagttgttctatttggtcaaagtttttgttgaccttgcaattacaaattacaaggctgtcaatcgaatgaaaaacatggcaatggaaaagatttgctaataatgccaagacaaacaaacgtttatttggaaggttaaaagccttttagagaagaaaaaaaaagagcagagagtcaactaattaagccatgcatgtgaatcaacaccaatccatagcatattctagtgatcagtgacattaatattgtagattactatattaacccgaattcaaagggcattaaataggtactttaatgaattgaattaagaagagtaatataatcaacggcttagattcgttgcgtgaaaaaaccataaccgaaaacagcggaatccacgaaataagtaagccaaacgcaatctagaccgtacgatgtgaatactttaatgacgccagaatactatggacagtgtagatcaggcgaatgggcgtaatacacgtggcgtaaaatcacgaggatagatatggtgcaacgtagttcaggccggtgtggtacgagagagtctgatgatccgacaaggaatacttctagtccacacaatgtcagcctttctttattttctcggtcgcttcgagattctcaattctgctctgtagaaaagatcctgatggttcacttttaatatccaacggttgatataacacaagcgcatgctcctcttatgagaacggccgtgggatataatttaatctcgccgttaaaaaatgtgacgaccgtgagttaacggtttatctgttaccaacctcatacctgtccctaacggcagaggataacgccgtgagtatggatggatgggagagaaaagaagagagagagtgtgagtgaggaaatgaaaggagtcttttttatttgttatctctcatctctctctctctttctctctgagctttgctttttatcaaacaagcatcatcatcacatccacttccttcttcttcctttctctgtctgtctcttaacccaaatgtggactctttgagccgttattagatctctgccgcttcaataatg

SEQ ID NO: 16487 - DNA, 3003 bp, Unknown; identical to SEQ ID NO: 16486
  misc_feature (1)..( 3003): 2750-1469P.txt file - cDNA_ID_1450357; gDNA_ID_1620652; Annot_ID_163501

SEQ ID NO: 16488 - DNA, 3003 bp, Unknown; identical to SEQ ID NO: 16486
  misc_feature (1)..( 3003): 2750-1469P.txt file - cDNA_ID_1450357; gDNA_ID_2926215; Annot_ID_142183

SEQ ID NO: 16489 - DNA, 3003 bp, Unknown; identical to SEQ ID NO: 16486
  misc_feature (1)..( 3003): 2750-1469P.txt file - cDNA_ID_1450357; gDNA_ID_2926215; Annot_ID_202921

SEQ ID NO: 16490 - DNA, 3000 bp, Unknown; identical to SEQ ID NO: 8763
  misc_feature (1)..( 3000): 2750-1469P.txt file - cDNA_ID_1450412; gDNA_ID_1971876; Annot_ID_176732

SEQ ID NO: 16491 - DNA, 3000 bp, Unknown
  misc_feature (1)..( 3000): 2750-1469P.txt file - cDNA_ID_1450424; gDNA_ID_2926299; Annot_ID_205638
agagtcgccggcgaagagaagcggtggaggagagcggaagggaggagagcatcggcgacggcgaggaagataggagcagagacaaggagaaaagagaagaacattgtgaacaaaacgaatatagttttgattcctctccatagagatgaccaaagctttctggttttactaatctcttctttgctaaaacccatcgaatcagagaggatttgtttaagagagaagatgtttcggagactttagagagggtttttaaaaggtggacgagacaaagtgacgatgacggcgatgatgatgctaagataaatactaagggattaatttatactattatgatttttccttgttggacttggaatatttatatgaatatagaattttggattagtttggtaatttttatctgtctatatctttttacctatggatttcttctatataatataattattaaattttattctttctataaaaatcttttgaatatttcttttctataaatgttttcgttgttgatttaattttcttgtatgtaaatcatgtttgattaatttttaaaagaatcgtaagatgaatgaaagtcaattcattcgtcgatctatcctaatttttttattgatattgacgattgatacagatccacaatttatatgttatgaaattacatcctcatacataattttgatgaatataggatttgtgggttagttaattattttccactttctatttataaatttcagttgtttctttatatgctgagtaataatacttaaaaacatcaaaagaaagctttttcgtaaatattgttgaggtaaaacttccaaaacattgcttcctaaatactttttagtaagcaaagttttttggtagatgctctgatcttccatcatctgaatctcctaaatgtctcgttaatagataaaacgctctcaaccctcttaaaattaaggatacatgtaatgttaatcataatcacacaaaaatgaggctattcatatttgaatttttatttgtattactttcttaataattttttttgtaaaattatttatttctctcattcacactaaaataaaataaaaattagccaactgaaaaatcttaaatagtaattggaaactgaaacattctagaaaaaaaaatgttgagagaaacttccagctctttgaatcctttgactggtgtattaaattaaaacaaaatagtgttcggagtcttcagatttcagcctccgtgtaataacggtaaaacctaaataacgtgaagcataaacaaaactcgataattggaacattttttctttctttcttgatttcatttgtatataatatataatggattggaatattttaaaatcatcacaatatatgtttatcgttttattaaattgttactagtaaaataatgttagacccatcctctcccgccgaagaaatgaaccgagactcgtttattcgttaacacaaacatatacgggaatggaggaaccgaccgatttcagccatgtgaccacatgcatgccgtttgttaccctaacttatatcttacggtgttatttttttttattttttttttgtttcattgtactaaaagaaacagtgaactatcgtatccaatttttttaataactattttgtgtttgattgtgatctttcattgttttctcgtctaatgctaccaaatataaagataggaaatgattgccttttcttatcaaacttttcaaaacattcgataggaatttaatttacttgtttgttataaagaaagcattgccaagttattacacaaacaaactaataaaaaagtcgtaactctttactttgtacgcgtatatctttgcgtgagtgtatgtactagtcaattgttgatcatttacaatttgtctcgtaaatggaatgatatatgtatatattgactgttaagcaaaaccttaggaaatttcggaaatcaggatatgttctaatagaatttttccaaacttatttcgtttttgttgttttccagctgaacattctaaattagatttagtgacagattattcttacctggaatatataattacaaattgtcaccaaactccgatgatgagaattaattaaccgaacaacaaatatgtgtctctttgcttgttttgtttcttgtgatagcaacggtcagatttgcatatcaataattagagtaggaccatccaaaataaagagggaggagctgaaagtcaagagtttataggcctacgaaactgaccggaagttgaagaaacttctcaagtcaagagtcaagacatatcagctcaccaaaaacatgcactcgtcgcttataaagctttctcctttgattatactccaccaaaatagtggcacaattataaacctaaaacctcacaaaaatattttacatttgtcaaaaaataaaataaatttgatattacattattgctagaattgtttatattagaaaaatattgaggctatattacgagttttatatcaaaataactagaaaagagagaatattttatcaaaatacaataatctccatttttctcacaatcatttctaattatatattacatcttttgttaatatatgtgatattagacaaatgtaatgtataactagcaatgtataaatatcaaaaataattagaaaaagaaacaaaaaattcaaattttatctttattttcatgtttaaaactgtttatcctgaaacaattgttaaaaccacaccaaaatcataattagtaatttagcctaactctatgaattcataattcgtaaatacacacactcgtagttttcaaagaatagtccaacgccagacccattacaagcccaataagtaaggcccacatcaaacaagatccgaatccgcatcttccgaacaaattgaacgcaaatttagccttgtcggaataaaccacttgttttcgctcgctcgctttctatttctcctccgatctgctgaggcgtgcgttcattacgtgcttcctcaatg

SEQ ID NO: 16492 - DNA, 3003 bp, Unknown
  misc_feature (1)..( 3003): 2750-1469P.txt file - cDNA_ID_1450444; gDNA_ID_1620708; Annot_ID_48936
cttgacctttcgaagccattgttaatccgtagttcaacatctcgttctctgtttcgttgactgaatgatccgatgactcggattctttaacgggtcggagcgagaagaagtaatgagactcatcgactttaacggcgggttcgtctttagtcaacggccattggatctcgtcaccgacgcgagcgaaaaccgcgacggtgatatctccttgaacaagacggagaatctcgagatcgccgcaagcgagctctacgctgtaggatttgtcaatgaggtggaccatcgcgccgtggattgtgagaatcacttcctccgtcgcgagaggaggcgctgaagctgagtcagaggcggtgggatcggggaagatattgttgacaagatcattgacattgattgaaggatagagattattattattagtagaagaggaggaggaagaggacttagggagaggagcaacggtggttgaagtgtcgacggttggataaagcttgggaggagttgcagagcattccattatcgccggtgatttaggaggaggaagacgaagggggaatgaagaagaacaagtgtttggttatttatatgaatttgaaaaagatttggggcagaaatagaaaaagtcagaagattagtgatggaagaaagcgaatctagtttgattaactgttaagtaaccttgctgtcggagtctcggagataggaagacgtgggcgttgcgtgtttcaagaggagcatactttttgactatgaaccgggccggtttaaccttttttttaactattttaggagattttcccgcgctttatccaaatattaaatttgtttatatccaaaatttctttttgttgagtgtatattgtacatttgtttattgttttgccaccttttttagtgtcacactaaacaagaattattcaagtaattaagatgtgtaattgactatgataatggtaatctgtattgactttgttttgccaaatgaaattctatttaacagtaggatcttacctaaaccatggaggaaaactttggtttttttttctattagaaaacataaaaggcaaaaaaaatgattaaaaggtataatcaattatgatgatgaaaattttttcttgtataaaaataagaataagatttaaagggatataacacttatactattttttgtataaaaatatatgtctactaaaaacataatattctgtcacatgttattttctattttgtttaagaagaaatcaattgcataatctcatatcactctatgaagtacaattatttgaaaattaaataatagagttttagatgtcaaaaaaaaaatcaatagagtttttagagtaattaaaactgtataaataagtaagattaagaaaatctatagattttaaaaaaaattgtgcaccaaatctaaagagtgaataagatttatttctaacatacagcttttatcccttgacaattgtcatttgacttttgagttatagcagttgtgttgtcatcttgtgtcacttttaatattaaattacaaaacaagtcctcaattttaaaataattaacatcagtgagatcagaatctaaatgttactgtactttacagttgacaatttaattttcactgtactttgtttgacccccaaaaagtactgtgttaaaaaggcaaaaaaaccaaactaaagttcgccgggaagcgaaatcgtcatcttccctgttttgctgtttagtctgcaagagaaatttcagattccggcggagaaagctataacgattcttcaatggatcccacttcttcttcttcctctgctcttagatggaaaattcttcgccaagcgcttctccgtagatctggttgatactcccctactccttctccttcctgcatccacttttcgatttcacacattcgcatagctaatggatcatctttcaattttcctcagattctcaatctcaaactgagaccaaacggatttcaaggaaagcaactcaaggattcaacttgattccttgtcaagtggtggactcttctcctcaatcggataagtctcgtgaagcatccgtttgctacacacttcccatcactggctctcccaaactctatctaacgttaggattttgatctgaagttttcatcaaatgaaacaatgttatgttttgttcgatagatttgccactcctaagagcttctttaaaatatatgcagacaaagagtggataattgtagtgatctcaatgacttcgagatatctaatcgatacaacattgataatactggacttgtctgtaagttctcaatctcactgtatctctctacttgtcacataaattagtgtctttgttggttttgaaacttagtagtacaatgttgctgctctgctctgtgtatttggcttgtttgcggctgatacaatcgctaaccaaactatatctgcttaaacttttagtctgtcaatatacaacgtggcattaaccatgattcaaacaagttaagaataaaaaagatttagttgcttagggaactctaatgctatctaaattgtgattctctgaattcatactgtcgttgttttccaggtcagtggccctctgaagaagtactagcctacttttgcaagtctcagccagaacgtttcaggtttaagactgatttgcatctgtgttctttgttcttttataacttcgtctacttaattttactcggctcattgggatgttgcagaggtaaaagagtaattgagcttggatcagggtatggattagccggtttagttattgcagctgcaaccgaggcatcagaagtggtaatctccgatggaaacccccaagtagtcaattgtatccttcatgttttgtttttgtgttgtgcatatactgtttcattagaattgtcttcttctatggctgaaacccttgagatatggaatctcggtactcaaaacgttttggattcattgatgtacttaacatccagatattaaacgtaacatagaaaccaactccatg

SEQ ID NO: 16493 - DNA, 3003 bp, Unknown
  misc_feature (1)..( 3003): 2750-1469P.txt file - cDNA_ID_1450444; gDNA_ID_2926210; Annot_ID_141946
ttgacctttcgaagccattgttaatccgtagttcaacatctcgttctctgtttcgttgactgaatgatccgatgactcggattctttaacgggtcggagcgagaagaagtaatgagactcatcgactttaacggcgggttcgtctttagtcaacggccattggatctcgtcaccgacgcgagcgaaaaccgcgacggtgatatctccttgaacaagacggagaatctcgagatcgccgcaagcgagctctacgctgtaggatttgtcaatgaggtggaccatcgcgccgtggattgtgagaatcacttcctccgtcgcgagaggaggcgctgaagctgagtcagaggcggtgggatcggggaagatattgttgacaagatcattgacattgattgaaggatagagattattattattagtagaagaggaggaggaagaggacttagggagaggagcaacggtggttgaagtgtcgacggttggataaagcttgggaggagttgcagagcattccatttatcgccggtgatttaggaggaggaagacgaagggggaatgaagaagaacaagtgtttggttatttatatgaatttgaaaaagatttggggcagaaatagaaaaagtcagaagattagtgatggaagaaagcgaatctagtttgattaactgttaagtaaccttgctgtcggagtctcggagataggaagacgtgggcgttgcgtgtttcaagaggagcatactttttgactatgaaccgggccggtttaaccttttttttaactattttaggagattttcccgcgctttatccaaatattaaatttgtttatatccaaaatttctttttgttgagtgtatattgtacatttgtttattgttttgccaccttttttagtgtcacactaaacaagaattattcaagtaattaagatgtgtaattgactatgataatggtaatctgtattgactttgttttgccaaatgaaattctatttaacagtaggatcttacctaaaccatggaggaaaactttggtttttttttctattagaaaacataaaaggcaaaaaaaatgattaaaaggtataatcaattatgatgatgaaaattttttcttgtataaaaataagaataagatttaaagggatataacacttatactattttttgtataaaaatatatgtctactaaaaacataatattctgtcacatgttattttctattttgtttaagaagaaatcaattgcataatctcatatcactctatgaagtacaattatttgaaaattaaataatagagttttagatgtcaaaaaaaaaatcaatagagtttttagagtaattaaaactgtataaataagtaagattaagaaaatctatagattttaaaaaaaattgtgcaccaaatctaaagagtgaataagatttatttctaacatacagcttttatcccttgacaattgtcatttgacttttgagttatagcagttgtgttgtcatcttgtgtcacttttaatattaaattacaaaacaagtcctcaattttaaaataattaacatcagtgagatcagaatctaaatgttactgtactttacagttgacaatttaattttcactgtactttgtttgacccccaaaaagtactgtgttaaaaaggcaaaaaaaccaaactaaagttcgccgggaagcgaaatcgtcatcttccctgttttgctgtttagtctgcaagagaaatttcagattccggcggagaaagctataacgattcttcaatggatcccacttcttcttcttcctctgctcttagatggaaaattcttcgccaagcgcttctccgtagatctggttgatactcccctactccttctccttcctgcatccacttttcgatttcacacattcgcatagctaatggatcatctttcaattttcctcagattctcaatctcaaactgagaccaaacggatttcaaggaaagcaactcaaggattcaacttgattccttgtcaagtggtggactcttctcctcaatcggataagtctcgtgaagcatccgtttgctacacacttcccatcactggctctcccaaactctatctaacgttaggattttgatctgaagttttcatcaaatgaaacaatgttatgttttgttcgatagatttgccactcctaagagcttctttaaaatatatgcagacaaagagtggataattgtagtgatctcaatgacttcgagatatctaatcgatacaacattgataatactggacttgtctgtaagttctcaatctcactgtatctctctacttgtcacataaattagtgtctttgttggttttgaaacttagtagtacaatgttgctgctctgctctgtgtatttggcttgtttgcggctgatacaatcgctaaccaaactatatctgcttaaacttttagtctgtcaatatacaacgtggcattaaccatgattcaaacaagttaagaataaaaaagatttagttgcttagggaactctaatgctatctaaattgtgattctctgaattcatactgtcgttgttttccaggtcagtggccctctgaagaagtactagcctacttttgcaagtctcagccagaacgtttcaggtttaagactgatttgcatctgtgttctttgttcttttataacttcgtctacttaattttactcggctcattgggatgttgcagaggtaaaagagtaattgagcttggatcagggtatggattagccggtttagttattgcagctgcaaccgaggcatcagaagtggtaatctccgatggaaacccccaagtagtcaattgtatccttcatgttttgtttttgtgttgtgcatatactgtttcattagaattgtcttcttctatggctgaaacccttgagatatggaatctcggtactcaaaacgttttggattcattgatgtacttaacatccagatattaaacgtaacatagaaaccaactccatg

SEQ ID NO: 16494 - DNA, 3000 bp, Unknown; identical to SEQ ID NO: 13489
  misc_feature (1)..( 3000): 2750-1469P.txt file - cDNA_ID_1450489; gDNA_ID_2214631; Annot_ID_136049

SEQ ID NO: 16495 - DNA, 3000 bp, Unknown; identical to SEQ ID NO: 14029
  misc_feature (1)..( 3000): 2750-1469P.txt file - cDNA_ID_1450508; gDNA_ID_2214693; Annot_ID_189443

SEQ ID NO: 16496 - DNA, 2514 bp, Unknown
  misc_feature (1)..( 2514): 2750-1469P.txt file - cDNA_ID_1450526; gDNA_ID_2910716; Annot_ID_193522
gcaacgctacctttgccatgtttcagaaacaactctggcgcatcgggcttcccatacaatcgatagattgtcgcacctgattgcccgacattatcgcgagcccatttatacccatataaatcagcatccatgttggaatttaatcgcggcctcgagcaagacgtttcccgttgaatatggctcataacaccccttgtattactggttatgtaagcagacagttttattgttcatgatgatatatttttatcttgtgcaatgtaacatcagagattttgagacacaacgtggctttccccccccccccctgcaggtcgaaattccgtatggcaatgaaagacggtgagctggtgatatgggatagtgttcacccttgttacaccgttttccatgagcaaactgaaacgttttcatcgctctggagtgaataccacgacgatttccggcagtttctacacatatattcgcaagatgtggcgtgttacggtgaaaacctggcctatttccctaaagggtttattgagaatatgtttttcgtctcagccaatccctgggtgagtttcaccagttttgatttaaacgtggccaatatggacaacttcttcgcccccgttttcaccatgggcaaatattatacgcaaggcgacaaggtgctgatgccgctggcgattcaggttcatcatgccgtttgtgatggcttccatgtcggcagaatgcttaatgaattacaacagtactgcgatgagtggcagggcggggcgtaatttttttaaggcagttattggtgcccttaaacgcctggttgctacgcctgaataagtgataataagcggatgaatggcagaaattcgatgataagctgtcaaacatgagaattggtcgacggcccgggcggccgcaaggggttcgcgttggccgattcattaatgcagctggcacgacaggtttcccgactggaaagcgggcagtgagcgcaacgcaattaatgtgagttagctcactcattaggcaccccaggctttacactttatgcttccggctcgtatgttgtgtggaattgtgagcggataacaatttcacacaggaaacagctatgaccatgattacgccaagctatttaggtgacactatagaatactcaagcttgcatgcctgcaggtcgactctagaggatccccgggtaccgagctcgaattccactcaggcatttcttcgaacaccttgagcgcatcatcaacagaacaacaaccagaatacatctcgataatcgcgtttcgagcgccaacatcacaaggagaaaccagagcaatgatacactcatgaacaactctagctgcttccaaagcttctggtttaccacatagtttagctaaccctaaaagtctaatcaaatccatagcataacccttattctccaagtaatctaaaacctctacagcttctctccaattcccttgaatacataacgaatcaaatgtctcaatagtaacattttgagcaacacttggagaaactgttgttttgtactgacctaccattgaattctgcgtcaatgtgtgtccggctacgtttcgcttataccgattgatcatctctgtgatctctgagctgccatactttttgaggatgtgaagatgatgagagggagctccaccacccgaacagaaccagctgtttctactctgtgtagctaacgctaaatagggtttccaaagtctgagcttcccacaccacaatcgcaccatttcacgatggtaaaactccggtgacggagaacacaaaagcaacgaatcttgcaagcaaaaaatctcagaatcgagtcgaaaccctaaaaagcatatccgtgattttgatttattggtttggtaaaccgggtccgggcaaggggagagagaccagtaatcttcctagacgcagcgttttgtagctgaagtcgtgaaattcactcttaaccaccaattttgtttttcctgattatttgtgtgttggggacagacaaaacactcaccaccctcaccaaacagtctctcttcaactctaaaatcaggttctttcttcttcttcttgtgttgtgtgtttttgattagttgagctactgatttaatacttttctgggtttttactgttactgaatcaatgtttgaaagttttaattttggatttttctgttaatttgctcatcccatatgatgttgtatgaatttctgggttcgatgttgattagtgcaaattagcttaggtggagaatttaggctattaccgtcttcttcaaagctaattgtatattcgtaagctaattagaaaagaatttcagaatcttgttgtatataatcccaaggctaggactaattttgattcatagatagatgcttaggtttcagatttagagaaaatgcaagctcatttacaagccaagacacataactaacctaaggctgatcatagcatattaataaggctgaaaaatctcattttgttgagaacatttctttaggtggcaaaacaaaatcaatg

SEQ ID NO: 16497 - DNA, 3003 bp, Unknown
  misc_feature (1)..( 3003): 2750-1469P.txt file - cDNA_ID_1450549; gDNA_ID_2926231; Annot_ID_203680
acattcgaataaggttcatatcaacaaccttatacctgcaaattcacaaaataaaactaaataaatctacacaatcctataatgttcgttctcggatttagatcaagattcgagttttgtcgaagatttttgggtgagggtttaactcgcaagatagagataggtagcgagtgcatcgcgggaactggtaaaacttattaaaaagtaacggaccggaaaattaaaagacccgtctaaaagcccaccaatagtaatgcatacaagtaacacgtggcaggtatggttgaccgagtgagtaacagaacgtgagaaaaccgacccgctaaataagaacccgcccaatataataagctttctccttaacttctgcctcacgcaaaaaaaaaaacttcctataaaacctcatctcctgcgttctctaactacttctcacctatctgacaagaaaagaaaccctaaacaacataaaaagaaacctaaaatccatacaggagacattcaaagccaatcatgccttggtcaaagttcacaaaggtagctctaggtctaggagctgccatagcggctgtgagatcaacaatgttcaccgttgatggtggccagagagctgttatgttccaccgattcgaagggattctagaagaaccagtaggagaagggacacatcgtaagattccgtgggtgcaaaagccgtatatcttcgacattcggaccaaaccctacaaaatcaataccgactctggaactaaggatcttcagatggtcaacctcacacttcgtgttatgtttcgccctgatgtaagttcccgcgaatatccaaaaaatttcactaataagattttgtgatatatatgtaaaataatatataactgttttccgtgggttcgtgttaggtttcgcgcctctcgtatatataccaaaacttaggtctcgactatggtgaaaaggtcctaccagcgatcgggacgaggtggttaaagcggtggtggctcagttcaacgctgacgagctcttaacagaacgtccacaggtctcagctcttatacgcgaaacgttgatcaagcgagctaaggagttcaacattgttctcgatgacgtgtcgatcactggtctctcatacggtaaagagttctcacttgcggtggagcggaagcaggtggcacagcaagaagctgagcggtccaagttcgtagtggcaaaggctgatcaggagagacgagcggctgtgattagagcagaaggagagagcgaggcggctcgggttatatcgaaagcgactgcaggggctgggatggggttgatcaagctcagaagggtcgaggcggctagagaggttgcgattacgctctctaattctcccaatgtcgtctatttgccaagtggtgggaatatgttgtttgcaatgaacggtccaagcaaagttgttgcttgaattagttgcaaaaatatggtgttcaatggttatattgatttgtgtgttttaagattttcatttttttatatagtttcctagtattggatcaccctagtatactccagttgagactgttcttgcgagtctgagactcgcacacatgacacatgacacatctactgttaagtcgacattgacatcaaattaaacaatcactgtgccaatcaaacttatgcatagacctagagataattaagtagtccaagttcaaaggttgatctaacctggatcagtgcccttggtagctatggcacatacttcctcactagggaaaatgggagctgattatccagcagctttcgattagatatcaacaaacaaaatgcaaattaggttatcttagaaagaaaaaaaaacaagctattcatcggatcacaagtcacaagtgtcacctcgaaagaaacttgggcccatctatattatcttatgggccttatcgaccgattcaaatattgcaaattagtgtcgttaaccttttttgaaaacatacggccattagtgacaatttaattaatattctacaaattcgagcagtgtcttctacatttctttgtaaagtctttggtttttaattttaaggtcaagttcaccatgagcgaccaaagttttgaatttttcaaggtttttattttcattttatcgttgtatggagaaagtttcttatatcttcatttgaacattgaatagaattattaaacattataattcaaggtaggatggtcaaacaattattctagatttccctcttaaattcccaaatttaacataatttaagcttttggtaaccaaaaatctaacatcttacaaaatttaataaatgtttttggcccaaagaaaatttatagtgctggcaaaagaaaaattataatgaatgtgctcttaattaaataaccaagatgagttgattaattatggattttgtaacaaaataaataatttaaggtgctgtcattttgcccacacgtctatgattaaaaacataatgaagtgtcaataatctctatgattaatagttttggaatcttactcaataagttccaatttataaaatcagtgaatagcaaagatatataaataatacgcaaagagaaaagaaagaaagaaaaaaaaaactttcagcatttgtacgtttctagaattttacaaatcacaaaagcaagagagaacattcgtgttacggtaaccgcgtttcagaggatcattttctcatatctctctcgtagccaatgacactttctccacaatcctctctctttcttcttcgtcgtcatcatttgattcttctctgtaaattactctgatttttgtagaaatcgaaactgggcttgatcaattttgactctttgcatccaatttcgattctaatctccgtaattgttctccgaatcgggtcaatttcaagttgggaaacaaaccctagcgaacctccattgatgtgatctctctctctctctcacaacttgagaatcaactctctagaaaatatcagaaaatcgttgaaaaaatctggtcttttctggagggaaatg

SEQ ID NO: 16498 - DNA, 3000 bp, Unknown; identical to SEQ ID NO: 13560
  misc_feature (1)..( 3000): 2750-1469P.txt file - cDNA_ID_1450561; gDNA_ID_2214636; Annot_ID_136139

SEQ ID NO: 16499 - DNA, 3000 bp, Unknown
  misc_feature (1)..( 3000): 2750-1469P.txt file - cDNA_ID_1450610; gDNA_ID_1620740; Annot_ID_166415
ttagtcttgttatggtaaaagaaaaggaaaggcatgaaaatgggaggagcaagctgatcaaggaaagagagatgatgatggcatggaggatgattaaggtttcgaggagagggcttgacgagttcctgagaagttaccgtgatctcaagccccattcttgttttgaaataacttataataatgatgtatgagaactgagcagactcatgcttcgtcagtaagattatataagctaaagttataaggaggtatagtcctctttaataacgtgtcatggtgattagacacggatcagaattagacccaagtgaacaagaaagttacaaattttatacaaagatttggttttggagacttcagctggattattttgtcaacattatgaaacttgatatggggttttggtttaacccagttttatactaacgttaggtggaaaactatatcttctatttagacttgaacaagttaatttgccgcaagtgagttaagcagcttcacaggataccttttccctcaagaaactcaagcttcacaggatgcctttttccgcaagaaactcttctatacaaaatgagtttaggaataagtacaaacaaacaaaaattaaaaacagggattcggttcgtcaacaattatatagtgataacattttcaaagtatatatcatcatcatcattaactagttggggttggtggtcgatggtcctcaacatctcctttagtcctttagactagtccttaccaaaaacgtttgactattcattttagctaaattatatattccgataggctcgttttaattatacgaaattatacttttgtattgccattcataacaaattttattttgtatatatatgtttgtggtcgatatagtcaatggaaccattaggtagaactttaaatcaataaatgatatttttgaattgaaaattagggtacgaattattccaaattcccattcttcaacttaataaatatgggctgttcatctactatgaattaatatgatcattacgaccaatagcaactaaccagaataatactatagtatatattccctagaaaccaatttttaattagtggcattaacatattcataagacaattaatatttttatttttatttatactattcaacatttttcacaaaagaaaaaatcctccggggggaaaaaacatgcttttggattaaatattaaacaaagaaggctcgatctacaatttctaaatctatatatagttagaaatcattgtagcaatagagtaaacgttatttcttcatgctagcttcatacgtcataaattatgttggaggacacaccatggtgttgaattcatcattttctatatagctagttgccaataaaattataatattcgttatggaatttgaaggctgagaaatattgttgctggagagcgagtttagtttgttgtccacgcgaacagcaatgattcaaaacaaaagtaatagtttaacgaaaacgtagggttttgttgagttatgtatctcagctctcaacacgatcaacgtcacgttcaaaacattacatctggatttgattattccaggatattaattaattagggtttatccactatactcaatagaaaacgtacaaacttctgaaatgtttaaagtacaattactatttaattaatcttcttaatcaattcttattacgttgactattgtgactcgtgaaaatagcccgtggactttggatgaggtattttactgcagctcatgacatgttaataggacttatctaatagactaatactatagatgttagaaactctaaatacaaaaggacttatctataaatataatcgaactcaacaatctcagtgtaataccatgaatcaacaatcttagcaacctttataacaccatgaatttaacattatcatcgtagtcaataataaacgtttttttctttttatacattaaaaaaaaaaaaatacaatcgtttaattaatcaacgaaacgactgtgttttagtttccgtctaaaatttaacaccgtttatttgcaacatttgatagattatgcatttaatttgttcaaattttcaagatgaaatgtcaatacttttgagtttatttttttatttatttattttttattaatttttttatacatttttattaattttgattatggacaaactagatttttgtaaaattaacattgcaatcatgaaagtgatattttcaaaacaaaagtacattagtctaaaatgatactgaaatatgaaaaggataaaatatgcactactaatttagtatagaatcgataatgaagagagaatcttcttccctattccctaattgtgttcataattagcataatataataaggaaataatgttggctctgacaggtcacagatattgaagacttgaacaaaaaaaatactttatgaaagaagttgattaaagaaaccaatttggtaacggagacctgccaacagaaagcatataatgttttatagataaggacaaaagctatttctctctacaaacattataacaacaacactcatcatcatcatccaatttctcatcattatgatctttgaaacagaacaccaaaattaaaaaagtttgcaagaacaaaaaaaaaaaaagagataagattcttctctctgtatttttgaaaaaaaatatatataaatttttttcttggctttcacgaagtctctttctctggctgcaaaaatatcatcaatagcgaaaagtcgcttcttttttcttcttccaaaatctttaattttgtgaaaccgaagagataagacgtggagaaaagcagacgtctctgttgtttgtttttgattcatcgggttctaaggatttgtctgtttccaagacacaaactttggattctcttctcttcctgttcgtcttctcttgtcttgatccttttgttatcatcatcatctcttcatcgagagaagagagacgagattagggatttaagttaaggaggatg

SEQ ID NO: 16500 - DNA, 3003 bp, Unknown
  misc_feature (1)..( 3003): 2750-1469P.txt file - cDNA_ID_1450637; gDNA_ID_2214638; Annot_ID_188188
cccaccattcttgtttcatccatccgaagattgagtctagcttcgatgagggaatccaacttaacattaggatacttacccaaaacataaccagagtgtttgtagtagataagattaggagcatctaatgaaatactagtaaacttgcgatcaaatcggatgtgtagtctctttagagatggagaagacacggaacaagtccaatctacacatcgccgctcctcaacaaccagttcttcgagaacaggacagcgagatataagagttccaacaacattatgacctccaacaaaattaactgagtcaagacataatgtcctaagcaaaggaagagaaacatcttgagaaagcttgattgtaaaaccacgtcctactctcagcttaaccaatgtcttgctcttaaagatcattgcaggcactggtggagattttccttttaaagtaatgaacacatcaagatccataacaccatggtcaagaacgttgcaaatccaactttgaatgcgagatgaatcagtgccacctcgaacaccaacatgactctttagagtgagcttctttatagaagaaccacgttgcgtatctagcaatttgtcaacgaaagccatgtaatttctgtgaatctcaatccggttttgcttagtcttaggcacagattgacgatcatcaatatcaagattggaaaccaaaacaaacatgttcttccacctcttagagagtactgaggttgaaacagcttcttttgtggagataagagacagaatacgcccaagaacctcatctggtagacggctgattacatctttagcattcattgataccaaaaccttaaaaccacagcaattggattcagaaacagtaactagacagagttgatgagttcaaaggtctgttctttttcatacaatgcaaagtctaatacaaaagttatcatgtatctcttcaatcacattgattaccatagaaatgaaaaagacgaaacagagcagacaacataccttgctaaagtgctacttgctacagagtcgtgaaagctctccactttcaataccaatttaatcgtgagatcaaaagtgaaaacatcgaatactagggttttggaaagtttaagagaagagacgaagaaactgaaacaacttattataagcaatttcctccatttccacatgaggaaagagtaaagcagaaagactgatgaagaaaaggtaagtagtctgtttgggaaagaaagtcacgtgagagaagcgtgggcctttaagggtaaaactgtcatttaaatagtcgccgttctttacacttaggattagggcttctaacatttaaatagtcgtttcgttctccgtctctcctttcccgtcggccggtgataatttcgcaacccaaattccaaatggtaagtttcagttcttggatttgtatgattttgtaatgtgaatagggatttgaagatttacttacttttgaaattcaggcgtcggagaagaagctatcgaacccaatgagggacattaaagtgcagaagctggttctcaacatctccgttggtgagagtggagatcgtctcaccagagcctccaaggttcctcctgttttttacccattctctgtggttttcactcttgttgtcacttggttataatcgattgattcgtggttacttggtaggttttggaacaattgagtggtcagactcctgttttctccaaaggttagattttttctcatatttgaaagcttacaaatagtctggttgatagatttagtaatctagaagaatttgggaaacatagtttagttaagtctatgaatgggtgcatggtttgatgatgaatttgagattttggaatccagtaagtcccttatctggtggtttgtgataacttgataagcctaccagtccaaattaggagctgttcgtttccccgcttctgatatagttgcgttgtgcactctgttttatatgcatcgcttttggtttgctctgagagacatgatttggtttagcttcttccattgcaattttcaagaacccttgttatgtgtggcttttgcagctagatacactgttcgttcttttggtatcagacgtaacgagaagatcgcatgctatgtaaccgtcagaggtgagaaggcaatgcaactacttgaaagtggattgaaagtcaaggaatacgaacttctcagaagaaacttcagtgacactggttgcttcggttttggtattcaagaacacattgatttgggtatcaagtaagtcaatccccttaaatcatcctgtcataacacttggggttcaccacattcttggtgatactcattgatctttgtttcacttcttataaaggtacgatccatcaactggaatctatggtatggacttctatgtggtcctagaacgtcctggctaccgtgtagcacgtcgcagaaggtgcaaggctcgtgttggtatccaacacagagtaactaaagacgatgcaatgaaatggttccaggtgaaatacgaaggagtcattctcaacaagtcccagaacatcactggctaaaacaattcctcctaactctttcttctgttttagaaaaccctgtctcagttttgtttacttgtctgaatcttaatctttgtactttatatgcattattggctttagtttcagttatttaagtatctaatttcgtgtgaggataagcaagataagaaaattttggcgggtagttgaagcgtgtggagacatataaatccactagctgacacgtgccacggacggctaagcacgctttcgccgatcgccgatcgccgctagattcatctcggattcctccaaataagcttccctggttcttatcttgccacgtcagcatttctccctcgtacgccttaaattcttcacaaaaataataaaaatattaattcaaataaatgttcatcttctcctacgaatgaaattgaaattaatttgagcgatcggaacaggatcgggtcggatcttttgaagttcttcaatg

SEQ ID NO: 16501 - DNA, 3003 bp, Unknown
  misc_feature (1)..( 3003): 2750-1469P.txt file - cDNA_ID_1450789; gDNA_ID_2214520; Annot_ID_134039
tatcattcttgccatctcttttatacttcaatttatattaattagttagttacaatgtatatttattgtataggttcgaggaatttgaagtattttctattgtatatggtataagataccaaaggacacaagtctaatcgcatgtgctcttctcgtttggttaaaaatcgctgtgattgtttttttactaaaaatcaagctagatgtcatattaggaactatatgttaataacttcatattgcggccattgttacgtaggtgttggaaatagacatttttgttatacaatcactagacatttttcttcttcatcttttttttttttgacttacatgaatataacttataagttcttacttcataaattagggtcataagagtgagcagatgttgtttgatataactggatatcttctatatatgattacagggaagtataggaaaatggatacgatgtaattcgaatatacattacgatgacgacattattagcagcataccatatcatatgaataacagcatcaacggataccgatctcttatttacaggtttgattaaaattacattttaaagaatcgatctagttctctatacaaactatgcggtttttggtaaacagtggtgatcacgatatggaggtacctttccttgcaactgaagcttggataagatctcttaattatcctattattgatgattggaggccttggataataaacaatcagattgctgggtgaataatttttacaatttttttttttgcttctttattcattaactcagtcgaatcatgagctcattagtcattttgaaatccctcttacgattttcttggacagatacacgatgacctatgccaataagatgacatatgctactatcaaggcaagtttttttttttgttcttactcttaatgttttttattacacaaatcattttgtttctcagtaactgttttgaggggtttactatagggaggtggacacactgcagagtataaaccagcggagagctttatcatgttccaacgatggatcagtggccagcctctgtaataataagagatgatgatgccctatgccaatgaaaaagaaatatttgtagcatcaacttttatatatatatatatatatatatatatatatgtttacaatttaatctactacaatattgtaaaagaagatcatctttaagaaataaaaatatttttaaaatgggctctcaacaaaacaaaactgtgtaagtccaaacgtctcataaataattaatcataatattcatgtctccaatcaaataaacctgagggagatggaagagatcgatgtttccaaaggcatactcgacaactatgctttcgattttatcaaaaaaaaactatatttttgtggatgttataagttttctttcagatcataatcattgagttcttgggcacatttgcaagcaccacacctcttacaatagtccaatgtttcttgagcatatttggcttcttgggcatgccgatcgctgcgggctagaagaaaatacccgtgtgatcgaagacacaatgccgataacaaccttgctcttgtaggacataaattccttgacacatgcaaaagttttacaaagcttttgcctttttgtatatcccctttttattttacattgttgaccaaatttgagtcaaataggctaatgacaattaatctactcatcaattcttttttctttgttcttgaaatgaatccattttatcaagaatgaaaacaaaaatttgaactaaaccgagacttgccgaaaaacggttaagtcatcattaataaacaacgcaggaagtggatcatatttttttttttttaaatgtaaaatttattcatcaaaaaagatcatagttacaattagtctgttcatttcgtcgccgcgggtacctgcggccactaaacaaacagactatatatgcatctatgatcatcttaatgtctttgatgagtttggcttggtatttcggtaattcaccgtgtctccactggttttgttctcgtcagattgtgtagatagtggcttgaaaggcgtatcgcaaaatgaaacaatgggtgcgactaatactagaatctgagattgctttaaggatatcaccaaactggtacgtgtcagttgctgagatatcccatgagtgagcttgtaccaaatctgagacgtgacattacatgagaagaagaggtgatcacgataagaaagtggatcgtattgtatttttttattccatcctctaaaaaagggtcaaatgatcattaaagaacaccgaaaaaaatggatcatattgtattttatataccaacctcttgatattttaatcgtttgactctttttttttttttttttggcaaattgccatcatcgcctaagataaccagttttccaatttttaaaacaattattatactatctttccgtcgataagttgtagtttgtcagatattttgaattgcaaatcttgtttagttaacaaagtcataaactacttttctcaaaatcatctcttcattccttagatccattataaaagtagagcgtgtaacatgaagtagttgtgtgcgtgtaacacgaaacagctacgtaacacaagaagatgttgattataaactaatagtcttgggattataatcttttattaatttatcgatatactaattgttctaaaaaaataatttaggatcgaagaaatatataaatttattaaggtattaattcatccaatatgatttcaaagatcctcaatataacctactcctacatgtgactattcaacaaaacgtctggaaacctctattattgataatatatggtcctacatatgactattcaataaaacgccagcaagcctcaattattggtaattaattaactaattgaactctacatgtgataattatcttttttttttttttttggattaaagatataaagatccttgtatcctaagatgactcaatctttagaaactaagagagaatg

SEQ ID NO: 16502 - DNA, 3003 bp, Unknown; identical to SEQ ID NO: 16501
  misc_feature (1)..( 3003): 2750-1469P.txt file - cDNA_ID_1450789; gDNA_ID_2214520; Annot_ID_184578

SEQ ID NO: 16503 - DNA, 3000 bp, Unknown; identical to SEQ ID NO: 13854
  misc_feature (1)..( 3000): 2750-1469P.txt file - cDNA_ID_1450859; gDNA_ID_2214659; Annot_ID_188846

SEQ ID NO: 16504 - DNA, 3000 bp, Unknown; identical to SEQ ID NO: 13854
  misc_feature (1)..( 3000): 2750-1469P.txt file - cDNA_ID_1450859; gDNA_ID_2214659; Annot_ID_136521

SEQ ID NO: 16505 - DNA, 3000 bp, Unknown; identical to SEQ ID NO: 3010
  misc_feature (1)..( 3000): 2750-1469P.txt file - cDNA_ID_1455881; gDNA_ID_1620620; Annot_ID_162273

SEQ ID NO: 16506 - DNA, 3000 bp, Unknown; identical to SEQ ID NO: 3010
  misc_feature (1)..( 3000): 2750-1469P.txt file - cDNA_ID_1455881; gDNA_ID_2926190; Annot_ID_200957

SEQ ID NO: 16507 - DNA, 3000 bp, Unknown
  misc_feature (1)..( 3000): 2750-1469P.txt file - cDNA_ID_1455901; gDNA_ID_2214461; Annot_ID_132981
ttcattagtagtgtcagaggattgggtttcaaatctttagcctgcggagatttccatacatgcgctattactcaatctggtgatctttacagttggggtgatggcactcataacgtcgatttgcttgggcatgggaatgaatccagctgctggattccaaagagagtgactggtgacttacagggactgtatgtatcagatgtcgcttgcggtccctggcatacagcagtagttgcatcatcaggccagttgtttacgtttggagatggaacttttggtgctctgggtcatggagaccggagaagcacaagtgttccacgtgaagttgaaagcctaattggactaatagtaacaaaggttgcttgtggcgtttggcatacagctgcagtggtagaagtgacaaatgaagcatctgaggcagaagttgactcttcacgcgggcaagtcttcacatggggggatggcgagaaaggccagcttggtcatggtgacaatgatacaaaactacttcccgagtgtgtaatttcattgacgaatgaaaatatctgccaagttgcctgcggacatagtctcactgtttctcgtacatccagaggacatgtgtatacaatgggtagcacggcttatggacagcttggtaatcctaccgccaagggaaattttcctgaacgtgttgaaggagacattgtagaggcttctgtggaggagattgcatgtggttcttatcatgttgcagttttgacatctaaatcagaaatttacacatggggaaagggattaaatggccagttaggccatggaaacgttgagaacaaaagagaacctgcggttgtgggttttctgagagaaaaacaagtgaaggctataacatgtggatcaaactttactgctgtgatttgtgttcacaaatgggtacctggctctgaacattctctatgtgctggttgccgcaatcccttcaactttagaagaaaacgccacaactgttacaactgtggtctggtattttgtaaagtatgcagtagtaggaagtctctgcgagctgctctggcacctgacatgaacaaaccatatcgagtgtgttacggatgtttcaccaagctgaaaaagtcgagagaatcatctccttctacgccaacttcacggaccagaaaacttttgaacatgcggaaatcgacagatgtttcagaaagagacagcttaactcaaaagttcctctcagtgaacgccagactatcgtctgctgactcttcattgcattacagtgaaagaaggcaccacagacgagacttaaaaccggaagtaaataacagtaatgtcttcccttccatgaatggcagtttacagcccgttggttcgccattttccaaaggatcaacagctttgcctaaaatccccaagaatatgatggttaaaattcctggttccggaatgagctctcgcacaacatccccagtttcagtaaagtcaactagtccacgtcgatcttatgaagtagcagctgcagaatctaaacaattaaaagacagttttaatcaagatatggctggtctaaaggaacaggtatacatcatctattgtcagctgtaaatcacatcaaagcaaaaatgcttctagactaaaaacatgcatctatccactgaacattgtaggtagaacaacttgcttcgaaagctcaccaacttgaagaggaactcgaaaaaaccaaaaggcagttaaaagttgtgactgcaatggcagcagatgaagcagaggaaaatagatctgcaaaggaggttataagatctctaaccactcaggtttgaaaatttccagactctactacacatgtttgtctcttatatctatttctcattatgttactatggttttcgcagttgaaggaaatggcagaaaaacaatctcaaaaggatagtattagcactaactcaaagcacacagacaaagagaaatcagagactgtaactcagactagtaaccaaacacatataagaagcatggtttctcaagatagtcaaaatgagaacaatctaacaagtaagagcttcgctaatgggcataggaaacagaatgataaaccagaaaaggttgtgcaagacgaaccaggagtgtatttaacgttgttgtctttacctggtggtggtactgaactcaagcgtgttcgcttcaggtatatgatttgcttcttatctccacaacatgacatatcatgttacatctcgttgaagctcgctaagactttgtttttgtttgctgcagccggaaacaatttaccgaagaacaagcggagaagtggtggggtgaaaatggagctaaagtgtgtgagcgccacaacattctagtttcttaggactcctatgtcttcttcaatagaataaatagagacatggatgcagatttttatttggaacatgatgtttttctgttgttcatagaaaaaaatgtttgatgtaaattatatatttcattcaattttttgtcttagtattttttatttccttatgataaacaaatatcgaatcagagcaagtacttcattgtcatggttgactcaaaaggtcaatcacacaactaagaaaacagaacaaatctaaattttcgatttttccaaaaaatattatctgactgatttagaaaaaaaaaaaaataccaatttatgatgttggtaatggtaattgactaattgttacaaacaaatattttaagaaaaatccccaaccccagagaaacccttcatcttccatcatctttcttattcaatctgcaaaaattccaaggtatgtggttgtaatttttattttttacatactaaaaaaatctttgttaatcttcttatctttgatttgaagttttacattttggtgtttaaattcgtcaattgttatttttttttccaaaagcttgatgcttacacttccttcatgtttctccaacaaaccctaatttcgatataacttgacgaaatcctcaattcgtgtgtgtgtatgttgcagattcatg

SEQ ID NO: 16508 - DNA, 1150 bp, Unknown; identical to SEQ ID NO: 407
  misc_feature (1)..( 1150): 2750-1469P.txt file - cDNA_ID_1455908; gDNA_ID_1590789; Annot_ID_150073

SEQ ID NO: 16509 - DNA, 3003 bp, Unknown
  misc_feature (1)..( 3003): 2750-1469P.txt file - cDNA_ID_1455932; gDNA_ID_1620716; Annot_ID_49113
ttcgtgagaatttcaagctacttgcttgtgcgtttcatcagcatagcaaatgaggagaaaggtccaaaagcactatcaaccactaacagatatgtctgagctgctgatgacatttacaaggaattgaagagcttatggggtttacgtttacttcactacaggaccactttagattactagaaaaatgtagctaccttgtaaaaaatgacgtgtctcaaacacgataatagtggaattagattaattagagaaagaaaagatagctaccttgtcaaaccggcaggtctcaagcacggtaatggtggaatcggttttttccttaattaaaccgcttgaatgtgatgccaatgcagtcagggtctcagccgcagcttttcgtgttacccaatctgtacttccaaggcaatcatggatgctttctagcaatgactccaagctctgaggtgcaatggctcccacctgaatcaaagtaattgctctttacttctctttttcataaacagatttaaccactaaacctactagcattgaactaccagaagtaaagagagagagagatattaaacccctcaaaatttcactgagacttgtatgctcaaatcaaacaataaacttcagcaacacctaacagaaaaagtgtcggattaagactaaaacctcaagcagtgttatttactaaaactttgtgttctacttactgacactgatattcaaaattcaccatattcttccatttgctgtctatagcatgacaaggaggagattataaggattctgggcaaacctgagagagacttgaaacaactggcaaaagggaagccttagcaaggaaactggaattgctcaatagcttgcaaattctagggcaaagcttttggaaagaagtaactggaggactagcagctgattcaaccatcctagccatacacattgaagctccagattgtaccactttgttctgctctcccattgcctcaaacaatggcttaacgaacaaacccaccgctaacgacgctgaaccagtattagtcccctcttcttttcccttgagataaatcccagacaaagcaccaatcgtatctctacaagcatccctaactccagaatcagaatccttcaaccgtttaactatctgagcgatgattttagtgagatgcgcagccgtcgaatcgcaatggagactacaaacgtaggagagaagatggagacactccttcttcactgcaggtttcggatcggagcacgaatcgtagagacaattgagaaacatcggtagggtttcgggagtgagagattgaatagttttctcgagatcctcgacggcgatctggtatgtatctcgatcggcgagcttagagattgaggtaaggatcttttgcttcagctccaccattgcttggaacgaagtgagggaaccggaattggaacatgacctagttgctaaactcgacgaccgtgctggtctcgtcggtttcgccgccgaaccggaagttgtaggtgtgctcatttctaaatctccgacgagagattagattaatcggagaagaagatagacgagttggagaagaaagacgagatctgacactcgaaagtgtaacagttaagactggaatcagaaatgtgtcgctcaattttattagtatttcactttttcaattttttcaaattttaatattgcataattttcagtatctggattttgcatttgtcgcggaaaatcgggtgtgaaagacaaagtatgaaaatatagtttaaattcgtgatacttcgtttaaattaataatcaataatacgagttctagtgtaatatataaacatccatgcaaataagttcggacattatcaaatttagagacatcacgttctacattatggattgttaatttttatttcaaaatttaagttaaaaaaaataaaaataaagaatctaattattcaaaatgtcaaattggtttcttgtacaaaaacatggcttgatatatggattaaggaattttttacatggtactataagtcaataatgaatggttcaaggaattttacatggtacactaacgaatgctttaaggaattgtgattgctattagttgtttaggttgtcgttaagattgttacgttacgtacactttgttggagttagagtcgagcaatgcacattggagaggcttccgagtgagtccgcatgcatataccattcattttttagcttcaacgactcaaaggccttcgtctggtgtttaatgcacgtgtgtaaatcataaatggatcagaggctggtggttcatcggaccaacaaggtctgcctaaatgacaagttaagacggtaaaatcgataagagacaaaccttaccgatttgatatttattttttttggttcgaatatgtaatcgattagtgtcattttgactatttgcatgttggtcattaaaagatcaaccacattttattattttaagtacaaaataaaaaatacaagaaacttaataaagttttggaaaacgtttaaaaatcatgaaattaaactaaaactatatagttagttcatttgtattaatttaaccataagtacatgtctttgtaatccttttatttatcaactccaccaaaaacaaaacgagtagtagtacgtcgttcattagcactattagaagcctttgaatcatattagcaaaaactgctatacgtcattttgtccaaagaggacgtttaccaaaagaaaatagataacactaaaattaggcatgtgataaacactccaacccccaaaatgtacaccgccctattctcaccaacctcttctgactcttctctcattttctgttgttcacaaataagttaacgtggtaccgaactaccgatttcctccactattttattgaatttctggtcaaaaaacttaagtgttacataacgaatctataaaaagaaccctcactttcaaggtttttgtcagcaaaacatttgtcttcgtgtttgaaagctagataaaagattcactaaatg

SEQ ID NO: 16510 - DNA, 3003 bp, Unknown; identical to SEQ ID NO: 16509
  misc_feature (1)..( 3003): 2750-1469P.txt file - cDNA_ID_1455932; gDNA_ID_1620716; Annot_ID_165640

SEQ ID NO: 16511 - DNA, 3003 bp, Unknown; identical to SEQ ID NO: 16509
  misc_feature (1)..( 3003): 2750-1469P.txt file - cDNA_ID_1455932; gDNA_ID_2926190; Annot_ID_140992

SEQ ID NO: 16512 - DNA, 3003 bp, Unknown; identical to SEQ ID NO: 16509
  misc_feature (1)..( 3003): 2750-1469P.txt file - cDNA_ID_1455932; gDNA_ID_2926190; Annot_ID_200964

SEQ ID NO: 16513 - DNA, 1269 bp, Unknown; identical to SEQ ID NO: 333
  misc_feature (1)..( 1269): 2750-1469P.txt file - cDNA_ID_1456083; gDNA_ID_1563953; Annot_ID_148574

SEQ ID NO: 16514 - DNA, 3003 bp, Unknown
  misc_feature (1)..( 3003): 2750-1469P.txt file - cDNA_ID_1456167; gDNA_ID_1620835; Annot_ID_57958
atatttcttagatagatatacgcaacatttatcatggttatcgacaactttagtttgatttttggcatatacctaaaattttgtaattttctaaggacttggttctaattaagaggctcgtccgctaggcgctaagcatgtttcatgtatgttcttcattgtcttttattaacttttcgaagcgttgaaattcacttctttaacatgaattggggatttaattttggagttaggtggatttaagtcatagaaagaagaaaacctgtcattaatgtgaacgaaaaaatgtaacatctataaaaaattgatttgtataaattggtttgtaagtctctaaagatgaaattgagtcaaatcctttttttagctaatcgaatttaataaattgacaaacgcgttaagtactagagaaacaaaataaacatgattagctagcaacggcggaatataaactctataaagatcacgaatcctttcgcatcgatatcttaattgccgtatgaacagtataattaatcttctcataatatggttattatactaataaattatatgtatagccttgtaggtaaatggaattattatggaaacagaatcaggtgcagagaaccataatgggccatgatcttgaatggtgcagagccaattcaaaatcatattatgactaaagacagagagcacatgactcacggataggaccagaagtatagagaggtcgtaattcagtttaagagaagacagctatcgatctcatttcatatgcattatgatctctggtacatctctatatatatcacctaacttcgtcttatcatatcagctcctcctccatgtcttatcctgagtcgcccattgtgtcacaaaccggttaacctaattgtatgattgatcgtgtttgcaaccatttataccctaaatgttgattacctcgttaataatatgccgtagattttattaatatgtatatgtgtgtaccaaattacaacgctaaatgaattttaaatccttggcagaaaaacagttcacaattttatatcctttgttaaatttaggttgtcgtgtccacattgtatgatctactcataagctcatagcatcgagtcattgacatcaactcattgttctggataatacaattgattatacatgtgtcacacctgatgataacttttagaatttttaaacgtgattttatacggacatctagatttgtttggatttcaatttaaattgttttttttggtttatatatttagttatttacatgttggttagtgttttattttatgtaagatattttcttacaatatctgtatatctatccacatctaatacatttagattttaaaatatcacatacggttaggatttgtattccctcagtcaaagacaaaggagtgggcatatagtatttataccctataagtaataacaggtcatttaaaaatttgaatagcttattccaaattaatttcatccatagaaaaaaacctaattaatgtgacagctgagctgaccatatattgttttttttggcacaaccattgtgtttatataaatcttatgattttatttcaaacgtacgataaggatttaggaaacgaacaaataaaatgggaaacggctcctctttaattattgaccagccattctgtgtctgttcaattagcgactagccagattcccaaatttcctcattgtccattgatttcaattatacgccaactcttctagattcagaggtaggtccatgaacttcaacatgacacacgttattttacttatctcagtctatatcgtaccaattgctccatattatacaatatcttataactctaaatgtcagtcgcatctaagattcgccactagttattatcaattcacccaactagaatcctcagttttcagtcgttctcaaaaaagtataaaaggattttttctattaaaaaatgtatatatatatatatatatatataaaacatgatagaaaatagaaaatttaccgaataaaaaattaaaactaattcagccgtgacaaaatacctaaaaaattatcggttttgtttattactcattctattgatcaaatactcaattttatatacaattattagatttttgctacggaacttagcgtgataaaactaaaatttcaaaatttaagataatcaaatggaatgtttagcccatatgtcacggttttaacaaattttgtttggttatgtatgttaacacatctatgagtttaattatatgtcaaataaatagtagaagtcaaatgattgaatactaaaaatattttcactgaacatgtttctatgaaataactgaattttctaattatattcatatatattaatttaactacttttaattatgtcaaaacctaaaaatttgataaatactttaaatgataaaacaagacattcatattaattaaacgtgaaaattgtataccatatatagtattcacaatatataatataattactttttgtgctttgcttaagatgcagtaaatcgatttgattagtctctaaagaataaatcttttatttggtcagtttgggtctaagcaataattactggtattaactttaaaattataagagtctagggactaaaaaagaaactaaagatatcggcgacatgaatgatgaatgagaaacagagaactctaaagaaagtaaaggagcagcgatgaaatcggttgtccgcaaacaacggatagatctgtcgatgtttgtttttggaactccgcgttgaatcagcgtcgatgtttctcgtaagtttgcataatccaaaaactcgttttcgaattataaatttcatcaaatccccgcttattttgggtaaattcaggcaaaaagggtttttgtgttcttcgatattatctcttattactattaggctattatcatcgccttattggggaaaaagcttcaaacttttatataaagtctcttcctttttctttctttctcggtggaatttgcagcaatg

SEQ ID NO: 16515 - DNA, 3003 bp, Unknown; identical to SEQ ID NO: 16514
  misc_feature (1)..( 3003): 2750-1469P.txt file - cDNA_ID_1456167; gDNA_ID_1620835; Annot_ID_169836

SEQ ID NO: 16516 - DNA, 3000 bp, Unknown; identical to SEQ ID NO: 9687
  misc_feature (1)..( 3000): 2750-1469P.txt file - cDNA_ID_1456224; gDNA_ID_1972172; Annot_ID_179877

SEQ ID NO: 16517 - DNA, 3003 bp, Unknown
  misc_feature (1)..( 3003): 2750-1469P.txt file - cDNA_ID_1456622; gDNA_ID_1620387; Annot_ID_155492
tttttatatttagaatttaacaagatgtatgattatatttattggttataaagatgtatgattatactattattttaagttaatcttagaaaaaaaagtggtgtactatttattttaatcacagaattgggaagttcaatttagaaaaaaactgaaaatgtgaagaagataatatacaataaatttagaaactttaattgaatttagattaacaagtacactcatatctcagttggcatgttttttatggattcttttctaagagttttttgatccggtcaaaaacttcttgcatttcatatagccctataaaatcctatgtttaatccgaccactaacccaattcacgatcaataaatgatcgtcggttcagtctggcccttgatcccgttcccgtagatatttttttctttttggaaaattagttattagtttttcaaaaattaacacatgatatccagattttatcgaactatagccaactaatccggagataagtatcttggttaacacatgatatctaaattaaacctacgtaccacatgaacacaattcatttcccttccgatatttcatattttccatataatataaaaagggtaatactaaaaaatcaacaaactaaaactaattagtttttttttttggttaaatgaattagttccacaattaatgtttagatttgttatttgtatagattagcaaattagttatggttaaatgaattagttacacaattaatgtttagacttgtagataagcaaattagttatggttactcaaatcagttccacaaaaaaatgtttagttttgtatcttaccacatcttgttgtcggtttggttagagagggacctttacatctaacctgtattttttgggcttcttctctttctcaacccattaaacacagaattcttctctttctcaacccattaaacacagaacaagatatgtctcgagagagttatcttaattaattcaactagatgagtatccatgctacgcgtgggcttttgttttaaaagttgttatagcaattctctgttgatagtttttgttgttggttatgttcatttttttatgagcatttgttttaaaaattgttgaaatatctatattggtagttttgttgttaattatgtttatatgttttttagtaaagttagatctacttatatagttataaaactagattttaacctgcggtataccgcggaaacaatttattttttaaagttagtatatataaaagtttacaaattgtatctatctataaaataattttattttatagtttacaaatgttattaaataacgtcctgctaaacccgtcctgtaaaaaaaaaaccatttattttattaatgttgatcttatttatgatatgcttatgaatcattgtctaaatattttgtaattttgtagtaattaaatgctatcagattatatctctgcgctttgatgattataatcgaattgttatagttatggagaaaatcaatatcaaaaatgataattttatagtaattaaatgatattaaatattttggaagtattattttagtaaataatcgtgtagttaatgtggagagattttgggaagattgttaaatgtcaaatatttaattcgaagattttatttttaattatcaaaaacaaacattaaaatccagtggcagccattgtaaataagtcccaactacaggatttatttcacaaaatggctgcaaaaatgtatatatagattagattcatcttggctccagatgacaattaaacatttcttgcaagtgaaactataaactaaaattaaattgtcatcgtggaagagattttggtagagagatcacattgtaaccaaaatatttttcattacttgtctcatgtgtactaccttgaaaatgaaccagaaatatcatgtaatcgtcccaatgttaaaacttttaacacacatttcaattcttaaaatagagcaaaggtttgtagaagagactgtaagatcctcatgactattatagccgcttttgcccacataaaaaaaagaatttttggtgagcgatagatttaatcaatcacataactctcacaacatctagtttgtgctataatcgttgcatggttatgcttaaacttgtgtcatcccaatcatttggtcccggtataccagcttctcatacttgtcatcatcaacataatgattcacactgtaaatgataggtgagatatagatttagatgatatattttcaagatgttaggaacttattgaccacaagattgggcccactaacagaattcaggatatgcataacttattgtatatatgatatataacttcattgacaaagctctattaggttcaaatatttactctttgttttgaagatcaaagagcaagtcaagcatgtaccgttactaaaataaaaatttaatcatataataaaattatagtaaaaatattaatattttttttgtttgagaaactatttgggtttctctttgatggagatgctctttgactatatattttcggttaaattttgccaatttttttttaattttttaatatgctatttataattattttttccaaatacacgtattttttctttaagtaatgaggtgtcagaaggatgaagagagttcaccttctttcatatgattagtctccaaaagctttaatttactgaaagccttaacacaccaatactaagcctacaggctttagtaaagcccaaatcaatacaataaaaatcctaaattaataaacaaagagtcttcttcttcttctaaatcccaacggaaaaagaagaagaatagagttttcgcttaatctctactcaatacgttgaatttgtgaaagcggagatctacaaagcgtaaaagagttcttctgggtttcttctttctccgatcgatctgctagacgatgacgatgagtttccttctataaaaccagtaactacgagatttgatttataacaatcatgaaactctggtcatg

SEQ ID NO: 16518 - DNA, 3003 bp, Unknown
  misc_feature (1)..( 3003): 2750-1469P.txt file - cDNA_ID_1458988; gDNA_ID_1620815; Annot_ID_169207
attaagtctgtgagtaatattggacccactaataaatgatcaaattaatttcaaaaacaataatgaatgcttatcaagtcgaattcaaaacacaaatgccttcaatttattttttggtttcgttggtcttcattatacatggaactagttagttggtcattactcgaatttctcgctgtcgagttattactatatatgaattcaactacgatagtacatggtctatcttgtgaatactatagacatagtatagcatctataatatcgttgttttatgtatatcaaaattgctcgttttataatcttttcctacggattaaaatattatttgagcatgcatcgcaaacatttcttctaatttaacaaaatcacttaagatattttaatccactattttttttttggcagcctgtaaaagaaaaattataaatattgcaactatctacaaattaatgtagtatgatattcatttaaaagatgaaaagcaatataagacggataaaccctaaagcatttgaagatatttatatattttttgtttgtacatgtttatagaagaaacataattatgttagatagtggttgggagataagataatatggttgtgtgaatcattaaattaaatttcacattctagtagccttgccgatatatcatagtcttaattaactagcatgatttttcggatacttgcgctctgccttactatttatattctataattattagttttggaccatcgttatgttctagcattaacagcaacttctctagaaatatgctaacattttgcttttgatatatttttagccacaatactttttcatcgtaaagtcttttttgtaccttttcacgtgtacatatttatagagaaagttaccttcttcacactcagttaactggaaatagtagtatcacctattgcttgtgatctacatctaccctccggtccctacgtcttagttcattttttctttttctaattcgttcttatcatatgattcgctatgtcggttttaatttataggattctaaaatataattaaaactagatattgatttatccaaaaagaaaatgatatgttatgctagagaccaaaaataataccaacaaaatattctatattgctgagcttgatgggctctagaagtcttggttgtattaattatgatgacctacaaatatgtagtttggtaacagtttacatcacatgctcaaagattttaacatgagattcttaaattaaatagtattactaatatcatattttttaacgtaccatgattgttatatgagattctaaatacaaatatctactatatatgtagagtaattaataccataagtttttgataataattgaagttatactcatttgtgcagagatagattacttgtaacaccgatgttatgacttcagaaaacattcaaacactcaagtcaaaatggtcggaaaaaaagaaggttaaataaccgcattattgatatgatatgtagttgtttataactttgtgtattttgaagtgcttttaatttttttgaattttccatgtattatctctcttttaacgtatatgtgaatgtcttctaaattcattggatgttactcaacaagattctgatactgtcatactgagtgtctgaaatatagggccatttagttgtcagtcactcagtctgttgtaggagtcacaaataaagtagatctaccttagttatcctacgaaacagagtatgcattttgattatgttggtgcaatatatttgatgtattatcccaaagagatgcatatgatatgtttcatcagatattgttttccgtggaatggtagtgctagtttttttttttttttttttttttttttttttttttttttgtgtgtgtgtgtggtgattttctggccgaggcgaagattactctttcaaaaatctcttaaaaattcagattttacttatcgcatcataattgacaaaaacctaataactaaaatatagacaatgcaatttacattcaaacgaaatcagttccagtcaaccgaactatgagcacactgacgtaaatatgatatgagcacaaccaaatgtctaaatctacatttaagtcaacgaaatttaactaaataaaaataaataaaagtttttgatgtagccttatttgaagtaaatttagtgtatataataagattaagtaacattttaccaaaaaagtaacaataataaaatatcatgaatttatgttttttccccaaatcaaaataaaacctactcttttatgaaatgactatcttttagtggcaaaaccaaaatatgaaatggagcaagcagagtatttaatgctcctataaagtctagaaactctgacagcgattaactaatcccctcttaattagcgttgatacacatacgcactatatagtaatattacctgtctgtcatataatctgtctgtcacattctgctggcaataatgtatttcgatatacgccctaatagttatgttttgtcaaaagtagtccttttttttttgtgcaccaacctagccaagtatatatatgtgaagaaaaaaaaagactggtaatctggtatggttgagagagagtacactatctaatttaaacaaaaccaaaaaatagagagtagtgagtacactatctcagttttctcgaggattattaacaaaaagtgcattttaattaatactcaccccttcaaattattagaagaaaacacctagtttcaagcagttaattcggtcttgtcctaattaagtctaccggtccacaacatctccacgacccaatgcattacacatatacattataaataaatacatatatcgacatgtgtctatatatataaataagtgtgatagcattgaagagaagttgatttagcctctgtttgtccttgttatgttgttgtaaaacttgaaactttggaagcaaactcatttttataacaaaaggaaatcttattttatacattacattaaagcaacatg

SEQ ID NO: 16519 - DNA, 3003 bp, Unknown
  misc_feature (1)..( 3003): 2750-1469P.txt file - cDNA_ID_1459029; gDNA_ID_1620671; Annot_ID_48156
taaatatagcatgccaatctttttcctaaaacaaatctccaatatttaattgcaatttcggtggataatcggattccacttttgtacttgaacggccagttctttcttactagtaactttcattcatgttttttaatggttaaatacatttcaactataacagaaattgttggcaagaggcgaccaatcaccaacgaaagctcgtgtagattacatccacataaataattattacatgtattgctgtttatattccaactttatcataagtaatctagttaattgaagattagcgacaaaaatatgatattaaattggatgggagaaaacatatatttaattaagcaaacgaacatattcgcaacttgagtttttggggggtgtttggtgacgtacaaacttctcttcttctagataaggaactatgcactacaaattttcttaattatgcaccacaaattttctaaagtacgattaaaaaagaggaaatctaaagccaaagtagtaatcaaccctacaacaacacatgagtcacgactttcagttaactacaattatacaaatattacttgattaagtggtgttatcttaactagtgtaatgtatgtttgaaattaataaagtccatctacaaaccattttatcaaaacaaaaaatccatcaagcaaattgaagccactcttatagccgactaaccgtacctacaaattttctgtttcaaacttatgcatatctatatgggtgcttatgatacttcctattaaatttaataaaattagtaaaaatttccctaccatatatcatattattattttttcgatccaagaaagttactttttaaaatagttttctattttgtgacacttctaaaatattataagtgtatagccatttttccccaaacaaggaatagtctatcagtctatacagtatacacacgatttatttgcaaagaacctacatacacaatttctcttctaccatgttagatttttagtacttgttttactagattatgtatttttgtttgtctatcggtcttttaattttcacttgctggaggtaaataatgaaggaagtagttaaaaattgagataacatagttgtgtagaaattagaatacagtgcagaacttaaaagtatggttacgatcacattgacaacagtcgatattccattgagatcacatgaacattgcttcgttagaaatgctcgtcgatcgcctgaagtaaaccgatttgattggccaccatgttttgcctcttcctgatttcattgatatattttatttttctttactattttaaacaacaaaaaaatttagaatccgtattccaaaagtaaattaaatttttgcatacaatttttctttttctttaaaatatctaggttttaatataatattccataatttgatgaaaagaattaaagagaaagttcaaatcaatccatatagcttgtcctagcctatagccaaaaatattcctatgccgcgattgaacaaccgttttttaaaaatcgtcaaattaaatcaaacctttttccatgacaatgagacttggatatagtttacattagattctgattggcccctttgatataactaggtaaactagcttcttgaataaactgtctcttattttggttttatacaaaaaaaaaaaagcttttggaaaatgatttaaatgtaaatacataatacgtagcgtctaagaagcatatttgagaaaatatggatttatttatctggtatttatccattaatttacctacaaatggaatccaccattaaccaaaaacaaacaaacaaatggaatcccgtgaaataaagtatcatcatatacatatctctcttttatgtttttatggagagaattagtccaatccttcttcactgaatttaccacctgcttctcgtagaatatataaaactacccttaagtctttttctaatgactatgagttgacaaatgagaaaaacaaaaactgcttttgttggtcattaaatattccgtctagatggagttagtgctttcattgtcatattctttgtctcccatcaaattaaagctcactatacagcagattgtacaacactatacactaaagttacatttttgagattttattgattgacaatttcgtttcgatattcttagatacactaaactcaaatattgattttatgggaagagaataaaaaatggattgtgaaaaaggaaaaaaaaaaacctaaatttgggccatatgtgaagaatacttccttaagtttgggccatagtttaaatcaataggcccattagtctatctaacgattctttctcaactcttaaaaatctgaccggcggagatggctctgagttggaccagtcggaggattagggtttcaacggagactcactagtcgatctccgatcctttcttctacccgcccgaaatccgtcgaaacttctcttctttaccattgatttgcctcgtctcagctcaattctcttccgttgctgcttcgtttaggttcgcattatcgcttactttattgaatttttcctctatgtctctggtttcaatttcagctcaattttgtctttttttcggttgaattttctcttgggtggtatcgaattttgctcatgaatgctgtttcttgatgaatcagagccctcttagtttacttcacgtcgttcaattcaaaacttggtgtggtcttttgcaacacaaatcaggaatagttcgttacttagaaacaataatgtcatacgagaagacaaatctggaacagagaattagtaaattgagctggaaagtttcagtagtcaaaattctcgtaaaacttattttggtataattgtgtcatgagtcatgacattctttcttaggtttcgtacaagtttctaatttgaggtagatactagttcagaggttctttattaatgtttgattttgaaaacctttctttacttacagttgttgcttcgcttcagtactctggtggtgggagagatg

SEQ ID NO: 16520 - DNA, 3003 bp, Unknown; identical to SEQ ID NO: 16519
  misc_feature (1)..( 3003): 2750-1469P.txt file - cDNA_ID_1459029; gDNA_ID_1620671; Annot_ID_164109

SEQ ID NO: 16521 - DNA, 3000 bp, Unknown
  misc_feature (1)..( 3000): 2750-1469P.txt file - cDNA_ID_1459029; gDNA_ID_2926200; Annot_ID_141483
atatagcatgccaatctttttcctaaaacaaatctccaatatttaattgcaatttcggtggataatcggattccacttttgtacttgaacggccagttctttcttactagtaactttcattcatgttttttaatggttaaatacatttcaactataacagaaattgttggcaagaggcgaccaatcaccaacgaaagctcgtgtagattacatccacataaataattattacatgtattgctgtttatattccaactttatcataagtaatctagttaattgaagattagcgacaaaaatatgatattaaattggatgggagaaaacatatatttaattaagcaaacgaacatattcgcaacttgagtttttggggggtgtttggtgacgtacaaacttctcttcttctagataaggaactatgcactacaaattttcttaattatgcaccacaaattttctaaagtacgattaaaaaagaggaaatctaaagccaaagtagtaatcaaccctacaacaacacatgagtcacgactttcagttaactacaattatacaaatattacttgattaagtggtgttatcttaactagtgtaatgtatgtttgaaattaataaagtccatctacaaaccattttatcaaaacaaaaaatccatcaagcaaattgaagccactcttatagccgactaaccgtacctacaaattttctgtttcaaacttatgcatatctatatgggtgcttatgatacttcctattaaatttaataaaattagtaaaaatttccctaccatatatcatattattattttttcgatccaagaaagttactttttaaaatagttttctattttgtgacacttctaaaatattataagtgtatagccatttttccccaaacaaggaatagtctatcagtctatacagtatacacacgatttatttgcaaagaacctacatacacaatttctcttctaccatgttagatttttagtacttgttttactagattatgtatttttgtttgtctatcggtcttttaattttcacttgctggaggtaaataatgaaggaagtagttaaaaattgagataacatagttgtgtagaaattagaatacagtgcagaacttaaaagtatggttacgatcacattgacaacagtcgatattccattgagatcacatgaacattgcttcgttagaaatgctcgtcgatcgcctgaagtaaaccgatttgattggccaccatgttttgcctcttcctgatttcattgatatattttatttttctttactattttaaacaacaaaaaaatttagaatccgtattccaaaagtaaattaaatttttgcatacaatttttctttttctttaaaatatctaggttttaatataatattccataatttgatgaaaagaattaaagagaaagttcaaatcaatccatatagcttgtcctagcctatagccaaaaatattcctatgccgcgattgaacaaccgttttttaaaaatcgtcaaattaaatcaaacctttttccatgacaatgagacttggatatagtttacattagattctgattggcccctttgatataactaggtaaactagcttcttgaataaactgtctcttattttggttttatacaaaaaaaaaaaagcttttggaaaatgatttaaatgtaaatacataatacgtagcgtctaagaagcatatttgagaaaatatggatttatttatctggtatttatccattaatttacctacaaatggaatccaccattaaccaaaaacaaacaaacaaatggaatcccgtgaaataaagtatcatcatatacatatctctcttttatgtttttatggagagaattagtccaatccttcttcactgaatttaccacctgcttctcgtagaatatataaaactacccttaagtctttttctaatgactatgagttgacaaatgagaaaaacaaaaactgcttttgttggtcattaaatattccgtctagatggagttagtgctttcattgtcatattctttgtctcccatcaaattaaagctcactatacagcagattgtacaacactatacactaaagttacatttttgagattttattgattgacaatttcgtttcgatattcttagatacactaaactcaaatattgattttatgggaagagaataaaaaatggattgtgaaaaaggaaaaaaaaaaacctaaatttgggccatatgtgaagaatacttccttaagtttgggccatagtttaaatcaataggcccattagtctatctaacgattctttctcaactcttaaaaatctgaccggcggagatggctctgagttggaccagtcggaggattagggtttcaacggagactcactagtcgatctccgatcctttcttctacccgcccgaaatccgtcgaaacttctcttctttaccattgatttgcctcgtctcagctcaattctcttccgttgctgcttcgtttaggttcgcattatcgcttactttattgaatttttcctctatgtctctggtttcaatttcagctcaattttgtctttttttcggttgaattttctcttgggtggtatcgaattttgctcatgaatgctgtttcttgatgaatcagagccctcttagtttacttcacgtcgttcaattcaaaacttggtgtggtcttttgcaacacaaatcaggaatagttcgttacttagaaacaataatgtcatacgagaagacaaatctggaacagagaattagtaaattgagctggaaagtttcagtagtcaaaattctcgtaaaacttattttggtataattgtgtcatgagtcatgacattctttcttaggtttcgtacaagtttctaatttgaggtagatactagttcagaggttctttattaatgtttgattttgaaaacctttctttacttacagttgttgcttcgcttcagtactctggtggtgggagagatg

SEQ ID NO: 16522 - DNA, 3000 bp, Unknown; identical to SEQ ID NO: 16521
  misc_feature (1)..( 3000): 2750-1469P.txt file - cDNA_ID_1459029; gDNA_ID_2926200; Annot_ID_201797

SEQ ID NO: 16523 - DNA, 3003 bp, Unknown
  misc_feature (1)..( 3003): 2750-1469P.txt file - cDNA_ID_1461791; gDNA_ID_2213667; Annot_ID_182144
attcataaccccttccatttggtgtggtgaaaacctctgaatacttgtatttggatactgaatacttctgcctagcatgtcttggtgttgtagaagcgtatttttccaatttgtatcggatccatgaaggccatccatacgttgccctaactgttgctgcggaaccccatcaggacccatatgtgaaacccttgttcgcttattcaagccaggcatagaagacatttgtccttcttgactttctctctttctatgaaaagatgtaccagggttcatactatcagagccataaggcagcatcgcatctagtccaccaggcgaagcgccagagacactgacagaatttgatccttgatcctgcgtgtttcttgtacttccaattcccatgtacctttgttgctgaggtggtaccaaggccagagaggaatttggtgcatcttgcaacggctgacttcttaatcccgccagcatattagtaccaaggttttgaatagcctggttgttattggtttgctgcattatcaaatgccctggcaaatttcctcgctctgaactttcaggaagccgatcaatgcacacctttttcccctgaatcttattctgagacatgactgtcacttctgccatttgccttaatctctttctccgcaaagtagaaagcgacaaatcgagctatcgagtagagaaaaaaaaacattttagacactataataaacaactgagaacagaaagcacaaggagtctttttaatgagatattaccttagcagtcaaaggatttttactcagcctatcaagtctgggtaaaggatccagacagagttcaggttgtaaggcttttaatatcctggactccacttcctgcagttgatgtaaggatcagtacagaagataatagtttcagtgctcagatatacgacctataagccacgagctaccatgattaccatgagatcaccgtacgtccatgagttgtctgacattgatggaatatcttttaccacattctcgagtgacatcttaaggcgcaatttatttatcacaggagagacttgagatgaggtatgtttccgatagtcatgcacctacaatagtatgtgccaaaaattaaagaaaacatgatgatgtaagatggtacacagcagtcaattaaaaattagtataactaggttttttatgtttacttctggtcccagttactccattatgtttcagaaacaatcaaatacatgtacaattgagtttggaagataaacttccatgtacttataattacgacatttttttaatcttgattaagtgtagataatttctgttgagctctttttaaatatatttatatacgtttggactgtttccaagaacttatggaaggctttatcccaaaaaataattgcagataactcacctcacatataaccaccccatccacaaatttgcaaggtatatcttccaaaatgtccccaggaagcctgccagcctcaatagcctataaagcgtacaaagggattaaaaacatttactcagtagaatgaaactcagaaagtgtatttaacaaaacgcgagtaagtagtgcagtgaaatgcattattcgggtagaacaagtggggaaaaaaaacatcatcttcacatttactaaatctaagtactttgaattcattcaccaaaactttgattacatgttcaaatcaagtctataataacatagttcgaaagatttaccgaaaggagaccctctgctgccctatcatacggatgtaagacctttggaacatctcgaaacgatatctgttgcatagcctggtattcaaaaactcaaatttgtgaaaacgtgaaggttttaaaactcaaatacaagaaatcacaagataaataaattcatatagactctcagtacatacctcagaggtttttcctatagagtacccatttggatagaggctcaatatgaaggaaacttcatgatctgcagagaaaccaaaatgcactcaattcaacatagctagaatttagcaaaacattatgtgtcaaagtggttcgttgagatccaaacctggagatatatcgggtaaagatggcttcgaaaacccggaaacatcgccaatattgctatcatcagtggcctgaaccaaacgtaataaattttctatataactttccaaaataagcgaatttagttggaacacaatacaactaaaattctaagttaaattacctttggtttcccagatagaacgattgcttttggggaatcaggagtagccaattcagtagaaatcttaggtcgaaactttctaccaaccttcgatatcttaaacgagacacccatggattctctccagagagatgaagctcaaacctgtctaggtactgtcaataaacgatacagaaataaaaaagacacgagaattgaagaaatcgaagaatgaattttaagaaagctagagaaattgaaaccttatgagcttgttacagagaagatcatcaaacaattggatcggatagaaagcgagagaaatcaaaggtgactaagaatagagcaatgaagaattcataaacatggaatttgtgaaacacaggtgggaaatttttgaagaagatgcgatcggaagagaaaggaagagagattattgttagggttcttcttctaacttcaaagtagcagaaaaagaaattatcttttgtgtctctgtgcacacttggatttcggtttaagacaaaacggaagttgaaccagttattaattttggttagcttcgattaaaatttgggtaaccgagtttgggggtagaatagacattttgcaaattagggttttgcttgatatataaaatccttcacccttataagcctttcgtcgcctcttcgtgtgatttactgagtgaaaaaagcttatcgcggcgattagttcccggcgaagaagaagaagagagataagaaaatggcgactaatggatctgctagctcagcgcagctctctcagaaggaagctgatgtcaggatg

SEQ ID NO: 16524 - DNA, 245 bp, Unknown; identical to SEQ ID NO: 372
  misc_feature (1)..( 245): 2750-1469P.txt file - cDNA_ID_1471083; gDNA_ID_1564444; Annot_ID_149466

SEQ ID NO: 16525 - DNA, 3000 bp, Unknown; identical to SEQ ID NO: 1001
  misc_feature (1)..( 3000): 2750-1469P.txt file - cDNA_ID_1471148; gDNA_ID_1620346; Annot_ID_154162

SEQ ID NO: 16526 - DNA, 3003 bp, Unknown
  misc_feature (1)..( 3003): 2750-1469P.txt file - cDNA_ID_1472778; gDNA_ID_2936573; Annot_ID_194820
gcataaatcagctggatcaaagaaatacctttttggtgaatacataagttttttttccgcagaccacttaggcacttatgatggcctaacatagaaactacacatgctgatcagtgatcaaagacaagatccatagattctccacgtgaagtttcttggccacagtgaagcaacgccctcgattattcaaaacacattgtcccaatgcttatacattgacaaagtccactatgatccccaaatttggaggccaaacaaaattgattatcactgtttgttgtgttaagtttcccaaaaaagagaaatgtgaatgaagagaatgagaattgtttgaatagccaaggagactgcctgacgaccaaccaactctaagactatcgatcgagtgagtctttgatatatatggtctaaaacgcaggcaagtcatccttggctaccacacaagttctcattcttcatgtcaccattttctcttatatgatttatgtatttatgaagaggttgttgatgagtatcccacaagactactatgtgtgttatataggcatgaccgtacgaagatggagtggacacaataagtttgactcaacatgtgttcatggccttggaatatgttcttaaagatttggatatggtcttagtatcaaacacacttggtgaaccttattacaataatatttgtatttagtctttatgtatattactgttaatttttagttagaagaatgttttcttattttatttcgttgtaagagacgtaagcttcaatttttctttaaaaaatgtaataaccttcgtgtgttattgaagtttctctaatttttggtagaatgcatgaaattaaattcaaaactcatatattttcgggtattcttaagaccgacatactagcatatcacacattaatatactaaattgttatttttttctactcttcttccacaagttttttttaatcactcaaatggcacgaaatatgctttgaaacctaatcatctctatcgggtcaatacccttttcttactagttgactactagtgtttgggaccatataggaaagaacatttataaaagtcatgatgccatatgaatttgtgtagtaaacatggaatatattgagctttttgtggatatatttatatgaaaatataacttctggaatgattcttttatctatccacgagagatgttgggaacgaaagctgctgcccatttatataggataatgttttttccctctccgacttttgcatatagggcattatggcttatctgagtaatacgagaacaacaagttagcaacaccatcggtcaattatttagctactacactatttacaccggtaaaaggatgttgtttttgtggtatagtagagtctttataggtatagtcactatgaatgttgcagtcgtctagttgttttaccgcactgattgagataaatcgatcgattattgttgtacacatacgtcaatcaggagagattcaaatgtttaatgggtgacaagtctatacttgtcccatgaaatccaattaccaaagattgatagtccaaaaagtactaaacaaaacccaaaaggtcgatgatatacacttgatggttttagtaatcgaatattcgtgctcagtccagaccgaaccttttacatatggacgacgattctctatggatttgttttagccacatgcttataacaatattcgcacatttgagggtttgagccaatgttgggtcaaacatgttgggctctttaaactccttatctgcccaaacatgttgggctgaaccttttctgagtaactctagcccgttaggtcattataattatagaaaaataaaaagcaaggccactataaactaaaccctagtccgtcatctcttcgctatataaactctttagacaatccagcatccaaaacctcctagatcgctcatagttctcctagatcgctcatagttctttcatcaatttgttcggaagtgattgctttatgtttatcattgttttgtacttgatagattttaagaaattaggggtttatgattggcaaatgatgagtagaatcttatcctacacacagatgtatcagtgttgactaccaatctctgcttattatctgatgccatattctaaaccctgttttcaaaagtttttacagttaatccgttcgttttcaattttgttccagcgtttttttttaaaaaggatcttctgggtaaatgttggtttttaaaataagttcttaattgtaattctctttttattcctgtgaaaatgagaagaaaattagaacaacctaatgaagaaacaatgatgagatacttgcagacgggcggtctgaaattgatgtcgtgttgattgtctgccataagctacataagcattctctgagtttctcattcactcgtgaacacatctgttatgtcttaaactgttgagattgtaatgaaccagtgaattagttaactatacaaagagtagacacatacatctttggacaggtgtaacctcttttaatatgaagaacggctacattgaaaaggatgaactgaagtaaccgtaagccaaaacatccaatgataataagacttttgttctggttattaattagtcttataatcaataattctacagttctttaattttcgtttccaagttccaaagttttaaatcattagactttggtcagactataaaacgtgttcaaggcttgtgtttgtcttttatataaacgtaaagactgtttggacatgaagacttatttatccaccgtctggattatctacacacctaaaaaaatgatagcaatcgcagccataataagagagaacgcgttagtaaaagtcaacacgaagtcaactcctttgtggcttttagcccatcccacttggcgctatttaagtaaaatcccagtattaccaacttcaaaaaagtctctctttcacattgatcctgtgttttataaaaccgaattttgattcagagatcagctcaaaaatg

SEQ ID NO: 16527 - DNA, 3003 bp, Unknown
  misc_feature (1)..( 3003): 2750-1469P.txt file - cDNA_ID_1473029; gDNA_ID_1621126; Annot_ID_56354
ataaagtaaaacttgttcttttaggcaatatattatctctatctaattgattaacgatggccgcagatatgtaaacacacatttttagagatggctataaatgatttcctgaggcatttatttttgatagcttagtttttacaacttctgtttaccgacactattaagttaggtatcaaattatttaaacatagtaaaagtacaaacctgtattggtagtgacaagtgacaacacattacacattatacatcacaccaaactcaatatgcctcctaatacaagagtacatacagctatagctttaaaagtgcttatattatatgtaagagggccagataaatatttgggccaaagtaagaatgataggcctataattcgggtccaggtgactaacaccattcagaaatagtcatgccccattcatcatcgaaaggtatttgaagtcaagtgagagtttatgctgatgaatggggcatgaattgaaacatcaagcccaagaaaaagtactggttgtgaaaattagcaattttggttgttttaaatctaatagcccattacatgaaaatttgtagtgtcgctaaagttatctttggtttgggttgttttaaatctaatagtccattacatgaatgagaggtgcaacttgcaagccctattaacggctagtcatgaaattacaacattaccataaatttatgctatcctgatctgaatttatatagtctaattttcgaagcgaaacagatttcaggtcttggataataatttcatcactacttcgttcatacattagtttagatccaaaagatatacaaaatttatataattagtagaactgttgacaaataattattaaaagtaataaatggtctgttatagaaatttgattttaacttttgttatattagtgaatttactttaaatagtagaacaagttataataaatatgaaagcatataaaaagaataaaatctcatgagattatcttctagcatagttttagtgttttctcataatgtcaataaatatttacaggtcttattatgatttttactaaataaacagcagaaacaaataaaaagaaaaaacatggaagaagaagaagaagaagaagtccagcttcactcacctttcgctttctctatcccataacagaaacccccacattgctcgaacggtcgtcataattccttgaaacctcgaaaatccaaaaacccatatccaatcttcttcccatataaattaagatttttatttatttatttgtttacttatttcaattcccaaaatcctctgcctcatcatcttcaaactgttaccacgtccatagggttgtcgaagagctaggaagagccttaccaagagcttcttcttcccctaacatttaggtatttcattcgtaatttatcttctttttaatttaattattgtcgattaccaaaacccttttttatactaaaaaactgaatccatttttccacactaaaaggagaacacaaaaacttcatttcaagttcatgtttgaaaaactaagaagtgtatggtttgtttgttgacaattaatgagcatttttttcccaaaatacgttagaacttaatatgatagaataaaacttgaattattcatggcaatgagtatagtcatatacaataatggttgatggaaatgaaccttacggtccaatgaaaagccagcttgcgttacttgagcatttttaagccccaaaaaagtttgaaaatatgtataaaggaatattttatatatggaactaaagagtcagagaaccattccggatttagatcatccatctattttaatttgttgtgattcagccatcgcattattagtcttcagaatataataaaattataattcagttatgaatttaataaattgaatgccgacgtgagtagttaataatgtagtcgattgtaagtaacaatgagaaaactcctatactttatttttagatgtatttgtaataataagattacgggtttggactggacaggttggtaggagaagcaaaggaagagatcatttataatggctcctgcattcggaaaatgtttcatgttctgctgcgctaaaacctccccggtaagtcccagcaacaactcaaatttgcttatgagaaaaatactcaagctatttttgaaacttcgagaggattattagattatagtatgtatataaagtgacgaaatgtatatagagaaagtaataattaagtaaactggtgacgcgtagatgccaactggcaagtccgttaaaaacatgaccgtgtcagcctgtaaggcttgccttggttgacttatcctgctttgtcattggccaccggcctatcggaaaagacgcagaccaatttgccttcaccaaaataaaaattactacttactaccatatgctttttgccctgcgtttacttttcaagtcgagatcatttatttggtcaaatgaggtagaaaaaaactattctagtcaatgtagacattcgaatgaaatttgcatttataaaaaaaatgtacttggaaattcaaatgggtttataatttcattttaatcagtaccgagacatacagccacatgcttaattattcctcctcaatcaaaaccatttcaccccaaaattttaaaatagttttatcaaatcaccatcccacaaaaagattttttaatataatataaaccttcccatttttgtggagtttcttttttttttcccttgtaaaaaagaaaatgtaagagtagaaccaaatggcataatagagctctaggcctataaataccaatatccatctctactactactgcattaactgatttcacattcttcgataaggattttactctccagagaaagaaaaaaaaaacctcctctgcttttgtgatcctttaaggtttctctcatcagatccaattttcatgtttcaacatcgtcaaatttcaccgattaaaattacttgttgttgtttgtattcattaggaaaaagacgaaatg

SEQ ID NO: 16528 - DNA, 3003 bp, Unknown
  misc_feature (1)..( 3003): 2750-1469P.txt file - cDNA_ID_1481372; gDNA_ID_1971851; Annot_ID_176385
ggaagtcaattcgagtatatttaaaacctgataatagatttgacgaatcaccctacaagcaggcaaattgatgtctccgacgatcggaaacagagcacaggagaggacacgtggaagactgacgttcagtggcgggtttctatttttttcaaaagcgcgcgaagaagataagaaagggacaaaggcagaccaagtatgaaccaagaaagtttgcaattcgaccctttaatttctgaatatatttaattcacccttaattctcttaaaaagatttcaaaagaccttttcaaatctaggacttgccattttaaacggaaaattgtcatttaatagtctaattttcgattgacaaaaaaagaaagaaaaaaaacaaacaaacagttattaagctttaacagattttctaacatttttaacgattctcttagtcaaaccaaaacgatgtcatttaagctctaatcgattaaaaattagatctaatgcaggtctcgttacgtatattatacaaaaaaaaaaattagtgttatcgttgacatatgtgatagtgagtattttcaatattttagactcaatgtgtgtctcgttacgtatactatataataaaattcgattttattgatgctaatgacagatgtgattttcaatattggagaatcattttattgtaaatatgttgactgaaagttatttgatctatttactcatctacatatacatttttgcagcacttttatgaaataaatcctcaagttgagatttatttaccatccaatgccattagcatttaatattttaacaaatttcttctcaaatccaaatataaatcaattttgttactaaaatttagaattaaaataaatatatcacaacaatcatttaaatctttccaaatctaaaatgtactacacactaatattcttttttaaagagatctattagcattaatggtatattattattgatatattttaactttataaaacattattaatatttatccttataaaaagatattaaaatattatgagacgagttatatagtgggacgggtttgcattgatataacgcgggttaaatctttatttattattctatcatcactaattttttttttacaatattaatataaaattatataattttaatactaaaaatttaaaaccttaaaatttaagattattatatatataaataaaatatttgctccgtggtataccacgggttaaatcctagttccaatataaaattgcatagtgatgttttctttaaaaataaatacaaataacataaataaataaaataaaataaagttacatgtttgagcctctcattttcccttcagtgctataaattcagactccttcgctaaataaatcacaaagcggaaaaaagaaagaagaattgagagatatctagtgttttaaaaaaaaaagaactgagaaatcagcaatggggagcttaagagtgagcacatttgctgttgcagtagttgtatgtctctccatcctcctcatgtctcctacaggtacgtaaatttagttaaaagaagatttagaataaatacatgttaatgaaatgttgcatctttctatatatggactggacacaagtagatgggcgtagagtgtgtgacagcgcagcgggtttatgtagtatgttgttctcttgcaatacacaatgcaattcattgggccgcaattttactggaggcgaatgctcagatgctcgttttcctggtttaagtgtctgttattgctgccataatgtagagagcagtgctgaaatggaaagcatgtgattgcagatgctagaaaacgacgtcgctttgtgtgtgtgagtgtgtgtgttttgctatttgcatgtttatgctttcatttcatcacatcatatgttttgagtgttttgccttgtactctgttgtgcttctgtttgttttgcgttgtcaagtctccaataaagttggagtgtttccgttgacaaacgtttttgttagttcttgttgtatttagctaaccaatgtttttagatttttttttctctttttctttgtgttaaacactaatgtacatgtttttgttttcataaagtttgatgcatattagttaaaaaggggttacttgtttgaacatacaacaaaagttaaaaaggttactagtaagctaactaaagtcttacaaatgtccactctagaaacaaaacccacaaattcacaaaagacggttagaagcccaactagtagagaccaaaaaggtagtaagccccacaggagtaataagccctgtcaagatgaagggagtgacgaggaaacagatagctaagggtcacttgttcatcgaagattttaatcgtggttgaatcaggttgacccaatgatctggtgatttagaagatagtccaacttaacgctcgaatcaggtttaaaaatattggtttatgtagtattttcttgaatcccatatagtatttttacttttggtaaataaatgtattattgaaatatttaacatgagggtctcgttacatatattatataataaaaatattttattgatgctatcgacatgtgatggtgagtatattacattattttagatcaaatgcaggtctcgttacatatattatataataaaaatattttattgatgctatcgacatacagttagtgagtatatttcaatactatagaccaaataataggtaggtgagtggatgcctggattagtggaaatattttaacaattattattctcttacgcgtggaaagttttaaattactaaaaaaggtaaacttggataatcattttattgtaaagatattgacaatttgacataaagtattttgatctatgtacccattccaatatataaaattgcatagtggttttttcttacaaaaaaaaaagagtaacatctagatgccctttcccttggagtgctataaattcagactccttccctaaataaatcacaaagcgagaaagaaagacgaactgatcagcaatg

SEQ ID NO: 16529 - DNA, 3003 bp, Unknown; identical to SEQ ID NO: 16528
  misc_feature (1)..( 3003): 2750-1469P.txt file - cDNA_ID_1481372; gDNA_ID_2926179; Annot_ID_200105

SEQ ID NO: 16530 - DNA, 3003 bp, Unknown
  misc_feature (1)..( 3003): 2750-1469P.txt file - cDNA_ID_1481655; gDNA_ID_1620780; Annot_ID_167915
gtaattaatgaaactaacatattttcctgagttgtttatatttacatttgcgtttccattcacatacttattttagaccacaaaatgctatgttttgcgtatatatattaactagtaaccacaaaagcacttaagacaactatttgctttgcaaaaactctgcactatagataaaaatttatttgttgcgaacaaaccttaattaataaaatcttgatgagcaagtgaaagaagaaaagaagaataccttttcgtcgatgtaagcagcccagaaccgagccatggcccgatcgtaaggatcggaagggagaatggacggtccagatgagctccaagtgtcatcgatatactcaacgatgatgttggactcactcaccggtttatcagcatgaagcagaaccgggatcttcttgtgaaccgggtttgatttaagaagcaactcgctcttagacccaaacgtctcttggaggaactcgtaggggacagacttgaggtttagagcaatcctcggcctcatcacaaagggactcgcccatgcaccgatcagcttcacgtcgctgcttgccattttctcttcaaaatccaaaacagaggattggtgcgtctgaatgtgagagtggaaatgtaatgttttgacacgttgaagcgtttttatgttagatcggtgtattgttacttattatatggaagggaagagggtaggtgaatttgatggcggtgatagatagcgaagaattgccaattataggttgacacgtgtattaaacgggtgggaaaacgttattagtctttattgtggtcgacgagacggcatttctttatatgcgtggcaacaattgaaaccataaaaactccggcagcttcacttagcttgtttaaatttgtatttcatgtttaagaaatttgtatatattattagtactataagttaatatctttgttttaacgagtaacgatgtgatgtttatttgggtttgtttttggcagctaatcaagtgatataaaaccaaagaagtgaaaccactaaatgataattacatatcagggaagacaaacacaaatccacctaaaaaacaaacatgtcatgcatcacaggaccacacgaaatgtgaacattgaattgcagtcacgaaaaaccgcaaaaaaaatattcgtctcagttttgttttgtttgttttcatacgctcattgtttccactcacattttcttaacattaataaaatggtataagtacggctatcatttaaatgtacaaatggattacatgtcggcccctagcgggaaaaaatacaggcccaaaatgatttgaaacttccttgataaagaaaaaacaaacaagatgagaacacttcataagaaagaggtcatacatatcttttagtcattttatcagtatgaaaatgtggtaattagttaagttgttgattctttcaaatcctgagatatactatgattttgaaattatgagttttatgtgacttcagattctggaatattgctgtaaagtttgggtggatgtataatcccttttttatgttcctttcatttctcactagcccattcttataattcaagttttattttcttgatttccaaacacgcaagattgacataattatacaaagttactcttattatatgttatatattccaatgttacattccgaggatggtgtcgctagttattcaagttttacaactttgtttattttggaattagtaatgtgttacaacttacaaaacaaaaatagaatcaattattttgtctcattgcagaatttatttgccggtcgcatctcttttaattattttttctttcttatttttataagagaagcgtcttttcttttgtgtcaacattttaaataaacaccaattatcttatatatacatataaaaagataaattgatcggcttccagaacaatctcatgagaagaataccaattagaataatacctttgcaagatgcattatatattcactagttataattacagatttacattattatacaatgaattaaaaacaaattaaagttgagaattattgaacaactttagcctttaggtttctttactatattctcttgaatctaattcccttatcttgcccgtttccttggttgggtggggacttttagtatgagtgggcacttaacattagtgatgtttttgcaatattattttgtcttctaggccttatttcctggtgagtttgggacacctaaaggcacattttgtctaaataatatactgtgttaaataaacttttatatgcccatacttttcattttgtttataaattttatcattcttatcacttattactcaaagagcctactacaccatcaatttcacaaactttggtcgaataatattctagttaaagaagattgttacaagaacacgcgagtgagaaatattatatccgatccagatcaaaagattactcaaagagccaacataactatctttatccaaatttgcaataacaatatgtagcttaatgggacatttgcattgcccaaactttgaatgccataaactaatataatattaccaattatatgttgtattaattttatataaatcatctccagatatatttttcccaataaaattgttcgtgtatataatcaagcctattattatatgatatatggaattctaatgttatgtgttgtatattattttctatgtttggttttgcacattatctaatgttgtaatccgtcatatgatggtatgtatagataatagacccaaccaaaagaatctaggatttaacaacaacaaaaaaagtaaaaaactatatataaactaatttatattcttatattgacaaaaataaacgcctatgttttgcatataaatgtacattcacatatgcaatttagtatcccgcttagcattgcatctatattaggttacattcactcacacaattcatatatacttcacatcttttctttcacactttccctgaaaggtctagcaaatg

SEQ ID NO: 16531 - DNA, 2046 bp, Unknown
  misc_feature (1)..( 2046): 2750-1469P.txt file - cDNA_ID_1481655; gDNA_ID_2288; Annot_ID_145616
  misc_feature (1801)..(1801): n is a, c, g, or t
  misc_feature (1807)..(1807): n is a, c, g, or t
atcatttaaatgtacaaatggattacatgtcggcccctagcgggaaaaaatacaggcccaaaatgatttaaaacttccttgataaagaaaaaacaaacaagatgagaacacttcataagaaagaggtcatacatatcttttagtcattttatcagtatgaaaatgtggtaattagttaagttgttgattctttcaaatcctgagatatactatgattttgaaattatgagttttatgtgacttcagattctggaatattgctgtaaagtttgggtggatgtataatccctttttttatgttcctttcatttctcactagcccattcttataattcaagttttattttcttgatttccaaacacgcaagattgacataattatacaaagttactcttattatatgttatatattccaatgttacattccgaggatggtgtcgctagttattcaagttttacaactttgtttattttggaattagtaatgtgttacaacttacaaaacaaaaatagaatcaattattttgtctcattgcagaatttatttgccggtcgcatctcttttaattattttttctttcttatttttataagagaagcgtcttttcttttgtgtcaacattttaaataaacaccaattatcttatatatacatataaaaagataaattgatcggcttccagaacaatctcatgagaagaataccaattagaataatacctttgcaagatgcattatatattcactagttataactacagatttacattattatacaatgaattaaaaacaaattaaagttgagaattattgaacaactttagcctttaggtttctttactatattctcttgaatctaattcccttatcttgcccgtttccttggttgggtggggactttttagtatgagtgggcacttaacattagtgatgtttttgcaatattattttgtcttctaggccttatttcctggtgagtttgggacacctaaaggcacattttgtctaaataatatactgtgttaaataaacttttatatgcccatacttttcattttgtttataaattttatcattcttatcacttattactcaaagagcctactacaccatcaatttcacaaactttggtcgaataatattctagttaaagaagattgttacaagaacacgcgagtgagaaatattatatccgatccagatcaaaagattactcaaagagccaacataactatctttatccaaatttgcaataacaatatgtagcttaatgggacatttgcattgcccaaactttgaatgccataaactaatataatattaccaattatatgttgtattaattttatataaatcatctccagatatatttttcccaataaaattgttcgtgtatataatcaagcctattattatatgatatatggaattcgaatgttatgtgttgtatattattttctatgtttggttttgcacattatctaatgttgtaatccgtcatatgatggtatgtatagataatagacccaaccaaaagaatctaggatttaacaacaacaaaaaaagtaaaaaactatatataaactaatttatattcttatattgacaaaaataaacgcctatgttttgcatataaatgtacattcacatatgcaatttagtatcccgcttagcattgcatctatattaggttacattcactcacacaattcatatatacttcgcatcttttctttcacactttccctgaaaggtctagcaaatgagtttgaagcgttcttcttcttctttctttatctntctctntttccttcttcttcctctcttctcatgtctcctcacaagcctgccaaaaaacatgcggccaaataccaatcaagtacccgctcggaaccgggtcaggttgcggtgacccacgtttcacacgttacatcacgtgtgaccctgaccaacagactttgacgctcaccacccacacaggcagttaccctatcacttctgtcgactacgccaaacaagagatctacgtcactgatccgtccatg

SEQ ID NO: 16532 - DNA, 3003 bp, Unknown
  misc_feature (1)..( 3003): 2750-1469P.txt file - cDNA_ID_1532708; gDNA_ID_1620544; Annot_ID_160125
gttgaagtttagatatgatgtatcatgtttacacttatataatgttagtctaaaaaataaaataaaaaaataataattatcactatataagttattgccattctgtctaaattttaacaggtcagtgaattaaattaatattattaacaataagatatgttatcatgtattatcaataagaaatctactaagacatgttatcatgtgcgtaggagttttggcccaataaatgcttgtgcactccaagaacatcacaaaggatgagaatgagatgcattcttgctcttcgatttcttaataaatgtataatattgacttttcttggttcaaaagtttgtttttatctgttgcatcttgagtaggaagagatatttttgctatcttggatccacctaccaatcttgtttctgaccattctttctattcgtttgcaatttggttgctgctaagttggatcaaaacggctttattccatagtttcaaatgcctagtgctactggcaagataaagcgaaggaaagtacgcagagcttagagcttagatcttttcttagttttgtttacttacctatgatggagttttataggagtacgaataacgcatgcaagaaaactgaaccccttatagatataaagatgtacctttaaaaaataaaaataaaagatgtaccttgacacatagactaattggaaaacttacaaaaggcgtttttttctgtgtttttttgattaaaaccacaataccgtaccaatcacaatacttttaactgatttgtgtttttcgaaaaaaaaaaagtttgcgatttaatttgtcaaatgaacaatacattggaacgctttccaaaagaagaaaaactctttacctagcggttttaagtaaaagtgcattccaacaaagagatcaattaattttttaacagctgtttatattattatttttgtgccaatgttgatttcaataatagaggaaactaaaccggataaaccgggtacaaagaaagagataaagaccagtcttagctagtttgttttatttaattaaaaactatgaaaatgcaattacaggaaatagaaacataacaatgcttttagaaattttgacaattattatctactataagcttatatacgttctataatcaatttacttgtaaaaaaattacttgtaaaaatgattttttttttaattttccataatgaaactattcaacggatttaataatatgtatgttaaactttaaaatgtatattttgatttatttgtgtatatggtttataaatatatgttattgtttatttattaacacaaaaaataaataatgattaatatatatatttatatatatataatctataatccgcaccacaaatagatttttcaccaatcaaacattattccgtactgcttattttgtacaaaccacaattgtcccacaaatatatttttcacgcacttaccgcagttaattcgtactgcacggtcataatactttctccgtacactaaaaaccgcggtgaccattcagatccatagaaatcatccatcgtaactgtaacgagacgacgaccaccacttttcatggaccaaacgttttttctcggtatatgggccaatctcgtctgacagttcatttttctggaagcttaaatatttgtttactgattctataattcaccatataatctttttcttgtgtttgttttcactcatacgaactaacaatcgattcacggttaatcacccatcataagtttgctttactttaaatgcgcttaactttagagttttctttagatttttaatcaaaaaaaaaaaatagtgcattttaataacatatatgaccaaatcaatttatttaaattttccttatacaccactatatttcaatataagtagtaatatagaagagagaacaattaatttatgcatgtaaatccacacaatttttactaaaataaatagattagatgagattcttgtaattataaaaatcgtgtttactactacgttacaacaatctagacgtaaaattctactctttcttctatcgatgtgttatagattgatcgacaattataacaatcttgaacatacatgatatagagtttaaactctagacgtagaattatatctggacaagtcaggagctaagccacaatgtgttgctctagttatagttatagtacttttcttaagttagaaacctcaattgcttgaaagctcaagctcttgcccattgcccaatatagaactaaaaatggtttcaatggataaagtcatataaaaagctttatattttcttcttatgaaattctaaataattagtttaaggaatggacaaaagcgtcatcagtgatgtgataagatcgtcttatcgcatcaacagaatggatgggaaaccacaagtgaaatgtttctggtcaaattgaaacttggagaatattaaagtttttgaaacagaaagatttaataattatatcaaatctttttaaataaaaataaaaaataattatatcataagaaaatatcttcataataacatcttaataagtatcctattgagttacgcatctttgtaatagaaaccaaatacaaaataaaccaaatcaaaatttataatatttttttggaaccttgatacattatggttggttcaggtctacatcagattgtatatatatacttaattataaaactgacatattattatattttccttcggataatctaattaaaatacattttagaaaataatattttgataccaaacagtgaccaattattggtgaataaaaactataataatatttgttcttcatcttatacaaactagtataagagcttggttgctcaaaccattttctcttctctctgaaaagaaactcaactttttttctttatctttaacatcaaaaaactttttcgatatctttacaaccattaaacaaaaaatttggccactacaagttgaaaaagttttgattatatctaatcgctgaaatg

SEQ ID NO: 16533 - DNA, 3003 bp, Unknown
  misc_feature (1)..( 3003): 2750-1469P.txt file - cDNA_ID_1533012; gDNA_ID_2684104; Annot_ID_190343
attacgaaaatatagggtcgcttattgcaacatatgaaacgtataggaactaaattaaaaaatacaaataaaggtcttctccttcccgtctagatgtagaaatccctaaaacttgctactgttttgcatacggggcttgtacaaataaaaaccacccaattcctacgctttcctctacaaattgtccccttttttttttaacttttatactttcaattcatctttggttctgtagaattcccaggaatcagcattccactgtaagctactggtttctctaattaactgtagatcgatcgaacttttatagattcgggattgtttctcccaatatttctgtagaaattactacaaaaaaaattagattttcagctactctgagtctaccttgaatcgtttgaaatcgaaaaccctttcctttaatttcaaagagtcgcttaattagggtttaggatagatggagaagaagaaggtgacgattccacaagtgtgtcatggccattcaagacctgttgttgatttgttctacagtccaattactcctgacggtttcttcctcatcagcgctagcaaaggtgataatacttttggtttcttacaaaagtttggatttttttggtcaatttagttactagaactgtgcaaaaattcatgttgatcgaattgagaacttacaaaagtctttgagttttctctgagtaatacttatttcgtagttcatagagttttgagaatactcatgtcttgatggtttagattcgcatccaatgttgagaaatggggaaactggagactggattggtacatttgaagggcataaaggtgcagtttggagttcttgtctggataacaatgcattacgtgctgcatctgcttctgccgatttttcagcgtatgtgtttaattttttttggttcattaagtcattatttgcgtatgttttatgttcttagatacagcacatttatccaattttttgttatcttgttttgttcagcaaactttgggatgcgttaacaggggatgtgctgcattcttttgagcacaagcatattgtccgagcatgcgccttctcagaggttcgttcaacctatttactctctccatatagattctcgatttggtcaactggggttttgtaagatggtaggctaaaagaattggaattatctactgaaatactttaatcctgttttgtctttataggcataagcttttgtatctctgtgttttggattatcggttgtgggcaggttgttatgtaatagctcttattcaggcaactgcacggaatttaagtaaaaagctttgaggatttgtttaattaggtgatagtgaaattgttcttcagattggactattcttaaacatttgttgtttgtggatggtgtcgatccgcttttatgcatcgtcactaattgaatgacatttttctttcactaggatacaaaatcgttgctcacaggagggtttgagaaaattcttcgtgtttttgacatgaatcggttggatgcacctcctacagaagttgataaatctcctggttctatcagaaccctcacatggcttcacagtgatcaaacaatattaagttcatgtactgatattggcggtgtaaggtatgaactaaacaagacacagactaaatacacattgtcgcacataaaaaggcatagtttgatagacgttttgtttgcttttccgtctcctctactgctatcttatacaggttatgggatgtgaggagtgggaaaattgtgcaaacgttagaaactaagtctcctgtcaccagtgctgaagtgagccaagatggacggtatataacaactgctgatgggtcaactgttaaattctgggacgctaaccagtaagttctcattctaggaagagaatcaaatattttctaattaccttttgtatcttgctcaaaccccatctttgccccttgctttttcttccaagttttggactagtgaagagttacgacatgccctgcaatattgaatctgcatcgttggagccaaagtctggtgaaaaatttgttgctggtggagaggatatgtgggtccgagtgtttgatttctacactggcgaagagattggtaagtgactttcaaaacatctatgctatcatattccaaatcagacactgtcatattacctttttgtcgtccaagttaaattccagatagcttcaagcttaattggagtttctgactctgttataaactccatgagtgaagagcttaatagatctttgaagcatggttctttaagctcctgcgaggttttggttttctgattgtttcatttgtgtctgaaacttaggatgcaacaagggacatcacggtccagtacactgcgttaggtttactcccactggtttatcctatgcctcgggatctgaagacgggacaatcagaatctggcaaacaacaccagcaaatcccgaagagaacgaaactagctcgaggagagtgaagcatagcgtggatgaagtttcaaagaagattgaaggctttcacatcaacaaagaaggaaaaaccgcagagaaaccatctgatacttaagctaaactgagcgtacaaaaagcctctatatgtcttagttcatgatttgctatgttttgtttccagactgaatgattatacagagaaaacaaacaaagatctccctctcttcttttgaatcaaaacatgggtgttaaaatttaatagttttctttcaagtgtctttttcaatattgaactaaatttagggacgaatttgtgatttatgattatttgactttagattgggcttgggcttttttcgcaggttggggtataagggtaaaatcgtcatttgacagaccgacttgtctctctctatctggggaaaacgtctatcgggagactcctcttcgagctcatcttcttctctctctttttatctttggttgtgcgatctcctttctctttcaatctccaaggattttactgtgagatatttggcgggaaaatg

SEQ ID NO: 16534 - DNA, 3003 bp, Unknown; identical to SEQ ID NO: 16533
  misc_feature (1)..( 3003): 2750-1469P.txt file - cDNA_ID_1533012; gDNA_ID_2684104; Annot_ID_137104

SEQ ID NO: 16535 - DNA, 961 bp, Unknown; identical to SEQ ID NO: 617
  misc_feature (1)..( 961): 2750-1469P.txt file - cDNA_ID_1533420; gDNA_ID_1592380; Annot_ID_152372

SEQ ID NO: 16536 - DNA, 3003 bp, Unknown
  misc_feature (1)..( 3003): 2750-1469P.txt file - cDNA_ID_1533420; gDNA_ID_1972175; Annot_ID_179987
cagcagccggctaataccgattcttgatagttctgtttttggatatttcagattaacttgtgtcttacaagaatacatgtaaacattgataccgtttatagcgaaaaccgttgctttacatcgaacattgtaaaagcctaaagaaaatttattgattaatgtttctgaggattttgaaggtaatgcatggtatatcactcttacaattattttttcttataattattccatttataaccaagtttttttatgatatcaatatagttgattcgttggggataagaaaccaatttcttagagttttatgatttttctactaacctttgtttagctaaaatatttttgctattcaatcatatttcactattcatctaacatatatgtcaaaactcaattatttcatgtaaaacagaagaagaaaaaaaaacactgtttttccacatttctactgttaggttaggtatgggatatatagaatttagggctcatggatttatggtatgaataccagtgtagaattgtacgcactagtcgcaattcgcaaagcagaccaaggcacgtccaacggttagttgaaatagtgtcattttaaaaactgagactttcactatgtggcccttctttatgaccgttagtgatccccaccacaaactccatcattgacgcagctaactccggcacaactccctctataatccaacggtccaaatactctttcacttttctccaaataaagttatatttctaatcacatttctatttctagattagaagacaattgagaaaacgactacaagttcacacttttttattgaatccaacggtccaaagattctttcacaaatactttgaatttacttgaatcaattaatctcacttgctataatgataagatattcacctccctcttataagataacaaaattagattttataaaaagtgcttaaactataaataaagacaaaactagtaactgagaaggcaacggacacttgtagctttatgcaactttaattattccctacatgagaaaaagaccgttgcgataatataaagtcttcgttcacacacaatctcgaagaaaacaacaacagttttgatcactctgtctctcttactctatcttcttcccaagttcttgtcttttgatggccgaaaccctagaaccctccctcgtcggggaaatcgacacttctgcgcctttcgagtccgtgagagaagccgccactcgctttggtggatttggtttctggaaaccttcttcccttaacatctccgaagcttctcaggtcttatttctctccttctccctcaaagtctctgtctttctcactgatttttgtccatttctttgcttttggggttttagttgaaatgggtttttagattcatcaatttctagatagatcttgtctttagttgtttcttgtgattatgatgcgaaatttcgaatctttggttgcagaacgaagttggtatggttttgaaagcgagtgagttagagaaggaactgattgagaaagaaggagaaactttgaaggtgttgaagtcacttgagtcgaccaaagccattgttgaagagctcaaatcaaagatacagaacaaggaggataaagaaaattgtgacatgaatgttttcaaggaattgaaccaagcaaagatgaatctgtgcaagacgacaaaagatttggctgctattcgcgtgtctgttgggttactaaacaagagattggaagaggaaagagctgcacttgagaagacacgagagagactaaactctgagaatgcagctgaaatgtccatggagattcagagactaagttatgaagctaaggaatttagtagaacaggagagaatgttcggtatgcggttaataaagctgtggctgagattgaacaaacgagaaacaagattgaagctgctgagatgcgtttgatcgctgctagaaagatgaaggaagctgctagagcggctgaagcagttgcaatcgctgaaatcaaggcggttacaagaagaggaagaaggagaagaagaggaggaaatggtgaggagactatgcaggaggagattcttgagacgattgatgaaacagcaagagaaatcagaagcagtaggaggacacttgaagaaggtttggccaaaatggaagcagaagaaggaaattggtggtggacagaacagaggaggagatcatcatgttcggctaagttcaagaaccctccttatatgatggatgtaaaaggtctgaatatgatgatgaatggtgatgggacatcatcctcagttgctgtcttgaaaccaacaatgtctattgggcagatacttagtaggaaactacttcttgctgatgagtcagcgatgatgatgaatgggagagtttcgttgggtcagattcttggaaagactaactttggagatagagagaaggaaaaaaggttcaatgggaagaggaagcggttcggattcgcaaacttgtctgtgatgttaaataaagagagtaagaagaagaataagaagaagaagatagctttgaacttaagttgttaaaagagtgattgaaatggtctaatctttacattaggacttgttgtttgtgtgttatctatttgttttcgatgtgtttattggtgtatgctaaatattgaaatgagatgtgatttgttatatctttatgcttattccaaagtccaaactaattgcatattcgaagataatagccacatgtatgagatgacgtggttggataatagcttgtagtgttaaaatacctcatttgacctttcgacattcatacgcaatcgactcattccacggatctgcttactcattgattctcgataaattgttcttctcccacagacaccagattctaccaatcatttgctcgaaaaggtaaaatctttctctacaatttcggttgaatcttttgataactcgatatatctcttgtaaagactcttgcttgaatcttctgatctttttttctttatcaggaatcatg

SEQ ID NO: 16537 - DNA, 3000 bp, Unknown; identical to SEQ ID NO: 14839
  misc_feature (1)..( 3000): 2750-1469P.txt file - cDNA_ID_1533468; gDNA_ID_2684228; Annot_ID_192135

SEQ ID NO: 16538 - DNA, 3000 bp, Unknown; identical to SEQ ID NO: 1383
  misc_feature (1)..( 3000): 2750-1469P.txt file - cDNA_ID_1534189; gDNA_ID_1620395; Annot_ID_155747

SEQ ID NO: 16539 - DNA, 1407 bp, Unknown
  misc_feature (1)..( 1407): 2750-1469P.txt file - cDNA_ID_1534193; gDNA_ID_27606; Annot_ID_146624
  misc_feature (22)..(22): n is a, c, g, or t
  misc_feature (732)..(732): n is a, c, g, or t
acatgtcacacacttaccatanatakataattaagsatactcgcataaacctatatatacagtctaagatttctagctggtccatatgcatgtgatctaatcaaaagccaaactctccttgtctttgctatattaacaatcatttaatccacaccaccagagatttcaatcttccttttgctactctcttttagatcgttcttgtgaaaatcgcttgcaaataacaagcccttcgtccaatctttattagctcgtaagkttcaccccattgctccttttagggttttttttttgttttgtttctctactcacttcatgcatgaaccagatgatgatgcatcggcgtttgtgttttgcattttaattattcaaagatacatacatattacatgtagtatcgtttcatatcttgaatagtatacatgtgtgtggtcctgttgagattgacccacaaatattagagtaaactgsggaattgaaatcaatcatggtggggatttcgsaatctatgtgtgtttctaagatattattgtttcttggaaattaattgttgttgcaccataatataatttatattatatagatagtctaggaaaataactcaagacaaagagtgtgtaacacactccaacctcagtgacttccacccgtcaagcttttcggctacatagcctttatatacgattattttacatatagttacagatatatacagtactgcttgtatatttntggtcttataatactaccttatgtcattatatatagtacatattatacaaagtttcaatcttttcatttataagcatcgttcggtatgtagaaggcgaaacaaacccttaaacctaatatttttttctggtccaaaaactttctctatcaagcttttgcattttttcttttaaaatagtaacagctcctccattgttgggtggtcccataaaaatacatcataaccatcatcagcaacatataatagcgatagccttaagcttaaagatccaagcttttggatataatatctagttacatgtatatatatatgtgtttgtatatttataggtatatagtatattatcgtgtgcgtccgtgtgtaacatcactatcattacccaacatacagcttttggaatttcattggacccaagagccattcgatcccthtcttataattaaatataacgaagcttgtaataggctttggttttggtcccaaatacaaaactttaaggttgtgccttgtttgtctaaggttttcgcaatagcttccaaaaagacacgcttatgtttatatacatttcattttccttcatatcattctcttctctgccacttctccatcttgtttcttactcatttctctaacaattttccaaattaaatacgtttataggatcattgtggatg

SEQ ID NO: 16540 - DNA, 3003 bp, Unknown
  misc_feature (1)..( 3003): 2750-1469P.txt file - cDNA_ID_1534269; gDNA_ID_2214479; Annot_ID_183265
tgtacttggtgttttgacatcacaagggtccattggtaccttgacgttaacggaaccttttacctcccggggacgctgagacgtgatgctgagttcggtcgtgaaatgatatatgacatgtttgtttgtaaatattttatgttttcgattgatgacaaaggagtcagaaaggacacttgaccatcacggaagcgatgacttccgtcggacggtaaaaagtgatggtcgaggtttggtgagaaatctaaaaatgtgacggtgtttgcttgataaatatctttattttggtgattgtattgaatgtatcgttttgatttctgtttatacttatatcggcggtggaataattacacatgacctgaaaagtatgcgtttgtgtttacttttatgttgtagtacttgttgtgtttttcagctatgaaaagtctacatatttcttctgtgtgctaacttattggataaattggatatttttaagagatctaatgtttacacaaacgtatggtgaacaccaatggggatgtttacacacacttatgatttatgactgaaagagatgttaatcgaagtatatactccattgattaatgttaatcaccgaaagagatgttaaacaagcattaatgtttacacttaaatgtgatggaacgaaaacaaagaataagtttaaatttgttgtcatggtctcaatgaaaaaccgaaaacgttgtgctatcaaattactcaaaacgttgagctagctaaacttggcagaaaagtatcgaatgatgctaaaatgcaaaaaaccattaaacccaatgtacggtttatagagttttcatatgccaagtgggacatccacgtggagatcctatgccacttgtcccctctctgtctctttcatgcttcaaacttatttggcttttacgtggattctcacgcccgagtacgtcgattattacaaaactcacataaattaatataaacactttatattttgttttgacctttttaccccttctcattgctcatcaattttcatagatctaataccaaattatcacacatataggagagtcatctaacaattagcacaagtcatgagtgaaagagactaagcatgaatcataatcatctttgacataggtgctcaaaagtaatcaattttttcaactttactattcaactcaataaaagaatttttaatcaacaattcttttcaagatgtatcccttttttttcttgcaactttttctcaactatattaatatttagtatactgctacttagctactcgatgttttgatgtatcattgatcattattgttgactaataattatttgatacaaatattttaccgacatatgtaagaacaatagtgtcaaaattgaagcatctcaagggtattttagaacagatacccaatttatttatttttataatttgtcaccttgtttttcacacacaaatgacaatatgacgtcattttccttattagaataatttttttaacaaaaaaaagaattatttattttcgtctctcttattgcttgctacgctcaacgctgtgcataagcattctctttctgtggacgaaactaaacctgagagaaaaagccagaagaaccaaactcagaccgagagatagagattgagggagagctctagctctgtagaaaagaaggattcattcatcatatccagaaatggctctaaagtttaaccctttggtggcatctcagccttacaaattcccttcctcgactcgtccgccaactccttctttcagatctcccaagttcctctgcctcgcttcttcttctccggctctcagctccggccccaagtcagtctctttctctccatcatcgtctctcttatctactttcgattctctctgtttcatctttgtttactgtgttctgggttttgcttgttcttatcgatattggatctacgttttctcgattttgttcagtgttatttgcttacatttgcttaatctcgagtgtgatttcaataaaagtacgttcttttaatctgggtttataagaatgggccatcctctgttctcaggtgattcattaatgctctttttcattgaatctgatgtttgttgattgttccctattattctcacgtttctctgagattgccccatctatcaaatcgttgcctttaccatatttattctgcatcagattatgtagattgctcgttgattggttgttagttaagattaacactagttatcttctttatggtataatgatctttagattggttaagacttaacagacattgaggaaagcttcttagtcaaagagaaagttttgttttgttttctctggtttagtaatttttaatggtgaaatgtttatccacttgtttcttactcatttgatgagttttctcttttgtattgacaagagattcttgaacgtatcagtttacgtctgtttatctttcttcaaagacattacgttggatatcacgcttcgtggcctttctctatgcatgcgtacttcgtggcttctctctttagtttgcgtccaaaattttcacacttttctgtaatttattattcattctttctctgttttgaagacatttggctctttatcttgtctttgtctgatcagtagtcactacatttgtttctttcacaatctttcttttttgcttcatattgaactgcaagaccaatccatgaatgcaaatataaaatattgtcttacggttaaccatctctaagtgtttgctagtcatgaattgtgaaattgtttcgcttcaaacatagaattagttgatttggaaatgtagacatgaatgcttatctaaatacaataaactgtgttcttgtttcagttgtgtatcagagatgagaccttgactggtaatttcaatggagcataattaaatgctaatgatacttattttctggttaatgcagggaggttgagagtttgaagaaaccatttacgccacccagggaagtgcatgttcaagtcttgcactccatg

SEQ ID NO: 16541 - DNA, 3000 bp, Unknown; identical to SEQ ID NO: 12962
  misc_feature (1)..( 3000): 2750-1469P.txt file - cDNA_ID_1534314; gDNA_ID_2214583; Annot_ID_186552

SEQ ID NO: 16542 - DNA, 3000 bp, Unknown; identical to SEQ ID NO: 8298
  misc_feature (1)..( 3000): 2750-1469P.txt file - cDNA_ID_1534390; gDNA_ID_1971712; Annot_ID_175123

SEQ ID NO: 16543 - DNA, 3000 bp, Unknown; identical to SEQ ID NO: 8298
  misc_feature (1)..( 3000): 2750-1469P.txt file - cDNA_ID_1534390; gDNA_ID_2926199; Annot_ID_141428

SEQ ID NO: 16544 - DNA, 3000 bp, Unknown; identical to SEQ ID NO: 8298
  misc_feature (1)..( 3000): 2750-1469P.txt file - cDNA_ID_1534390; gDNA_ID_2926199; Annot_ID_201714

SEQ ID NO: 16545 - DNA, 3003 bp, Unknown
  misc_feature (1)..( 3003): 2750-1469P.txt file - cDNA_ID_1534466; gDNA_ID_2214534; Annot_ID_185032
atataatctgtttgtgacaaatgctattgaaaaccccactaaattactttgaacatctcacttctctatagtctgaagatggagctgttaatcgttacctaatggaaagtggtgttgttggtttctgcgttaaacccattgagtttggctctacagaaacaaaaaaagtaagtttctttcgcacgctacttctactcattttgactataaatcaaagaagaataaagaaagcattttgaaacttaatacttgttgttcaggttgctttatacatactcgacaagattatgtcgacggatcaggggctttattactgctgcgtcttggctgatcggttttacgttatcgatgagctccttaagaaggtgctcttctatctttctaacatggtcagacctccttcatccttgttcagccttgttactggttgctacgtcaagctctcccagaactccaggttttcttgctaaacctcgtgataatattttgatattgatacaaatgattaggttttgtaaaagcaaacaacagtttgagtttttggtatatgcattagggctcgtaacggaataaggcgatacacgcctttcttgctgtttgacggcaccttttccagattatatgctgtaagatttcaatctcttgtgttttttggaatttgtatggttttggttcatgcagggaatagtaaagcttatgtgtgtcttgtctgttttttttgtaggaggatccagtggctgctaacaatcgaattcagctgcttcagaatctggacaactaaagcaatgaagtactcgagacactgttttcaatgaggcaatgaaaacagaacagcccccacagagtacgggtttagtacgcctacgcgtaaacgctaagtaataatttactaaagacataaaaactctatgaaaagtcttatgttgttgtttggtttaatatcttttggatgactctcgttactctttcaacattgttttctctcttttggaatacatttcaatgcactttgccattttctatctatctttttcaactggttgatagcaatcggatttagctaatttgcttaactatttgcaacttgatgatcttgattgatataaaaaataagttagggtaatgttatttagatgtaaagcttctggaagttgtggttttgagttcctctgagttagtttaagcaactaggacttttagaaaagagacctgaaggtgagagacatttcattgcatggccagggcccagaggaatattgattattaaggggtcttttgagttagccaaacttgcgaaatcattccacatccatagaagtctagtatggggggttttgtttgccatagttgccccattcctattatgagtcagtaccattgccaagcaaaatcagctagaaaccaatccccaactttggatagaataaacattttaaagaatttgtcacattgaattatggatagtatttactactgactgtgaatgttacccgccacatgcctctggagattagtcggaatttggctccggaatcttttggagtaaaatagtcaaaacatgacggagtaaaaaactaaaaaaagcatattaactcaatttacattttcttaattcttatgggttactttacccaaaattgaaccaccgtcaaaatttgagtgcaacagtaaaaatcagagtctcgaatccattgggttctccaattttcgccattgcaaacagctaaaattccaccaaatcccagctcgaatttggaacccagatcgccgaatctcgtatggtggcgttaaaagtccggcgggcacctcacgtaggcctcagccgtttccgcctcttcgcagactcttctgaccttccccaaaggtaaaatcacaatggcccttgattggtttttgcctcatcggctctaaagtttactgctttcccctgagaaaatgagtaaaattactactttttcatatttggtattgttagcaatttgaaagtaggaatgattagtagttggtttagtttctggtgattgagctgctttagcttgattagggaatgagtttgaatctctctgcataaacaagaattttgcattgtttttgactgttgtagtatctccggttatttggcttgataagtaggcaatgatcagtttttgatatctatagttttgaagatcttagagatgttaaagttttggaggctactgttccttgtttaaacaaatttgagtctgaggtctctgacttgtggtgtggttgagcatcctgttttacttcatgtggctgtcgtggtgacaccgaatggcggtgtatgcttatatccttaatctggtttataggattcactctaatgacttcatggaggttgataatgttgtttaggatgacttgtgatcattgcttatttactatttttgcataattgtttatttactactaaggtcatccccatctcttcttcttcctcttctttattggttggttatgtttttataatatagttttccttcacttttaatattgtaggttcagtgaaccttttgttctgtgtctggccagatccaattctatctcctcccactgtccttggaaatcccaatgccaccaccaccaagtagacctttttctatataaattcttctttttattctttaataagtaacccccttcaatttaggctttgtttctaaggcattttctttcctgtaatctgggtttttgtgggtccaacacactctctctctcttgattttaacaacttggcaacttcattcaatttcaagttccaaaacaagagagagagagagagagagagagagagagagagagagagagagagagagagagagagagagagagagagagagagagataaagaatattttattgtgtccatgagttggttaggtgatcctccaattccaattggctatccatctatcctcttcttttatttatactctcagaaacaagaaatcaaaaaggcagcacaataatactgtctaaatg

SEQ ID NO: 16546 - DNA, 3003 bp, Unknown
  misc_feature (1)..( 3003): 2750-1469P.txt file - cDNA_ID_1534667; gDNA_ID_2214704; Annot_ID_136937
atcggattagaatcttacaatttatgtggaccaagcttttactttttctctcgaagaatattattttgttcaagaatcatgctcagatgaagggtgtgggtgtgagatagcccaaagtggtggggaataagcagagagatatgcttattcttctcttgattgacggtatttttcgcagccacgaaaaagagatcaggctgggtttgatggattggatcgtgtgtgtgtcaacaattaaaaaccctattcttgaaacatgtcactatacaacaagatatgattgtctttgtgagattctctcaatctcacttctgatcatgaaggaataataactcctatcggtttcttactttctcttgtgtgccacttccctttcaacaatttgccaagattctttcccatttaccacttgactaaagtaaaccagtgattatgagatcccatgtcagttgaagtaagcttagacctagagtaatatgtataggacatgaattaatttactaacgccaattgattttgtttaaagattaaggaacttatttggtccaagtaagatatgttgtccttcatagaatgagaacaatttgagttggaccaagacaatcatcacctcgaaagataaggattagagttagaaatccatgaaacttaacatagttacaaactcagcatatatttggaattgatcttcttgattcttatattaattatatatatgaccatctgaatatctatgttaaccccctcttccattaccaccaaaaagtgcttcccgtaagatcggagacttgccctatatagaaatatttgttttggtttggtaaaaagctttctagggattataattaatgattgaaaaagggttagtagctaagtgaggttatatggtcactcacacgatgaaaccttgaagaagtggccataaaagataatggcaggctggcgataatggctactacaaactcccttataagccatgcatgatcatagattcatagttactctttctctccgataaatttatatatttatgtttcaaaagctaataatcttttaagcagttttcagaagtgagttgtttagctttaagaatatacaagaatttgaatatttagagggttcattttcggatatggtctaaagaaatgggccgggtatgcattgtctcgacgactatgaccaaactgagaagaaaattgaacgtgcaacctcctagctaagtgacataccaatgacttatagaaatctcatatatgtttaataagtcataacgcaaaaattatttctaacaaaagcaaatgggttgattttggaactatatttaatggcatagaaaacttcttcgaatcagaaaagaatataaaatacgtgtgagttaggatgtcaccatagaaaatctccacaaaagcgtgaactcgattctatatatataacattcaatcattcttactaaaaacatctatatatatatattttaaacagtatggatccattcattctgatctgtaccagattgcaaaaattagtaagatatcacaattaaataaatgaaatacaaattgagttattttggattttcagatgaaaccaccaaacaaatacaagttgacttgaatgttctccaacgctatttttttctctattatattttataactaattaattcattaaatcacatgtccaaatatttaatgatgaaacataaagtaagtaagctagtgacgagagaaggacacctcattctcattacataatgtgacgagattgagctgtcgttttgttgtaaatatatggtcgggggtcaattattcatatgcagttttaggtcatttataaagaccattaaaaacgtctttaatatttcaacaatcttataattcaattattaagaagcatctagatatggattcacattagagttcgtattctttgacagcaaattcacattagacttttgatatatatattgtacatttgtaatatagtatacgaaaatattacttgaaaactgatgttatgtgttgccatgatgccattggtccatgacttttccacacgaaggccaaagcatactcttatattatatgagttgagtcattcttttttccttttgacggcaagttgagtaattcaattctcttgtcacttaccggtgatataagagttaatcttataaatagttttctgaaacttaatatactataacaatgtaaaagtcgtcgctttgttatttgaagtgaaaattaagcaatgttatgatatttttactaattaactcaatatgaaaaacaaaaatcctcttaactaaaacagaaacataaaagacgacttagtttttgctttagatctagactcataactcaaaaaacaatttcattataaacttttgtagatcttacaattttaaaataaaatgtacattaatgttgaaaagcaaaatcttaaattagtgtatactactactttttttttatcaccgtgatagatcattagatccttaacctcaatccctagagcctgcttattgcctttaagcattgtgcaatcactaccaaacacactcaaaactaaataaatataatttataacttatcaaataaaataaatactatcaagtgtgtatgaaatcgatgacaatttatttattaccttattaccatttgtgtcttgaagtacacgttaagctatttttatgtgttataaaggcttcttcgtcaaccaattacgaaatcaagcttttgaagcttctcaacaatggcggctattccttcccacaacaaccttcttaccatcaaccacaaaaactccataaccggttcttcttccctaaataccaatttctcagaaatcaattttcccgccaaattccgagtagctacgagagctttgtccagaaccgacgagtcgtctttatccgccgtgatttctcgcctcgagcgagaaaggcgggaaagacaaggtttattaatcgaggaagcggaaggagctggagaactatggatg

SEQ ID NO: 16547 - DNA, 577 bp, Unknown; identical to SEQ ID NO: 601
  misc_feature (1)..( 577): 2750-1469P.txt file - cDNA_ID_1534688; gDNA_ID_1592240; Annot_ID_152153
  misc_feature (83)..(83): n is a, c, g, or t
  misc_feature (92)..(92): n is a, c, g, or t
  misc_feature (95)..(95): n is a, c, g, or t

SEQ ID NO: 16548 - DNA, 3003 bp, Unknown
  misc_feature (1)..( 3003): 2750-1469P.txt file - cDNA_ID_1537635; gDNA_ID_2213621; Annot_ID_195719
tactccatcttcagagcagaaagcaaccgagggcactcccgggtacatatatataaactaattttctgttttgtttgtgcttccatgggcaagtgaatcttagatgataaaccggtgtttgcttactaatactttgataggagattcttcagctttcttgttttattgcacgtagttgatagtgagatgatatattggtcttgtggaactaaaatatggcgctttatgttgacgttttcttcttttggaaattgtttcaggagtaccactagagtttcgtcaatccggcaactttctagcaactttgctcagtttaataacctgaatgcttcttcccgccagagaaaacctttgacgataaaggtatactaattaagacgtctttcattgactttagtactctatgaaaaatctccatttagttgttttcctcttatcagtttttgttctgtctatattctataggatgctcaagctttaaacgagtggcggtttacaaagctaaaagagtacagagacagaaacattgaagtagaaaatgaagcttttgatcggtacatgagtaatgtgaatttactcgaagaagcattttcatttacatctgttcctgatgaagagagtcatggaacagcagctcctgagcaaaacaaagaggaaaatattgtttcagagcttaaactgaggctgagatcgaactctgcaagaacagagagctttaagaagcggatcgcggagacagtcaaagccggtttggtgaagcttaagagactggatttaggcagttcttcagatgatcaagatgatatcaaaaggcgggtcaaaagaaagaaatgggaagagaaaggttcagctttgaatgaaataatcgataaactgaacaaagcaagaaccgaagaggatctcaaatcttgcttagagatgaaatcaaagctctgtggtcaagtttctcccactgctgcttccgagaagaacaagatctttccgggtgtagtccgaaaagttgagatgagtgaagaagcacttcaaaaaatcgctgagaatctccaatcttttgacaaagttggaatgttgtgaagtcgagaacatcctgtggatgaactgaaaagtttgagtggcaagaaaatttctagatccttcgtgaccacggtattgtacaatgatcaaacatccctcaaaactgatcctgaagactccaaagactcaagagattcttgtaaagtagtgttgagcatcatttagatattagaactcagccatggataaagctgttgattctatctcattggatttttttcactgtgtgttgttgctttgttagatttgaaattgctcattggattacctttgacttaataaatagttggtttggtttggtattggataaccgctcagtctaattagaccggtttgtttttttggaaaaaaatgaatccatccatccataggccactttcaacacgtatatttgaaaacgactaaaaccaaactcttagattctagttttgttttgctgccccaattccactattgatcaaaacatatccaaaagtttttgtggaactaaaaagtaaaaataacgtttagtttgtttccaatttcaaccatatatatcttattcatatatgcatgttgtggttgtctcgtgtgtgtagtattcatttacattatgcaaaccaactggaaacatgttgaatgggttatgggttggtggttgggacttgaggatcaaacaactcaaatgagctcattataagttaagctctcaataatcattaatttatttttgttaccacctaatatttctacgaagggttggtgtaacaatttttaattgtaagataattgtgtaatcattttcaatattaatttttattatgtatttattttaaaaagttatataatacgtaacacatttagtacttggttttggtagcttcatcaatgtaccatccgaagttccaaaaaataaaaaaaaatgtcgatttcaccgttggtgaaaaagaaactaaattgatatgtattattcattttttagaagagattatgggtttaaatctgaaacttcttagttaaatttttaattaatttatttattttgcatgctttattatatatttgaaattagaatctacatgattaatgatttttttctcagatagaataaaaaatatatttactgataaattattcttttacatctttccggattcgctactaatgtgtttttgttaactttaaccagattgcttatggattatgatatatagtatccattacttaaaaagtaaaagagatgaaaaaccaagaataattaatgtcaccaaactatcaacaacaacaaaaagagagtgtaatattcaagataaacgaatcctattatataaaaaaaggtgggaagaagttgctgtctaatgatgtaattatgttaactagtgtgctaaggaaagaaatcaagcaagtctcacacatacacatgttatgacttatgattagcgacaagcatttcattttattttatttttgctaagcaaaccttttgtttagtaaaatagacaatgtgcaaaaaattccaaacttcttaaattgaaaaaaatactatatttaaatttacctttttaagtaagaaattaaaagattttgtagtacactacatgttttaaaacaaccactatccaaacaaaaacttggtcaccgaataaactgtagaaatatcgatttccgtcatttaaattcactttatttttggttgtttttttcttggaatatgcaagagtaatggcgtggttgaagacacgagagagagagagagaatcctaaagaaaaagccaaagcatattaagaagaagagaaccaaaacgaacaaacccaaccctaaagaaacactattattaaacctatatttatagacatttaaagagagagtgaaaggtgcagaagaaaacagagacagagttcaaataccttaagatcacatcatcatatagcttttgtatcattaaaatg

SEQ ID NO: 16549 - DNA, 3003 bp, Unknown
  misc_feature (1)..( 3003): 2750-1469P.txt file - cDNA_ID_1557475; gDNA_ID_2684118; Annot_ID_190881
cacattcacttgatagcgtaaccattagtcattttagtaccatcaatagttggactgattagtgagattaatgaacggctaagatccttacatgtatataacacacattggtcgtttttttattttatttttctgattatatcgaaaacaaacactttattaaccaaaccagtcaaatagattgatttgttctagatctaccaaaaccggtcaagggaattttttgggtaagagtaccgattcgtcaaaacagcatcaacgacaaaccggttagcagcttcagtatagtgaaccccatcccatacaattgctttggttacatcacgacaaatagttgaaccgggttgaccacacgttgcttttcgatcatagttgttaggtcttcctccataaccgcaacaagccatcaacgggtccacaaatcctgaaacctcataaaccaaataaaccaatcaaaaccggttaactaattaaaataggacttttatagatgcggtcgatacgcaccgtatagtttgaaatcggcggagagtttatatttgatggagtaaatatcaacgtagacgagagtggcgtctttgaattgggatctcagttcgttgcagagactaaggagtcctttgttgaaggctttggcgacttcattgtgaacccggaaacaaccaatcgggtcaagatccgaatcgttatgcaggtgaatcgccaattcttttggtgcacagcccaatgggcctgtgttgtgtacccaaaactttctccctccgtataaatatacagtcttcagtacaacataccaaatcacaaatcagccgtattaggtatggtttaatagtcaactagaaagttttaaacaattgcccatttgccccaagaaagttggaaaatcaaatatgggtagagttttttagttttacttaaataatgtccctgaagtttttagttaccgatttaccaccctaataagtttatgaaaaaataagttttggggctaacagtttacgtatatgtaaaaataaaaaaaaattgtggaagaaatgaagtacctgtatggctttctttatctcaagaagcatggaaggaattttttcgacaacgggtgcataggttaaattcgaatcatatagagcaagtaaaagatcgttttgtccaatatcgatcatgtacaacgcgtttctaaatccattatcatcaataaggtctcttctacctatcaacaaggaaacatattttgtaagtaattaagacgagatatgtataaattgtttgggacaaaagtaattaccggaagagataagttcttgagaacggtttttgaaatggacgaattgacgaatttgaatggcaagagggaaggaaaagatcggaagagcggtggcgcccgagactgcgaaattgactcctcttttgaaatttggtgaaagtgaatccaaatatggactcaaatatgtcatctttaaatgttcacctgatcatatatcaaaaggtttaatcaaatatataacattacatgtacataaaacatatatttaaagaattgaaactcttgttgaaaaaaaagagaaagaattgggactcacagtagaagtcaacgatgagtcgaccgtcaccgagacgaccagtgcctctatggaagaaggtaatgccatgagggagtccgataggaagtccaactccagcaagaactcctccggtgtcggagttagagtcgccgaagtttatcaatataggtttcttgtttgacttgtaactagtttcagagttagagcaaaccaaaagagagagacataaaactaagaagaagcattgtagagaggaaacagtgtaatccatttcttttgaattcttgctactcagataattttaatcaagattcacgatctgaagcttttacatatagtaatgtctttggcttagaaagtcaaattttttgaatgtaagtcaataagtactattgcaagtcgcattatataaatctctaaataatctcaaagtaaaagcaatcaatcaacctatagatccgatcggccatgttctataaggattgtcagaacttgttgagctattaaaatactccgtacaacttatttgattaatatgggccaaatccgaaaataaatggaccttatcgaatattttgttcgaagtccaggcccactaatcgagtgcgaaaaaacaaaaacaaatgcggtgagcgtggatcgaacacgcgaccttcagatcttcagtctgacgctctcccaactgagctatccccgctacttgttatcgaagctaaaataataaaataaatacaaatatttgtaaaagcgagaatttgtgattttttttggcaataagtagagaatagttgtgttccacgattcctcctctcacgttcgaagaccatttcttgttctttggacgaccatcggcgacagtgttaagtctagagtcttcttcttcttcggcgtagttttttccccggtaagtctccgttcatcgccgaatctgtatccctctttctctttttgtttacttgatcgtctctttcgattatgtatatcgcgatcggagtccgtcatctccagatctgtgtgtatgcgcttaatttcgttatggatgtgacatgatttcttgtgattcgtttccttagggttgatagatctgtatcctgcatgatcgttatagatagtgatctagatttgtcttttttcagatcgaaatttagatctcttattgttaatcatgttgattttattgaaacttgctcatacgaatgagatccgagagcatttggaaacataggattgctttgcgttgtaattgttttctcaagtgatggatattgaatctatgtgattgatgcaaaatgagttccagagaatttataatcctaggattgcatgataacttctttgctttgtgattgttttctaaagtatttattccatatgaatgctgcaattgagtatgcgtttagactgaaggtgttatttgaaaactctgaaacaggcttgaaaaatg

SEQ ID NO: 16550 - DNA, 3003 bp, Unknown; identical to SEQ ID NO: 16549
  misc_feature (1)..( 3003): 2750-1469P.txt file - cDNA_ID_1557475; gDNA_ID_2684118; Annot_ID_137179

SEQ ID NO: 16551 - DNA, 3003 bp, Unknown
  misc_feature (1)..( 3003): 2750-1469P.txt file - cDNA_ID_1557512; gDNA_ID_2213619; Annot_ID_180911
cttgttgaacttaaagcttgtatttattcttaaaactctttaagtaaacaagatttccattctactcgtgatattgcttctagttgagctacaaatgacatctagtttgtatatatctttcgagtcttggtcatctaacttattgttttggtgtttgctattcaggttagcgagggaagctggccttgaatttgtggaaattcaaagtttaacagatttttatgatgataacaggttcgaagtctcccatacttgtagattctcaatcttttatcatgagcttttgtatgtcatagttgctcctttcgaaggttgtattacaatgctgatgttgttcaactcttcttgtcagagcccagtttgcaagcttgctgatgaatgctggcccgaatttcgttgaccctaggggaaaacttcttccaagagcatttgatttgttaggtaaccttgccatcatattatgccatcttatcatatctaatctctagttttgatactttatatccttattttgcgcaggtctgtatgcaacattcatatttcagaagcctgacccagatatcgaacctcctctaacgaccccaataccttttgaaagctccaataatcatgatgaggcaagtacctttgtcttgtcatattctcgttctacacaagtataaataactctaaaatttccttttcacttgagaaaaagagtctggctatagctttagtatggactgtatagttttcagtttgtagcacaacagtgcttcagtctcagctccttgcccggatgttattgtagttgatccatttattaaattgtttttgacaactttgcagagagaattgccagttatcacggtgatcactgacgcaagtgcaccagcagaagatccatcacaaggactagggaagattgttgaacaaaaaggaatactgggaccaggccctgctgatttacgtttctctgaagcaatttgatgccttttattttaggaagatgtactgctttggtgatgtagtgaaagttgtttatcagtgccacagatgagctaaaacgagcgtctcggtttgttataatatcaaaccacatttttcatgtgttttaacaaacattttcaacaatgttcaacaacactttactccacgattcgtaaatgaaataagcaacagatttaaatcttgcagaagtggtagctggattttggtacctagccgaccactcttcctctgaagagcaaaatgttccatcctgggacaattcgcttcaatcagaatcagagtcatgccttctttttttctccttcttctctttcttgtgcttctttctatcatctgaatcacgagcgcttcgcttctcatgcctttcgcgtttttcacgcctatcatgtctttcttccttctctctctttgcaggtttcctttcctcacgcctatccttcttttggtccctctcaacatcatccggtccatcttcaacagttttgacccctgatgtatctgctggtaagcgtgctgaatctgcatcttctttctgagaggatgcaagggtgctcggatcttcccaaggtcgtggtgctctgtacagagttggagaaagacatgtgagacaagggacaaaggtaaactaccaataaaccataaagccaccaaaaacattaacatagttaaaaattagagttttttacgaaagaaaaagaacttacttagcatatccaagaccgtgaacccacacagcatcagcattccctgcacctaagtcctctgctgtcgaacccctcttcacaagttcagtaaactcttgcttatcaaggcgatttccttgtggccttgtagaggactttggtgccaagccaagagcctccctcatggcctgctcctcttgttccttaactctttgaatctcttctttcatagcatccatctcggaacccttttgctttttatctctagcataccaatgaagatctttacctattcagttggtgtacatggcaaatgaatgtcagtcaaaactcactaaactgaagattaatctacaaaaatctaaggcagtggatttatgaaaggagtaactaaagtaaaacaaccattgactgcccatactccaatgagattgaacagagcaatgaagcacaaaggaggattatatcgtcaagatgaaaactagttagcttacaaattaacaaccaccgagagtgtacataagaaaaagtacctttttgccatcttccaacaggggctttgatactgtgacccaaatagttctccctatatttatcagccttgacttcatcccaactgaattctgcacatttataaacaaattcaattagtaatagagttctcatcattagcagctcatgttctacatctttgatttgaaaactaattgccaaaaacgatctgttaattagaatgacaaagcttcttctgaatttcagcttctcccacaaattgcttatagacaattcaatcaaacactagatccaacaaaaaaaatcatcaaaatagcagagaagaacgaaaacgttggataatacataggaaccctaacagttgagaattttatgtaggatcttgtaattagaagcaaaatccaaaacgaattataatgaaacttacgatctcgaccaccgcgaacacctcccctcgttggatgatacatcgaaaccctgaaagttgcaaccttgatttttcctcaggaggctaaaagccagaactttgattggatacgaatttctcagatttttggttccaatggagtttaaataaaaacaaaaatacaaaaaacaaactgaagacggtgattattattatgggccaaataaggctttaggcccattagaggttaatagaaacaaaaacttgaaaagacacgtgtgacacgtgtcgtaagcaaagaaggagagaagtggagagaagtgaccaccagacaattgtaaagcctacctaatccacaccgattcaattcaaaaccctaaactcaaaatccgtctcggtggaggaaaaatg

SEQ ID NO: 16552 - DNA, 3003 bp, Unknown; identical to SEQ ID NO: 16551
  misc_feature (1)..( 3003): 2750-1469P.txt file - cDNA_ID_1557512; gDNA_ID_1972176; Annot_ID_180006

SEQ ID NO: 16553 - DNA, 3003 bp, Unknown; identical to SEQ ID NO: 16551
  misc_feature (1)..( 3003): 2750-1469P.txt file - cDNA_ID_1557512; gDNA_ID_2213619; Annot_ID_131960

SEQ ID NO: 16554 - DNA, 200 bp, Unknown; identical to SEQ ID NO: 125
  misc_feature (1)..( 200): 2750-1469P.txt file - cDNA_ID_1557591; gDNA_ID_2871; Annot_ID_146017

SEQ ID NO: 16555 - DNA, 3000 bp, Unknown; identical to SEQ ID NO: 2300
  misc_feature (1)..( 3000): 2750-1469P.txt file - cDNA_ID_1557632; gDNA_ID_1620517; Annot_ID_159326

SEQ ID NO: 16556 - DNA, 3000 bp, Unknown; identical to SEQ ID NO: 2045
  misc_feature (1)..( 3000): 2750-1469P.txt file - cDNA_ID_1557675; gDNA_ID_1620481; Annot_ID_158334

SEQ ID NO: 16557 - DNA, 3000 bp, Unknown; identical to SEQ ID NO: 9686
  misc_feature (1)..( 3000): 2750-1469P.txt file - cDNA_ID_1558032; gDNA_ID_1972172; Annot_ID_179868

SEQ ID NO: 16558 - DNA, 3003 bp, Unknown
  misc_feature (1)..( 3003): 2750-1469P.txt file - cDNA_ID_1565902; gDNA_ID_1620852; Annot_ID_51014
aatctgtaatctggtctatggttgctccttctgagaagcttattctttgttctacacaagttttctgaagacgctgggaagcaacattcccgaaaactgttgaggcttcttcagcggcacctgaaaaggtaatcacagaacgccattgcagagaattgaatttgttgctctagatatccagctggaataacggaaacataaactgataaatacataattcatacagaggtttcacttacctaaactacaaagttctccatatgcttcccaacacaatggatcaaatgacaatgccatcctaaactgttgtattgaacagttcttcctcccagaatatctgcaatcatgtaacagagagtaacacacatcaaacttagataatggaacatatgcagcaaactactaagcttgttacagcatcagtataccaacacagagaagtactaaacattaaagcatgcgagagacaccaatatctcatacagaacttgaaaagtaaattagcagtcacctatatataagaccaagaagataatgcccagctgcaccaccaggaacctgcatgtcaaaaatacagtagtcactagtcagcacttgccaattttcactcccaaaagactagcttgcaaaagatgtgtacaatgcccatggatatggagaatttttataaaagaagtaaaaaagcaatgccatatacttcttcagcataatcttcacagggcaacaatgcagcttcagcctctccaagaagatccaacttaaagcatgagaatgcaaataaataccgagactgaggcgtttttgaaccttcatttcacaatgtaaaacaagtttagtttttccaaacacaaataaaacaatatatgaaatgttcacatatagcaccagtaccgaagaatgtagagtacctttaaggatataatatgcactataagcttgactgttactcaagtaacacctggctaacaattgcaggttcacctgcataatgaagtagttgatcaccaccagattcacataaccaaaaaaatatatcaagggatgtgaaattcgagtaacggtatcaatctgaattgacattggcatacatcaaacagaaatctcaacctagaaattccaggtttggaataaaatcacaaaatcaactcaaaatcataaacatttcagtcaaattgaattgcatcctctagattccgacaaaatcgaaatagagtttgatccttaaaaacaaagcccagaattgaactccgcataaatcgagaattgtctattcgcaaacaactcaaaaagtcacacaacaaaagacagctacgactagaagatcggatcagaccacaagagcaacaaaaactgagaaaacgaaaaaagtcactccacatcttaaaaatgatgtgatcgaaagagacgaagctaagatttgaaaatcgaaatggagttgaatatagaagaatcgaaatcgagatacctcagatggaaattgggcgagaagaagttcgcaaaggaagatagcattggtgaacataaaatggttaaggtttttctggacacaattcgccagtagattctccatcatctgatgatgatgatgaccaaattgacgagacaatcgatgttgttgttgttcctcggaggctgtgtgtgtaatgtcgcctaagtaatcgcgcgccgctaaagtatttcaaaagcctaactttctcacgcgacgagcgtgtgatttttgtgacactagtgccccagatttttttggtggacgagacaacaagacaaggaccgcgtttggcgttttaagaaaaaatcgcgttctggaatagaaatcaagtttcagacaaagaacacaaatgaagtaagattagagtgccccaaatttagatatgcaactgaaattatatagcttaaacattgaatttataactatggaaattcatctataatgtatcttaaacgcaattgcttgttgtaaaatcgttgggtaacaaacgcgacaattttttcaatattcccataacgatcttttatgtgaccgttaaataacaaacgcgataattttttcacaccctaaacgactttttgtataaccgttagataaaaaaacgcggcaattttctcttaaacctttcaaaacgatcttttgtattaaaacgatgacgtattctaacttgagtatttcttcttattttagaaaagtatttgtgaaaacatactcaaaatctctttaaattaagttaaggataagatgagagatattgcattaatgctaatagaattctcacattttaaggatactaattggtaagtatatgctagatatttatgtattgttgaccaaaaaaataataacacaaattagcttacaagttacaaccatttaattttacaccatgttggattgagaattttgatggttattcctttatatgttgaagaaaccttctgggccaacaactttccaaataggcccaattcaaacccattgtacaaatgcaaggctactttcgtcatttttcgtaaggcgcttgaattttgcgttttcagaatcttggtttctagggtttcacttaccttccctccgcgcccttgagctctctacctgagcttctccgggattcctaaagctgaaattcaaacacctccattttcatcctcaaggtttgctctctctctctccctctccatcgatccattagatagtgtgattactcctatttgtgtactgtcttcgatgattggcgtcaatcttactaccttctcgtttaaaacccagtaacttgcgattttgttgaactttttcctcaattttctttcgattaatcctctagaaacccgtagctaagcttagattagtgatttcaatcgcaagattcaatattgatcttgcccaagtgaattaaagtcgcaaaattgatttgtttttgtttttttagctttcttatgtaattttgctcaaagctatatgattttttgtctttgcagggagataaataaaactctattgagtagaaaatg

SEQ ID NO: 16559 - DNA, 3003 bp, Unknown; identical to SEQ ID NO: 16558
  misc_feature (1)..( 3003): 2750-1469P.txt file - cDNA_ID_1565902; gDNA_ID_1620852; Annot_ID_170360

SEQ ID NO: 16560 - DNA, 3000 bp, Unknown
  misc_feature (1)..( 3000): 2750-1469P.txt file - cDNA_ID_1565902; gDNA_ID_1620520; Annot_ID_159434
ctgtaatctggtctatggttgctccttctgagaagcttattctttgttctacacaagttttctgaagacgctgggaagcaacattcccgaaaactgttgaggcttcttcagcggcacctgaaaaggtaatcacagaacgccattgcagagaattgaatttgttgctctagatatccagctggaataacggaaacataaactgataaatacataattcatacagaggtttcacttacctaaactacaaagttctccatatgcttcccaacacaatggatcaaatgacaatgccatcctaaactgttgtattgaacagttcttcctcccagaatatctgcaatcatgtaacagagagtaacacacatcaaacttagataatggaacatatgcagcaaactactaagcttgttacagcatcagtataccaacacagagaagtactaaacattaaagcatgcgagagacaccaatatctcatacagaacttgaaaagtaaattagcagtcacctatatataagaccaagaagataatgcccagctgcaccaccaggaacctgcatgtcaaaaatacagtagtcactagtcagcacttgccaattttcactcccaaaagactagcttgcaaaagatgtgtacaatgcccatggatatggagaatttttataaaagaagtaaaaaagcaatgccatatacttcttcagcataatcttcacagggcaacaatgcagcttcagcctctccaagaagatccaacttaaagcatgagaatgcaaataaataccgagactgaggcgtttttgaaccttcatttcacaatgtaaaacaagtttagtttttccaaacacaaataaaacaatatatgaaatgttcacatatagcaccagtaccgaagaatgtagagtacctttaaggatataatatgcactataagcttgactgttactcaagtaacacctggctaacaattgcaggttcacctgcataatgaagtagttgatcaccaccagattcacataaccaaaaaaatatatcaagggatgtgaaattcgagtaacggtatcaatctgaattgacattggcatacatcaaacagaaatctcaacctagaaattccaggtttggaataaaatcacaaaatcaactcaaaatcataaacatttcagtcaaattgaattgcatcctctagattccgacaaaatcgaaatagagtttgatccttaaaaacaaagcccagaattgaactccgcataaatcgagaattgtctattcgcaaacaactcaaaaagtcacacaacaaaagacagctacgactagaagatcggatcagaccacaagagcaacaaaaactgagaaaacgaaaaaagtcactccacatcttaaaaatgatgtgatcgaaagagacgaagctaagatttgaaaatcgaaatggagttgaatatagaagaatcgaaatcgagatacctcagatggaaattgggcgagaagaagttcgcaaaggaagatagcattggtgaacataaaatggttaaggtttttctggacacaattcgccagtagattctccatcatctgatgatgatgatgaccaaattgacgagacaatcgatgttgttgttgttcctcggaggctgtgtgtgtaatgtcgcctaagtaatcgcgcgccgctaaagtatttcaaaagcctaactttctcacgcgacgagcgtgtgatttttgtgacactagtgccccagatttttttggtggacgagacaacaagacaaggaccgcgtttggcgttttaagaaaaaatcgcgttctggaatagaaatcaagtttcagacaaagaacacaaatgaagtaagattagagtgccccaaatttagatatgcaactgaaattatatagcttaaacattgaatttataactatggaaattcatctataatgtatcttaaacgcaattgcttgttgtaaaatcgttgggtaacaaacgcgacaattttttcaatattcccataacgatcttttatgtgaccgttaaataacaaacgcgataattttttcacaccctaaacgactttttgtataaccgttagataaaaaaacgcggcaattttctcttaaacctttcaaaacgatcttttgtattaaaacgatgacgtattctaacttgagtatttcttcttattttagaaaagtatttgtgaaaacatactcaaaatctctttaaattaagttaaggataagatgagagatattgcattaatgctaatagaattctcacattttaaggatactaattggtaagtatatgctagatatttatgtattgttgaccaaaaaaataataacacaaattagcttacaagttacaaccatttaattttacaccatgttggattgagaattttgatggttattcctttatatgttgaagaaaccttctgggccaacaactttccaaataggcccaattcaaacccattgtacaaatgcaaggctactttcgtcatttttcgtaaggcgcttgaattttgcgttttcagaatcttggtttctagggtttcacttaccttccctccgcgcccttgagctctctacctgagcttctccgggattcctaaagctgaaattcaaacacctccattttcatcctcaaggtttgctctctctctctccctctccatcgatccattagatagtgtgattactcctatttgtgtactgtcttcgatgattggcgtcaatcttactaccttctcgtttaaaacccagtaacttgcgattttgttgaactttttcctcaattttctttcgattaatcctctagaaacccgtagctaagcttagattagtgatttcaatcgcaagattcaatattgatcttgcccaagtgaattaaagtcgcaaaattgatttgtttttgtttttttagctttcttatgtaattttgctcaaagctatatgattttttgtctttgcagggagataaataaaactctattgagtagaaaatg

SEQ ID NO: 16561 - DNA, 3003 bp, Unknown
  misc_feature (1)..( 3003): 2750-1469P.txt file - cDNA_ID_1566217; gDNA_ID_2213626; Annot_ID_195877
gaagccctaaccctaaccctaatttgtgctctactcttctgatttaggacgcgagagccgatatgaatatatatactaattttatttttaaaaatggaaataatcttatctgattttgttttttggggtgttatagtgtgtggagaggtgcatggtaatgactgtggacctaaataaaataaaacgcagtaggcagaaacgcatcagtcatcaccacatgcgacacaccaacaccaatgtctgcttcttctttatttaatctcccattgattcgcctcagatctctcgctctttcgtcttctttttcttctttccgatttgcccatcgtcctctgtcatcgatttcaccgagaaagttaccgaattttcgtgctttctctggtaccgctatgacagatactaaagatgctggtatggatgctgttcagagacgtctcatgtttgaggatgagtaagtctttgatttttgattctctctactttgatttcagtttttgggtgttgccaaaattgtacctttgtctttaagttgtgttctcgaacctggtttgtcttcggcgtttggtcggtgagaaaatggaaggaaaattgactaaattaggttatgggagttggagtttttttcgattaacaatggtttatgaacttaggtgtgttgattagttgactttgatgtaatagtaacttggctccattgatttgttgaccttgatgtaaaagtaaaggattttggatttagtatttgtcaggggttccttttctgattattggaatcaagcaaaaaaagtcaacgctttagtgtctcctgtgaaagatgtcatagttttgggaggaacatagtcaagtttagctatgtttttggccaaaaatggattctttggatatatttttgtttgtctccttttagacttaattttacgattatgatggttgatcttttgctttgatggaagtgtttcctataagttttagacttaattttaccttaatttattgatccatctcttccttttcaatcttgcttgcagatgcattcttgttgatgaaactgatcgtgttgtggggcatgacagcaagtataattgtaagtgaactttgttctagtctcgtcctatcacgtagtgttatgcagtaaaattcatgtgcttgtttgcctttctcctatgactgaactcactgaactggattgctgttttatctttttctatgcccctattcaagatactgataccttatcaaatctgcaggtcatctgatggaaaatattgaagccaagaatttgctgcacagggcttttagtgtatttttattcaactcgaagtatgagttgcttctccaggtatgtacatatgcttgctttgaagtctagataagtcaagtgctgtatacaaatggatcacaggcgtgtgactgggcatggctatgtcatatctagaatcacatttttgaagagaaaattaatttcaaaaatatgggaggttagatcataggcttgattctagagattttcttgcacatgttgggtgttgctatgatgatgggatgctctcgtgatcgtagatggttggtgggttttaataatctggctcatatgtcatctgactggtttcttctcgtttgaacagcaaaggtcaaacacaaaggttacgttccctctagtgtggactaacacttgttgcagccatcctctttaccgtgaatcagagcttatccaggacaatgcactaggtgggtatctactggcaaaacaatttagtacttctttttactatctatgtagaaaactgtagcttttctcaactagtgacctcactgttactcatcaggtgtgaggaatgctgcacaaagaaagcttctcgatgagcttggtattgtagctgaagatgtaccagtcgatgagttcactcccttgggacgtatgctgtacaaggctccttctgatggcaaatggggagagcatgaacgtaaataccatttctcaagactcttggttcccattttcttgaacagaataataaaaccttaagcttcttctgtgttggccttccttttgcagttgattacttgctcttcatcgtgcgagacgtgaaggttcaaccaaacccagatgaagtagctgagatcaagtatgtgagccgggaagagctgaaggagctggtgaagaaagcagatgcaggtgaggaaggtttgaaactgtcaccatggttcagattggtggtggacaatttcttgatgaagtggtgggatcatgttgagaaaggaactttggttgaagctatagacatgaaaaccatccacaaactctgaacatctttttttaaagtttttaaatcaatcaactttctcttcatcatttttatcttttcgatgataataatttgggatatgtgagacacttacaaaacttccaagcacctcaggcaataataaagttttcgtttttatcttaattaatgaatgaatgtcacaaagtttgtgagatgtacaaaaagcgtcgaggaaaaggataacaaggaaacagagtcgaaaccagagaaaaggcaacgcaaagattccttttttcgaagcttaacgacaacccaccttccatctgatttaagtaaagttaaaagtcactaatttaatattattgaacgaccgaaacaagtatgttgatgactttgttctcctttaaattatcatcacttcatttctcagagatttacgcacacagagttctcttcttcgtcctagtttcttctattccaggtaaatgaaataagattcgatcaaaacccagatggattttgaaatagttttcttgtgaattgaatgaaaagtgtgtatctttccttctgggttttgattgattgactgagaatatatatgatcactttatctagactaatctcgatttgtcttttgctttctgtgtttgagtaatttctcgtaaatctcatataatcaaatccccagattacttgttttgatcataattcttgattcaggtgagaagaaaaaatg

SEQ ID NO: 16562 - DNA, 3003 bp, Unknown; identical to SEQ ID NO: 16561
  misc_feature (1)..( 3003): 2750-1469P.txt file - cDNA_ID_1566217; gDNA_ID_2213626; Annot_ID_132062

SEQ ID NO: 16563 - DNA, 745 bp, Unknown; identical to SEQ ID NO: 368
  misc_feature (1)..( 745): 2750-1469P.txt file - cDNA_ID_1566630; gDNA_ID_1564401; Annot_ID_149391

SEQ ID NO: 16564 - DNA, 3000 bp, Unknown
  misc_feature (1)..( 3000): 2750-1469P.txt file - cDNA_ID_1566759; gDNA_ID_2214477; Annot_ID_183168
gtaaaattttctctatgatttatatttatatccaccataagttaacacctattttggcttttggaattcagcagttttggctttagatattctcaagtcttttcttattttgctggatttcaattaaccatatgctaagtcgaaccggttcacatcaaatgacattttttttaacttgaatgtagaaaaaccatcaaaaaagattcgaagacaatttcttgttgtcatgaagttacatgatcaatgttctatgcttctatcatctagaatatttttcttgatttactcttataatttccccaagcttaaaacagattcatgcatggcgtttgatttcatacaagagatacattgttttcaatcaatatacctgactgtagttgcatttccgaggcacttggttcgacattgacttcagtgtcgtttttgttgttatcttcttctcattttgtaggattttttgtttgaccaagtcaccaaggagaagaatctttgagcaacttctactaacgattttaaaataacactcgccacaactaccacgtgaagctagcgacaataacgatatcaacatgacttcagtattcttaaagcagacacgtatgcttgtgcaccataatcaatgtaagactttctagagcaaacccataaaccttgttttgtctcccacaccgaaatatgacatcgagatcggaaatttgaaacatcaatcagaatgttaccacatgtttaagtgatacatttatcttactgttgtttagcagaagttgtgatctccctaagaccctaacattaacaaaatggcccctaaatactacgaagcaattcaataactatctgaagaaacaaggttgagttcaaacttaatattaatagcgcaaaaggtccaaaatatagctcataacaatccgaaaagataagttttaaaacaaaagtgactcattgaaaagctgcaaactaaagcatggtttgttctgaaactggaaaacagagcatagtattaactatcaagcttgttgagcagaaagtctcttcctggcttcctcaatgatggtcaacttaatacctttaccctttggaagggacacccatggctttgttcccttaccgattgtgtacacatttcccaaccttgttgcaaactcatgtcctgttgagtcttgaatgtggatggtttcaaagctacccttgtgtttctcacggttcttaatcacaccaacacgccctctgtttcttcctccagtgaccataactacgttgcccacatcaaacttaatgaactccacaatcttgttctcctcaaggtcgagcttgatggtgtcgttaggcttgatgagcgggtcaggataacggatggtgcgaccatcatatgtgttcaagtagggaatacccttctgaccaaattggatcgatctcactttgcaaagcttgaactgcacaacaacaaaagaggatacttgttggaatatattacaaactggtaatcaacatgcaaattcagcagacctctaatgtaagtatagagcaatgaataaagacttgactttgttttgacagattcagtatatggcaatgtaagagatttaggagaacaaaccttagcctcctcatccttgatggagtggagacggaaacgtcccttggtgtcatacaaaagacggaagttctcatttgttttggggatagacacaacatctgtaaataaatatttatccttagttagatcattgatcacaagaagcataaaaatcaatcagcacaaggactatagccagactctgaaaacgtatcacaacactaacagactcacccatgaaaccagcagggtaagtcttgtcagtcctcactttcccatcaacctgaatatgcctttgcatcaagatcgaaatcacttctctgtatgtcagagcatacttcaacctgttcctgatgataaggaccaagggtaaacactccctagacttgtgtggcccagaagacggcttgggggcctggacagaaatagcattataagcaccgaatcaaacgaaaactaagctctaataagattcaatccaacacaagtgaaacttacaaaggcaccaccaagtttatcaagcatccaatgcttaggagcattgagcctcttcaaatgcttcttcaaacctcttgcctgcaaaagaatatcgaacaaaaataaaaatcaaaacacaataaatgtttataatagctcaatcactaaaagtctcatcactcaagacctcaagtcacagaacaagagaataacgccagggaggtttcatatctgactaattgagtcctatcttttgagatctcaatatcaatccctaacccattttacagatcgcacaaaggaattcactttataaacattaacaattacccataattacatggaaatgctatctagattacaaagagagattttataatcccgcacaaaatgaattcacagatggagacaaactatccaaaaccaaaacaaacacatgacgcaatacgcttgtgaatacgagacttagagaaagagacgaagattacgaaccatgtttgcagcgaatgagttctgagttctccgcggctaagcaagccagtctcaattatatcttctagggtttgagaagaagcgaaacacaaagccctaattttaagtttttaacatgtgtaatccaaaaatccgctgccacacgtgtgacttatgttaagtacaggcccaatataggcccaataagagcccgcttttatttatttttcccactctgaagaagattagaaagcggaaaaaaaaacaaaaggtcgtgaatgtctctgtccctttcttcctcagttctcacgcaagcttcaacgagaaaagatcggaatctcgccgtcggtaaagcgccgccgtaagtaaaagacggaaaaccagaagaaggaggagattgtatttatgtgtagcagcgtttagtgtgaggaaggaggagattttgtatatagttagaatttgcttcgaagacgatg

SEQ ID NO: 16565 - DNA, 70 bp, Unknown; identical to SEQ ID NO: 392
  misc_feature (1)..( 70): 2750-1469P.txt file - cDNA_ID_1566774; gDNA_ID_1590652; Annot_ID_149894

SEQ ID NO: 16566 - DNA, 3003 bp, Unknown
  misc_feature (1)..( 3003): 2750-1469P.txt file - cDNA_ID_1566971; gDNA_ID_1972048; Annot_ID_178303
atcatcagcggttcaataacagtttcagaaactccattctctagcatcataggttcactaactgtctcacgctgttcctctagttcaataataggttcactaactgtctcacgctgttcctctagttcaataataagttcattagtactcagaattcctgtatttacatccgcaaccattacaacattggcagccaattccccataatttacaccgcatgaacttcttcgctctactattggaacttgcctattattactttccaaatcactgcataactctacatgcaaaacaggtctaaatccctctttatccaatgacgttaaatatatcaacacatcctcattatctacaatataagactctctccatgctttacatatcttgtaactcaatttcagattccttttctctccacctagagcaatctttctacagatcttatctattaaatccgcatatgttattctctccaaagatgatgtcttaaacactataccgtatattgaatttttgcaacttcactcatggtctgctgtatagtaccctccatagtcaaagtgtaggttcatctggatcctcttcttcatcgcctcctacaaatataaacactatattagtaccagttgaaccacgagatgtaccagtgtctgattcaatttcagttcgtccatccattgtattatgcaaatatggtttgattctgcttacacattgattcaattcaattacattgtactaactataatacttacaggagatggaagaactaaagaaggatcgtttccagagtagccgcagcaaagatcaataaagaattcgatccaatagtatcgactcacgtagcacgcagcaccggagaaatcgacggccggagaattggattagctgacctagcaaagtttccccagactcgacggagccaatgtcaaaaatcaccgatgttggaagttaatcggaaatcgcctatctcgtcggaattaaatgaattgggtcggaattaattgggttgggtcgggataatttcgatttcgatttggattttgtttttgatttttcttttaaaattaattgatataattcattaagggtaaataggtattatccactacaagagtggcatgcagatcaaaagatggcacgccggattcaaatttccagtttagtggcattgttgattaggactccttcaagttggaataggacggtcggagatcgccgtggtttttaccgtcgctgtcacaatcacagccagagccgcagtcactttgctcattcctttgcaaaaccctaaaaaaattattgggttgggcttttgattgtatgttgggttttttaattgtattgggcttttatattatttgtaatggtttattttagtagggtgaattacaaaaatgacggtttttgaaaaagttattaaatatatagcaccataatgtgtgtaattcatttgatagcacatgtcagttgtgaaaatacacccaactccttcccaacgatgcgcttggagagaaagagaagccacaggaggaaagagaaatatatatgagtaatatatattcacccctcttgattttgtttactttattagtttaacaatattacttggttaaagttaaagatactattgaaaaaacagattttttttttgtttatctaatatgatttgaattttaaaaatcggaaacgaatttcttaaaaaatgaatagtggtatcaaattctatacagatcatcatagaaagatagaatattatatatttgttcaaatagaaacgtttgttccgatgaatccaaataatcaattaaatactttttgatggaaggatactaaaccctaagataatatatagggaacccaagacttttaatataaaacactaatcaaatcacttaatatccttaatcaaaacaaacaattcattttaaaacatatatagtacaaggtatacgtaaatagtatacccaaaaagtacaacgacgccaataaattagagagacccaaaaaaagaaatcaaatgaaggaaacagaaaacagagattgatcaaattcagcgcttattagcgagaatctcgactaattcaatttcaaaaaataaaaccaaagtctcttaaaaaaaaccaaagactccaacaaaatctgaagtcttgcctgtgtaaatcaaaacctctaattcaatttcgagcaaaaccgaaatgtcatttccgaaaattaactgtcttgcttctgtgcccaatacacctctgttaatcgttggcaaaatcaaaagcttcataaacggtggactgaaatttattagagccaaacccatgttcaaaagttaatagttagtgaaagagaataattggttttctatggaagggagaagatgaagagcgtgtatttcaaacagggatagtattggcattattacagaaaatacaaacaatattggttacttttttttagagtgttagttacctaattataatatttttgtaggttataaatgtaaatttcccattttagtattttactagatttgtgtttgtaatagagtaattgtaatatgtaaaccaaaatgaaaaaatctataaaccaagaaaaatacaaaatccagttcatgttcagaacataaattttagctaataaccgatccgaattaaccgactaccgaactgatccgaaccgaattttaattcgagtctattcagtgaaattttcaaaaccctgaattttccttaaaccgaataacccgatccgaccaacccgatttagtcgaactcccgggcctactaacttttgtagcgtttaacggaacaaccggaccggttttagtaatttccctaattcaaattcactcttccctcagtttgaaatctctaaactggtaattccaatacagtcttttcttaaaatcgcactagcttaaaccagtagatcctaaaccgattcatttaaacaacaaaaaaccacttacagagttcgttcgccggcggcggcgagtcatcgtcatcaatg

SEQ ID NO: 16567 - DNA, 3000 bp, Unknown
  misc_feature (1)..( 3000): 2750-1469P.txt file - cDNA_ID_1567007; gDNA_ID_2936547; Annot_ID_193918
tcataaggtgtatatcagaaaaagagtctcgaccaatcaacatcgaataaacagaaatttatcctctgaaagtaaaaacagttgcagaaatactggagaagatgattccataaggaatatgtctccgattaattcctcacgtatcttggagcttcagccgaccttgtctaccaactcagtatcagatagaacgaatcctctgggtaatgaaagcggtcatgtaacagaacaataccagggtcctgagttagtgaaggtgaataacaacacattcaccaatgtaaaaagcaatgaggcgtgtgtggtaccacaagatacaaggtcagctcatgcttttggaagtgcaagtatatcatcatcctcatttccagcttcaaaatttgaggattgtcaagccaatattggtgaggaattgggcatccaagtctctgaaccaccttctacagagtctcagtataaggaaaatactagcgagaaatgcacgtctgtgcaggaatttccagctagttcaaatttaaagctcaacagagatgtaaagatcaacaatgagatggaaaaaactgttgagctgcttggctgctactttcatcccatgcctgtttcatcagtattactcaggactgttggaaatgaaatctatattttggtgttgagctttgctacagaagatagagttaggaccctgtttatgtacaagatgtcagctgaggcaccaagcaaaggattcccgtctatcattggtcacactcctgccatactccccattgtggatgacaaatctagtggaaatgtaaattcattaaactttttcgtagtttcttctcttaaacttgtttttcctctctagttatctaatagttgttagttgttacatttcgtcagggaacactcgagatatctaatttgcacttcactccagacgggctgcatcttattttaactggcaacatcaaaacaccttattgcaggtttggactctttattgtttcatatggtacagagatacagaataaagatattagctaagagattattattttcccttttttgcaggaagagggaaactgattgctcgtgtttgatttgtacatcagcctgttttgaggagaatgcagtgaggattgtccaggtgaaaactggtcatgtttctcttgtgacaaaacttcaagcagatgacagtgtgcagtgtgtggtggtgtgcgatcctaacaatctcattgcagctgttaagagtggaaaccttattgtctgggccatgaactcgcattggaggtactctcatcagagttcattactcttctcttaaaatagttgtcagatccttcttctatttggagctattggatcatcattggaatttttgctaatgttcttgtatccttaatttgcagtggtcctaccgaagaatatgttatactcgcaaatccttgcatatcatcatgcatcatggaactgaagaagataccaaaatgtcctcatctcgttattgggcataatggtataggagaatttacaatatggtattttgctccctctttctctctctccctctatctttagagtttttttctctgcccatctctttgttaaattacagaacactatccgtgctagggaatgatgaggagcagccaactttgcttgatctttttcttcctgtctccattgtttcggcctgctaactttgtttattatcgatttagggatatctcgaagcgaagcctagtatcaagatttgtatctcccagcaatttgatctttgagttcattccgacgagcttgtttgcatggcaccctgtacatagtcattctacaatcgaggataacgttgacatgattttagctgcaacaaaattatggttctcaaaaggggtcaacaacaaaacattggttccagctgaagtcaaagacactgctatttggcttttagtctctactgatcttgactcagatgctaaatgtgaccgtgtagaaagtccagttagatgttggagacttgctctccttgtgaaagaccaactcatattgggaagtcagttggatccgaggtattatcacacatctctttctttacatggatactgtctttctcaggctcctctggtttctccatgttccgagaaattagttttgctttggggattatatgagaagtaaatggtatatgaatggtaacatttctaaatccatggttcattggctatggatttgtggtttacagggctgatgttgccggtacaatatctggccatggagtagcaggcacacttgatggacttgtgtatatgtgggacttatccactggcactaaactcggctctctccatgatttcaaaggtatacactgattgaagttttaactagatatatccatgaaaataacgaagtcaattctcaaaagttaatattgttacatggattttgtcaggtcaaagagtttcatgcatcagtactgatgattccagaaatatatgcatagcaagtgaagatggtcagctcctagtttattgccatccggaaaagtaaactcaaaatcaatcaaggagggtaacaacaaaaagatgttttgccaaaatgacttcaattggcttggttacatttttaagtcaactaagtttttatgcttgtaaacttttaccatatggcttacaagttgagaattttctaatctagttaaaaaaaattgtacgaagatgtaaatgataaatgatgataaataaatcttttatgtatattcgttgctacaacttacaaggcatttctgatttctcagtaattttttattccatttttgctaattttccaaaaaggaattaagaatatgaaattataaataattaaattaaacgacgtcgttgctgagagggctctagctcttattatctttctcctctagtctgctcatcttttcgcgtggtcgaccaaacctaaaacccccaaaaagagaaaaatcaaagaccattcgctatttcgctcgctactcagtttcagaagaagatg

SEQ ID NO: 16568 - DNA, 3000 bp, Unknown
  misc_feature (1)..( 3000): 2750-1469P.txt file - cDNA_ID_1567243; gDNA_ID_2684230; Annot_ID_192210
tataagaaaagagaagttgcatatatatatatacatggggagtgtcaagaaactgtctttgttccctccagactaaacttgaagaacatcaacataacagacaagatactatccagcaaataaatctaagactgtgccttttcatcactctggaacataaaaatcgaacctgacatcgacagaaccatcacgggtatctttgtattccacgttggttatggttccagcctcgtccacgtcttggtactctggtttcacccttctaacaggcaccgtgaccgagtaaatggtcccaaggtcaccgtccgtggaaacatttagctgaactttttcctctgattctatctctacgaaatccgacagtgcatggataatgttgttgacgattttccttttagcttcgtcactaacatcacacctgtcggagaagaggatcatcttgagccgctgctttgcaattcttgcgttggagcttcttcttgatgcgtgagatgggaatattatcttccaagccaagtttaacctgtcaaagaaacccatgttgatggcattatagagaaagctctctatctcttgctctgctgggcttggtgatagttcatagtctccggtgttccttgcaagaaccttcacctgacctcgtgtgttttcgcggctgatcgccagtccaggagtacatttctgagtttccaaactgtttacgccattgcttatgaatcccgtgaaatcaacctgcaaatttacatccatcacccgcaaaaagggactgtaatttcagactagttgcattttgagaactcagtaattgttatcgtacatctataggtaaagcaactataacatcaaagctgacctaaacgtatatgttttctaacaaagtagcaaaacatcaggtcataaacaccacaaacatctgcatatatctaacagaagaccggtctagtctacgtaatccaaggcaccaccaccattgttaaaaagacttaatatgagctacaagcttaagaacatattcactctctttgatcatctataggtaaagaagcaactgtaacatcaaagctcatcttaaacttaatgaaatggttttgtaacaaaattgcaacacatcaggtcatagcaccacaaacatccgcacatatctaacagaagaccggtccagtctcgctctcagtaatcaaagacaccacttccatactataaagacttaatatgagctacaagataaagaaaatatcaaaactacaaaaaaggaggatggtcatggagatggattcgttggctttcctaaaaacaaatatacttaagttttgttactaaaatccttcatttccaagtgcctaagtaaaaacacagaaactggaatgataaactttcaggagctcgcgatgaacaagcaaatctagagctagagagaaattgtgaaattgttccaataaaagacgcatttcagattcttcctaaaccacacagacatagaaacgaaagatcgaagctagtaatctaagttctcctaatttggtggcgaatttcacgagctccagatcccaaattgcagcgaagagaaaatttgaatcgtagagtaagaattataagaaaatcggaccttggaagaagaagaaggtaatgagaggcgattacggtggtgatgatgataaggagatactaaggtcgcagagatcctgagagttccagaagacatcgccattaccgagaaacttgaaattgctcgccggagaagtgaatctttttcgtctcagttaaaagagaaatgagattacgacgactcttcttacaaagtaaaaggctatcgagcactttaagaaacgctgtcgtttaaaggcttgaaacacagcgttttaacaactgcctaaccgatgtcgtatcatctattttaatattaaaccaaaacaacaaaaaaaaactactttgcaacttttggtgtttgaagtttagaaattagaagaatgacgacaatagtaccaactcattcaaaggttttctataactcattcaaaggttttctataagcaaaatgtaagctttataaaaaatcacattattggtaaagctgtaggcaaccacaaataactaataagtagttttcagatttgatggattgtaatatttgttctttaaacttcaatctaacaaaatatccgtaaagatgactatttgcattcttgctgttttattaaaaatatgatcttttgacaaaaatatttcaagttttatagataaaccacgaataagtagtttttagatttgagagatgtgcttttagtcaagtggttaagttcatttgatttcgtctttctatcgaggttcgattccactaagtcgcgttaccctatatagtagagtttgactatatattggaccttctaaaaaaatagtatttaaatttgatggattataaaattattttttaaagtttaatttataagaaatctgcaaaattgactatatgcggggttattggtgttttatcaataattatgatctttttgataaacttgttccaacttttacaaataaatcgcattgatctcggaaaaaaattgaaaccctagagaattttccaatcccataacacttggtaaggactagacattcgtcattcttctaaacttcaaaaaccaaggctacaagattagggcttttctaacttaacatttttccaagatagggttttaggtttttgttttggcttaatatgaaaatgctacaagagggttttaaactttttgaaacaagtttattaaacgaaccgctgtcgttttagttaattaaacaaaaaacacagtcgttttgaaacaagtaaaacgatcatttgattaggggactgtggtcaccggcggcgagaaccaaggcttcttcgtaaccaaatatctttcgatatcaaaagacaatctctccaaaatacaaattgactaatataataagtcgagagattctggtgcagaggacaaaaaatttcaattttgatttcattgaatg

SEQ ID NO: 16569 - DNA, 3003 bp, Unknown
  misc_feature (1)..( 3003): 2750-1469P.txt file - cDNA_ID_1567431; gDNA_ID_1620705; Annot_ID_165273
ttcccatccatggttttccttactattgctctgtgatcaccctccaaacacctagctgaaggagcatcaccatcatacctgtaacttatgtagaatattagcttacaaaattttgtatcatgctagctctttttttaaattgagctttactcttattacttaatttcataggacgtgctcgtgctcgtgttaaggaattctgaaaacgacatctggtagtataaagggaaatagggttacacgcgagtgctttctcatttggcaactttctctgatttttctctacgcgagcggcgattgcgactatcatttccttgtgaattctcgtctgtctccggtaactttctctccattttgctagctctgttgttagcttgttacgcattatgctcgtagtttggcctgtctcagtgcgattagtgaaccagtaatgaactttaagtaacgttttagggttttaatttttccttggttgaatgatgtaaacccttctttaggttaaaggagctattcaacgtttgtttggtttatagtctatagcttctcgctcgacctctgcaacttaaaaatggttatgtttatgtcaaaacttgaaaccatgtttatgcttgatacttgggtctttttggctctgctttatatgtgtcttctttcctctatgtgtttttctgcttgattctgctggattatgaatatctttcttctgcttgcttctacttgaaaccagggataagtgattgcagatggctgagcgattattacaatctatgtcaagggtggctggccgatgtcatccagattgcgtaaaagcaagtgatgagcaagaagattaccgtaaattctcaaatccttttgaactgactcgttttcatatgaataggttcagtatatgaattgactacaacattttcatcttttgttgttgttgtttggcagatgcatctcaaaatgcagctttggtagctgtgaatctgattagctctgcaaggttaatactgaaactcgacgctgagtttactgagtactcagctcagtttttgatggacaatgctggaaaggaagacgacccgggagaagtggatcaacaacgcaatcaggtcacgaccgaaaactgccttcgctacttggccgaaaacgtttggaccaagaaggaaaatgggcagggaggaatggatcaacaacgccctgtgctcactgtcaaagactgcttggaacttgcttttaaaaaagggctgccgagaagagaacactgggcacatttgggatgtaccttcaaggctcccccatttgcttgtcagatacctcgcgttcctgtgaaaggagaagtggttgaggttaagacttttgatgaagcattcaagctgttggtgcatcaacccattggagcaaaactgcatttgttcagtccgcagattgataatgttggagaggttaagtgttgtaagttaaatttcaaaatcttaagagattagtgacaaagttttgttctaatcttgttcatctttttttatgtgtgatagggagtttacaaaggcctcacgacaggtaatgaaacacactatgttggacttagagatgtgctaatagcttcagtggaggagttcgagggagattctgttgctattgtgaagatctgctacaagaagaagctttcatttatcaaagtgtctttgagcgttaggtttctctcagtagcacatgatggtgataagtctaagttcatagcgccaacaggtctgcttgttgacttctgtgtcccgcgcttatctatcaactaaaccaaaagctgagatcttggtaagtatctggactatatgctagatgtggaacttgtttgtggtgctacaataagagttgttttatgagactattttctttaagttaagaagtcaagtatcttgaaaaccatatcctatttgtggaacttgtttgttgtccgacattatgattgtcttaggatgaacttttatctataagttgaagaagtatttgaacttgtttatcattccaaattactgttgcccaaatttgaagggatcttttcaagcttctgaattcataattggatttgctcatagtttagtgagttcttctatatagattacacaataatgattgtattatccgtgtttaccaatataattttagtgaaaaatgcaatgtaaagttttactgagaaatgagaagaattgagtcaccaagctgatggtacatactacataagatagactactaagaattttacattgaccagtagaaatcttcaaatctctataaagtggcccaaaataaaaacgatttaaaattgcataaacgatgttgttgtttaagccttcaacattggcaaatgatggcaatctcagaaaaaggagtcatggcaatctcagaaaaaggagtcatggcaacgaaaattgacaaaaacggcgtcgtattgagggttaaaagttgaagtccctaaaccgtcatcgtattggaactacgctgagggggaaataagctttcgcgaagcttcgagagttaaggcgacatttcactgagttttctctacgcgacgtagatctgtgtctccggtaactttctcttcattttttctttctctgttggattattttacttttttttttggctttgttacggaacctgctcatgatttgacctagtgaactcttagtaacgttttagggttttaactttttttcttggatgaatgatgctgggtccttctttatgttagagttgttctttgtttaaagaagttatcaacgtcagtttgctttagtttataaagcttctcgttcgacgatttttcctctgcaactagaaatggtggttctgtttatgtcaatactagaaaccgtgtatatgcttagctacttaggtcttgttttggttttgctttatagatatcttgtttctgaatgttttcttctgcttgattgtgctggatttgtgaatgtcttcttttgtttgtttctacttaaaaccaggagttcatcgcagatg

SEQ ID NO: 16570 - DNA, 3003 bp, Unknown; identical to SEQ ID NO: 16569
  misc_feature (1)..( 3003): 2750-1469P.txt file - cDNA_ID_1567431; gDNA_ID_2926196; Annot_ID_201475

SEQ ID NO: 16571 - DNA, 3003 bp, Unknown
  misc_feature (1)..( 3003): 2750-1469P.txt file - cDNA_ID_1567442; gDNA_ID_2214638; Annot_ID_188192
cgggattcatcattttttatagggtaaaaaatcaatctagtggtttaatggttatttttaaattaaagtagccgtactatatatctcaaaacataaaaatcaagttgtttctcagtacaacaaatatacaatttaaacattattaagcctaaaattaaaacaataatatctaaaatacggaatacggtaaataaaggcatttgaattcataaaataaatggtggaaaaatcaggccaatcactgagaataaaattaaaaggttaagtcataagattcaaaagtttaaagtaatttgttactgagagttaaaatgataaaaattcaaaaattatacagtaacttctcgaaactaataatcccaacacccacaagtagttgaactcaagaaaaacactcaaactaaagtttttagaggagatagttttccatgagtttgatcagagtaacacattagttgtgcgatactcaaagaaaggaaggagtgaggatgagaagagccttccatagtctcttggtaaacagtaattttgtatttgaaacctttcagaatgatatattatcactcagcgaggctgaagaatacaaatataaatgtaactacttgctcatagttgaagataagtagaagttccaaaacacagaacccatggacatgaacgctactcgagcttgaagcgggactaccctgtaaatttcacctttcatcagacctcaatcctattatacataatcacacaatctataaagaccctctccaaatgacttaatgatagagaaagaaagccataccaaaagttaagtatgctaacgggaacccagaagcgaaatcctgcagtaatcccaagaacagtaaatatttgaacgatgctatgtaatagtaaaaaaattactctctgtaattggtagctcaccataaagaagcgtaggaagagcatctttctgatacttgtttccaagctcagagagctttcccagccacaagttgttccaagcaaatataacagcaatcacagatggaccaaggattacttggttaagcagaacctaacatgggatcagtataagcagtaaaaactatatcacaacgtgttccaagtacaaattaacaaaacacgcctagatttgtaccttaagcactagatttgtcgcagttggtttaggcaaagaatgatcaaggaattggtaccacgcataagaaccaggaccatacaagagaaacccgtaagaactcatccgcagcgcacgaatccagtcatgttctgagaaaatgttccacaattccccctaagtaaaacgatccaatcataaatccttagtctcaagccaagttccaccaatgtacgagaccattttgcaagagagtaaatatgagtcaccccaacaagaattcaaatcaaacataacctaaccaaagactgtcactactcactaaacaaccatactcaccaacatttttggttatgcaaagatccagtttcagtagaattctcactataccacactaggaacttgattcatgtaatatttcaaacaatcaaaacattcactaaaacctctaaaattcaaatctatgactcgaaaataaccaaaacttggtcagagacaaacctcgtcaagctcagaagatgattgtttaagagcggttctctttttccatctccctgatagctgagcaatcgtgtcaccggtgaaagtgagtgctccggccgtcacagcttgcttcaaaggaaaccgataaccgccggcgtctctgctcacatcgacggaatccgacgatccagaattacgtttcttacctctatcaccggaagacttcttctttctccgttgatcgaagccattccatccccagaaaccaccagcgccgccgcaaccacccaatgcgtccattaaaaatgcttccttttgcgtcgaaacagagaagagttttgcctaaatcttaaaaatcgcaaatgagtcctgtccatttgttttttccggtttggttcgattccaatttattggatcttgggttttcggaaacaggtcaaaagtcaaaccaattctgaaccgaacgaatgttatcaaactgaaaggatcaaaccaatttattggatcttgggttttaatcagtattatatctttttgaggtctctatatttatttcactgaatttcgatttattttgttcagtccatatgattcggtataagaattaatctatagtttgagttaatattcggttcatttattttgatttggttcggttttatgcttagtgtacataaaacgatgtgttcacgtgaaaccggtgaaggcgcgatcagacaggcgcggtggttaataaataagttaataacttactcgttactagggccgataatcgtggttttgaacgcgcgtttacgagaattgcgttagccaattgtattcatcatcatcatcgtcatcatcgttggggtgagtatacatacgattaaagaaacccaaaaactccggcgtctgtttaccgctatcatcattcttccgggaagaggaaaaggtttcttcgatcgtcgaagagattctttggacaagtcccctccttcctggttcaatcttcgattcagctctcttttaatttttttggtaacctcctcctctgcatctactgttttcgatttggaaatagattggttcaattgtgaattggaattgagggtttgattgattggatcatctcaattcataaatcaaatcctttgaatttagatttagaaagctctagagtttatgaagatctgcatcgttcttatgagttatatgattgatggattttttagtgtaaaggaacctactttaatgatcaaagctaacgttttgtttaaattttgaggcaaaattcaaatttattcatatgaatattctcataagctgatgaattctgtatctttgtacattagtgatatagtctacttgtgtgtatccttgttaattcatatttaaagtgtgttttttcttgtaggttttgggaagctgctatg

SEQ ID NO: 16572 - DNA, 3000 bp, Unknown; identical to SEQ ID NO: 7126
  misc_feature (1)..( 3000): 2750-1469P.txt file - cDNA_ID_1567547; gDNA_ID_1621128; Annot_ID_172376

SEQ ID NO: 16573 - DNA, 3000 bp, Unknown
  misc_feature (1)..( 3000): 2750-1469P.txt file - cDNA_ID_1567581; gDNA_ID_2936558; Annot_ID_194311
ttttacgaatttgtgacatacgccgtttaataacgtttgccgtcggttctgaaatctttattctttttctcttttatcgttacgcgtaaggaaaacgtgcggtaaattctaaccgaaaatatatataaaaaagtagtccaattttgaaatctggccgttgatggtagacaactaaactgtgccaaacaagaaacaagaggtgaacatatttttatgataagacagggcaataaatttgttgtaccaactcataaaacaatagataaattacttgcacaatgatggattattaacattaattttcttactattaatcatggatgaaaattcctttcttcacactagatatagttctttaactagttaaaaatgcatgcgatggaatattactaaatatgatataatctcatggctttatgtaagatttgttttttggtttttttggttgttgttaataaatttattattgagaagtttaattctattttggtcacaatatattgaaatatttttaagaaactaaaaagttcctatttatttttgttttcattaatttatgagaggctattaaagtcacagaaacttattgggtgaatgagtttataaacacatgagctattgagctagtagcctcttgtactcttccattttacgcgcaatccacgcaccaacaaaaagaaaagaaaagaagagataaagaatatctttaaaaagtaagtgtggagaattctttcttctcaataaacaacaacatgtcgtcgagcaatgaaaatgctaaggcacaagcgccggagaaatctgactttacccggagatgtagtttgctcagccgttacttgaaggagaagggtagtttcggaaacattgatcttggcttataccgaaaacccgattccagtctcgcgttgcccggaaaattcgatccaccaggtacttttattatctctttcttctttcatggccgccacttggtaatagtactttaaaaactcagttctgttactacttgcttttgccagatttactacttttgtattgtttcttcatttgtaagtcagttccttacttcagaaataatttctccttgtaattatgaagacaagtaacaaaaataacgaataagttgatatagaaattgattgagatgtggttaataaaattccaaagatataagatgctatatcatttttctaaagttattatagttcacgaaagtttttattctctttatgcagggaaacaaaatgcgatgcataaggcagggcattccaaaggcgaaccctctacctcatcaggaggcaaagtcaaagatgttgctgacctcaggtctctccttttgttccttgggaatacttgttgtttttggttattggagattagagaaaaggataatcggttaatccggttaaaattggttttgttctgaaatctgtttttggtttgcagtgaatcacagccaggaagttcgcagctgaccatattcttcggagggaaagttttagtatataatgagttccccgtagacaaagctaaagagattatggaagtagcaaaacaagccaagcctgtgactgagattaacattcagacaccaatcaatgacgaaaacaacaacaacaagagcagcatggttcttcctgatctcaatgagcctactgataataatcacctaacaaaggaacaacaacagcaacaagaacaaaatcagatcgtggaacgtatagcacgtagagcttccctccatcgattctttgctaaacggaaagacaggtatttaaccttatcatactttttgaaacttgttttaatgttccaaatttccaatcactctagttagttcaaaactcaaaagtttaaggatcctccctctgatataagttctcctaaattatcctcaacaagcctcgtaatttacgttattaatttttctgttgcagagctgtggctagggctccgtaccaagttaaccaaaacgcaggtcatcatcgttatcctcccaagccagagattgtaaccggtcaaccactagaggcaggacagtcgtcacaaagaccgccggataacgccattggtcaaaccatggcccatatcaaatcagacggtgataaagatgatattatgaagattgaagaaggccaaagttcgaaagatctcgatctaaggctatagtaatatttgctaaatttcttgtaggaactgagtttttagattaacgtttcgatttttctgacttatctaagtgattttattttgctttgtactacagtatgtaatcttattctaacttgaatattcattcataaacacaatagacgatagtaaagttatattataattagttaactacgtacaacacttgggagttaaattacataacgttaagcgagaaatagcaaattagacaagaggaagaatatttaggagttgtgaattgatctgactgcaataacatgaagaggaatctgactgcaatcgtaatgcgggtaaagatggttgaaagtgatcagagctcctttctaatttatttagggtgtaatttatgaaaatgattattattggagtgtatatcaagttttcactaaactcaggggtgtttattgtaattagttgtcaggttcaagttcattgaaggcgtgtctgatttggacagtgattgggcctgagccataagtttaacgtgggacgagttcattggctgttgctttttaaattttcttacagcctgtgactttagctaatcgatgtgtaaaaataataaatccaataaaattcgtaagagccactcgattgcttccttcgctttctatcaagagacttccttttttttttcctgttcttcattttttttttgttattaatattttgtcatttttcttacatttttctcgaacaccgaaaacactttcgaaccctaaaagacagaacactgtgtcaattttcattacctgggaacgaaaagcaaaatcaaagacaataattttttccccgagagagaaaatg

SEQ ID NO: 16574 - DNA, 3003 bp, Unknown
  misc_feature (1)..( 3003): 2750-1469P.txt file - cDNA_ID_1567581; gDNA_ID_2926301; Annot_ID_205716
gtcttttacgaatttgtgacatacgccgtttaataacgtttgccgtcggttctgaaatctttattctttttctcttttatcgttacgcgtaaggaaaacgtgcggtaaattctaaccgaaaatatatataaaaaagtagtccaattttgaaatctggccgttgatggtagacaactaaactgtgccaaacaagaaacaagaggtgaacatatttttatgataagacagggcaataaatttgttgtaccaactcataaaacaatagataaattacttgcacaatgatggattattaacattaattttcttactattaatcatggatgaaaattcctttcttcacactagatatagttctttaactagttaaaaatgcatgcgatggaatattactaaatatgatataatctcatggctttatgtaagatttgttttttggtttttttggttgttgttaataaatttattattgagaagtttaattctattttggtcacaatatattgaaatatttttaagaaactaaaaagttcctatttatttttgttttcattaatttatgagaggctattaaagtcacagaaacttattgggtgaatgagtttataaacacatgagctattgagctagtagcctcttgtactcttccattttacgcgcaatccacgcaccaacaaaaagaaaagaaaagaagagataaagaatatctttaaaaagtaagtgtggagaattctttcttctcaataaacaacaacatgtcgtcgagcaatgaaaatgctaaggcacaagcgccggagaaatctgactttacccggagatgtagtttgctcagccgttacttgaaggagaagggtagtttcggaaacattgatcttggcttataccgaaaacccgattccagtctcgcgttgcccggaaaattcgatccaccaggtacttttattatctctttcttctttcatggccgccacttggtaatagtactttaaaaactcagttctgttactacttgcttttgccagatttactacttttgtattgtttcttcatttgtaagtcagttccttacttcagaaataatttctccttgtaattatgaagacaagtaacaaaaataacgaataagttgatatagaaattgattgagatgtggttaataaaattccaaagatataagatgctatatcatttttctaaagttattatagttcacgaaagtttttattctctttatgcagggaaacaaaatgcgatgcataaggcagggcattccaaaggcgaaccctctacctcatcaggaggcaaagtcaaagatgttgctgacctcaggtctctccttttgttccttgggaatacttgttgtttttggttattggagattagagaaaaggataatcggttaatccggttaaaattggttttgttctgaaatctgtttttggtttgcagtgaatcacagccaggaagttcgcagctgaccatattcttcggagggaaagttttagtatataatgagttccccgtagacaaagctaaagagattatggaagtagcaaaacaagccaagcctgtgactgagattaacattcagacaccaatcaatgacgaaaacaacaacaacaagagcagcatggttcttcctgatctcaatgagcctactgataataatcacctaacaaaggaacaacaacagcaacaagaacaaaatcagatcgtggaacgtatagcacgtagagcttccctccatcgattctttgctaaacggaaagacaggtatttaaccttatcatactttttgaaacttgttttaatgttccaaatttccaatcactctagttagttcaaaactcaaaagtttaaggatcctccctctgatataagttctcctaaattatcctcaacaagcctcgtaatttacgttattaatttttctgttgcagagctgtggctagggctccgtaccaagttaaccaaaacgcaggtcatcatcgttatcctcccaagccagagattgtaaccggtcaaccactagaggcaggacagtcgtcacaaagaccgccggataacgccattggtcaaaccatggcccatatcaaatcagacggtgataaagatgatattatgaagattgaagaaggccaaagttcgaaagatctcgatctaaggctatagtaatatttgctaaatttcttgtaggaactgagtttttagattaacgtttcgatttttctgacttatctaagtgattttattttgctttgtactacagtatgtaatcttattctaacttgaatattcattcataaacacaatagacgatagtaaagttatattataattagttaactacgtacaacacttgggagttaaattacataacgttaagcgagaaatagcaaattagacaagaggaagaatatttaggagttgtgaattgatctgactgcaataacatgaagaggaatctgactgcaatcgtaatgcgggtaaagatggttgaaagtgatcagagctcctttctaatttatttagggtgtaatttatgaaaatgattattattggagtgtatatcaagttttcactaaactcaggggtgtttattgtaattagttgtcaggttcaagttcattgaaggcgtgtctgatttggacagtgattgggcctgagccataagtttaacgtgggacgagttcattggctgttgctttttaaattttcttacagcctgtgactttagctaatcgatgtgtaaaaataataaatccaataaaattcgtaagagccactcgattgcttccttcgctttctatcaagagacttccttttttttttcctgttcttcattttttttttgttattaatattttgtcatttttcttacatttttctcgaacaccgaaaacactttcgaaccctaaaagacagaacactgtgtcaattttcattacctgggaacgaaaagcaaaatcaaagacaataattttttccccgagagagaaaatg

SEQ ID NO: 16575 - DNA, 3000 bp, Unknown; identical to SEQ ID NO: 9130
  misc_feature (1)..( 3000): 2750-1469P.txt file - cDNA_ID_1567735; gDNA_ID_1972003; Annot_ID_177783

SEQ ID NO: 16576 - DNA, 3000 bp, Unknown
  misc_feature (1)..( 3000): 2750-1469P.txt file - cDNA_ID_1567824; gDNA_ID_1620800; Annot_ID_168611
cagatttctgacatcaatgtctgtgtcccgtaggacaaccatctccgccatctcttctgcttttgcttgtcgccactgagaaagctccttagaagcaagttcctcagctgtcatattacataatctctctggagatatctttccggacatgacactttctcttagctcaggattgttcttatccttcaaattgaataagagagaccttcccttctctttgtacttcttgttcacacctccaaatagcttaaaaagttccaactcaattttagatgccaagagctctggatcctcaaacgacttttgagtttcattctccccaaaatctgaaacaggttccaaaacccatgagaggccattaccctgtaaaagttcatcgccagtaaaaatactatcactaaaacgaacatcatcacaggggaaaacctcgtcaaattgagttttctgtacatcagattgattaacataattcatcttggtgtccttggaactctcttgcgacaaagttcttccattgccgttcttctgctcaaaactttcatcccttgtggacattgctggcgtgatgtcttcacctactgtaacactggtaccacaggctgacgcaggctcattactatcagctactggaacacttgcttcttcagtttctgaattctttttctctttcggagactcctcatgctcgtgaaccaaagccaaggcagctgctaatgattccttcattttagacctcaaagactcgttaccatcattcagtgttttcaccgacccttgtgacaagcctgcttgtttcttgttcatcacttgcttcccagatttttgggaagcaggttccatttgccttactttcttagcaggcgttggtagatgttctgtcttggtagaaagagtagcaggtggtggcatatgaccccgctgaatacattctgaataaaattgttctagccatggtctgtggtgcactggctctactcgcttgttagatgcatctaacttctcggaagtagcagaaccactgagagtagactctggtggcgatttccgcttccctgtcactgagttactacatgcagctactgacctctctacagaatatggaagttgcaactgaggcatcaaagactgagtatcaaccaacatagatgattgaaaagagacagcctctggctcaaattggaatgacaaaggaccagagacagatatttccataggctcttgctcaatctctgaaactgagatatgctgaagagaaggaggatcatttgatccaactaactccatcaaattcgtttctccaaaagcatctgaatccgctttcacagtctccagatcaataagctctgttcccatattactggacatgatacgaaaccaccacagctatatccaaacattcacttcaacagctctgagaaaaaaaaaacagaaactttgattcaatcctataacatactccgatcaacacacatctccattttcatcatttccgattaggggaaaaacaaaatcaaaattcaaaattaaacaaaacccatttctaagaagattcaacaacaaccaaatcaaaaaatatacaccaacataaaccaaataaaatccgaaattgactgaagaaaaaaagctcgatctagcgaaaaaataaacatggcgaccatgaaaagtttacctgattaacaacaaaaagatacacaatttcactgcaaaatcaatcggagaagatatgtgcgaaaggaagaagaaaccctaaaaagcttctgaatttggggatagagtttgttttgttgcgaaaaagatttcagctggttcggtgacgaaaacagtttcttctagagattagtggaggatactcttgtgaattgtgataaggccaaaatcataaatgggctttaataataggctcataataataaatgggccttagcgaaccaaattacttaggattcctctctcagacaaatccaacggttggatttacgtgtcaacgtctcatcaaacggacgttaataatttgcatgcgagatgttttctaatttttatattatcggaaataaaactgaaacgaaaacgctgtcttttcgagacaaaaaggaaaaaaacaaaattaaaattaggaaagttaaaataattttcctgcaaatttcttctttctcagaaatctaaaaaaaaacaatgaagaaaacaccgtaacgaatcataaaatttctcaaaatccaaactctgttttttgttcttcctcttccagatttggtttctttttttgaaaaactctctagcttcagttttttttttctctctctctctctctctaggaatgtttttgttcgtggatactggaatcatgagaataagattttgaaggagaaagcaaggtaatgattagggttttcaagtattgggtattataaaagtgtcaaccttttttttttctctgcttcttcttcggatctaaacccacattacacgtttctctgtttttttttaatgtcagatccatgttctttgtcggagaatttagggctaatatgtggatttgagcttctttgattcccaatttgtgaaagttttgaaatttttgggaaagagagaatgtttaagcagtttctgagtaaacttccgaggaagtcttcaaaatctgattcaggagagctgaatcgttcgagttcgggtccggtatcgtctccggttcagagatccggtactagtggtggtggttcgggtccggttcgatctaactcagggaagcgtatgtcatctgctgtgttcccagctagtgttgttgctggtattgagcctttggtaccgtttaaggatgtaccaagctctgagaagttgaatctctttgtgagtaaagttagtctctgttgtgtgacatttgatttctctgaccctggtaaaaactctatagagaaagatgttaaaaggcagacattgttggagcttttggattttgtagcttcagggtctgttaagttcactgagccagctattcttgcaatg

SEQ ID NO: 16577 - DNA, 739 bp, Unknown; identical to SEQ ID NO: 314
  misc_feature (1)..( 739): 2750-1469P.txt file - cDNA_ID_1568384; gDNA_ID_1563707; Annot_ID_148160
  misc_feature (310)..(310): n is a, c, g, or t

SEQ ID NO: 16578 - DNA, 3003 bp, Unknown
  misc_feature (1)..( 3003): 2750-1469P.txt file - cDNA_ID_1568553; gDNA_ID_1620626; Annot_ID_47147
tatggttatcttaatttgtttacaaaatatggttattcagttaaatcaccctatactatattgtccctctacaaaaattaggtattttcttaaatcttgactttgggggagttggatattttcgacgaagaatatcaaaaatctaaaaagacatgttttggatatgtaaaacaaaatttagaaaagtatcttatatataaggtatgttatctccaaaaaaatgtaatagtagatttgcatttctagtcaatatgttgatattaaacaccaataaaatagtcaatgcactaattaagttgccattttcatgcatcaaaacacactatttaaatattgccatccaccataagattttaaaataaagaaaacattcaaaacatcacgttcttagaacttaaaactaaattgacaaacacaaaatttcaagctagggatatgtcggcatcaaaagcaacaatgctcattttgttcgctctctttctttccggtaagtcttgattcctctcatcttcttttatataaatgaaactgattagaaacatagcttgattccagtcaaattttattttaaaaatgaacagacatattgttggtgagcattcctagagctgaagctcagttgatagttccatgcaagacatcagaacaatgtaaatcgattcgatgttctaatggaagcgcacaatgtgtgaacaaacaatgccaatgtccaagcctcaaacagatttactcggtgacggatgtgtcgtgcaagacggtctctgattgtgttgcttctcatcaatgcccgactggtttatctgcttgtattgaaggaaaatgtatttgtttgccttagtatgttcaaattatattatttaatatatacctacaagttaatttttaaaaagtttagttttatagatattaatttgaattcgtttactatggggaactctatcgacataaaaaagaaatctaatcgtagtcaacaaggccagagtatatgttggtaacgtactctatttactttctaatattacacaatcgactactacgtgatataaaagagacatctctacaatgataatgtgaaatattcattgttgatactttacgaaaaaaccatagtttcgacatttatattaattatgtatatattcatcaaagttatgttaaccaacataaatttcagttacaatcaaattttttgttgtaatatctaaggctgggtaaaatacccggacccgaagatccgaactagctcaaaatatctagatgaaaaatactaggctttttcttttgaaaaactaaatcagcgaatgagattaaccaatgctaccgacggctaacttatcgataacatttttcttctcttatctcgatgaaagatgatctctcgaaaccaaatacacaagacttcataatctagtccgtatacgccaaaaaatgaacctcataaaacacttcttgatgcggcgaaaacaattgatgcataatggagcgcctataaaatccttataaaagaatctaatctcaatcagtttcggaaatttggagacaagaagcgaaagctaaccatcttgataaacatcaggaacaagaatgacacttgatcgaccaggttagcatccacaaatggggctttgttagcttaggtaagacaacaaagagtgagtgcgaagacaaaggttggatgaaggctaacgagaaaccactttcaagctaagcctgtggcatcgaaactatagggagcacctaagcgataactagatttgggttgggagaaggcaaatatcaatggctttattattgactaagcacactgtcgatctagcaaatccggcaaatcctcattgcatgagccacaaaacgaatagatatgaaacgcttgaccgctttcgcatagaacacaacttcacaacccaaaataacaagagaaaatctccagacgaatacaaaaaaaacaaaaaaaactctgcatctcctatgatttaaaaccaagaaactaaagcagataagaaaaggagaagccactcacgacattgacgagaatcgctgatcacagcaccagagtgacttcccagccacaaaactggaaatgagctaggattctactgttgtttgagtgaaagagcacacactttggttaaaatgacattagatcatcgttctaaccacctgccattgctcttttaattatataattaaatttgatttttataaaactacaaaatctcttgtaattttcaaatttattacctttttaatccaaagcgatccaaaaataaatgtaaattgaagaatagcaccaaaaattgataaaattataataatttcgtaatttaaccaaattatcaccataatcactttggtaatttctaaaaattactttaacttcgataacataattactaacatacaaattaaaatcaaattttgtaaagagtatcaatcttccattacaactttagacttcaaccattaccatacaaccaaatgaaactgaactatttgtatataaaaattattctattttggttccaatataaataaaatatctagtttacattttttctgtgtttcttctaattatatagatttagttctataaaaatacaaaacctctaagtaattttcaaatttattatatttttacccaaaacaaccctaaaataaatgcaaattgaagcgtggcactgaaaataaaataaaaatatcttaccatatttaaaacaaataaccagattcagtgaattaacagaaacggatggtcaagtcgacaagacaaacaagtgctaaaagaacacaacataactcttttgcttaagcctcaaaaaattgtcattaacccaatttcccagaaacttcaaaaacagttgggggaagaagaagaagatgaaacgacgaagaacccttttataaagtctcaatcttctaatccaagatctgccctttttcagattctatctcaaagctttcctcgatcttgtgatgtattgaagccggagactgagagagatg

SEQ ID NO: 16579 - DNA, 3003 bp, Unknown; identical to SEQ ID NO: 16578
  misc_feature (1)..( 3003): 2750-1469P.txt file - cDNA_ID_1568553; gDNA_ID_2214651; Annot_ID_136419

SEQ ID NO: 16580 - DNA, 950 bp, Unknown; identical to SEQ ID NO: 414
  misc_feature (1)..( 950): 2750-1469P.txt file - cDNA_ID_1568887; gDNA_ID_1590844; Annot_ID_150148
  misc_feature (1)..(1): n is a, c, g, or t

SEQ ID NO: 16581 - DNA, 3003 bp, Unknown
  misc_feature (1)..( 3003): 2750-1469P.txt file - cDNA_ID_1569164; gDNA_ID_2926056; Annot_ID_196142
tttttccctttattttattttttgttgtttttttggtttgaggaattataaagtacacacagtaacggctcatcccgtcaaataagggaacacgtgtcataatcgtagtcgacacgctcgacccaactcagactcgcacgcgctttattcactttcttttcaaccgtcagatcttaaaataagtgttgagctaatcgtgatcgttgattacttcgactttgttaacttttttgtttttttgctctttatttataacctctcgtcacgctcttcttctgcgaccatcattacttctcgtgttcaacggtcaaacttcacgttctcaagacactacttaacttttgttttcgtatgctaatgactactattaattgtttttttagtagtattagatttaaagtttgaaaaagattaatagcagttacgtttgagacagatttaaattaattccccaccagttgaaagaatctacgcattacgcatatgcttggtttttaatatgtttttgttggttcttaaatgtttgatggcataatatatctttcatttaatatatattgatgaacattaatgcaccttatctaccaatttgatgataatgtagggaaaaaatagcatcataatagataatgataatatctgacctttttcattggaccgtcttgtgtatcaaattaaaattattaacttgcttttacttaaaagcccataataacaatatttttttggatccgaatattaatgaaaagcccatatctaagttttatgggccaaaacgtataaatcgaataaataaataggaaaaaaattgagtattattacttttttttttcttttttttttacgacagtattattacaaaaacacttagaaaagaaagtgccacatttaaatggggtttgttcctttttctccaaccgaaaacacaatgataatgcttaaaccaaacagtagtacaactctttccatgtttgactccagatcttatgatcaattgctaatccatgtttcggttatttttttgatagatcctgacacggctttttaattataaatttaaattccatacaacatttatataaatcatgattaagtacttacgtcagattatgtaataattagtacgttcatatagtgccgggaggtttattagtaccatttttactctctctctttttcttcaattacacatttactttaaagtcgattatttgattggatgctaagttttagaaaataatgtcaaaaattctggttctcgagaggctacaaaattttaactctcctctctttttttttattaccgtattttctgtaaccatcatatctcccacccatagtgacttttttacatgggactatcaattttacttacaaaagttactggtttacaacggcgaccatggtttgaattcagataaagataaagaaggaaatgcagagaggtggggacaaattacaagaaggaaatgaaaaataagatgtgaaaggtggaaatgagaagtcgctattaaactttgtagtaatctctctcagattcaggcttcgtttcgcttgttaccaatggcttctttcacatctttccctctcgtgatttacttatatcttatctttatatgtctgtcttgactcttgatcatgcattcaatacaaataacatccaaaatattacttgtgtgtttctctttcttttccaataactaacatggagtactaataatattcagattttaacataaatagtactccctctgtttcataatataaattattttggaccaattttttgtttcacaatataaattgttttcaagtttctatgtaaattatatattattttattactttatgattatatatattaatatgcagtatcttttatgattggttgaactttttaatagtaaatattcttaatctgcgtgcttttatctaaaacaatttatattgtaaaacggagaaagtattaatttgatttgttctttctttcgttttcacttctttcatttgaataatatcctttgttgttttgttcaatctttcatttttgtattataacgaaactcaaaagaaggtattttgaccactaatgttgttgttaaagttttaaacatcctttttggataatttaatttttattgtaaaggcaagaaatacataaatatttaatctgctaatcgccttttttttcttgcctcgaatccgaattttaacatataaagaagcgagacaggttcgaattaaataatctctcttttaaagagatctttatagaatacataaaaaaaaatcaaactatttatagaaaaaataaaataaaaacgaatttttgctttcaatttatgtacattggaccacagaatctgcaaagctatgtatgtatcaagaaagacgtgactataataaataccacgaacaataaataattagattcttattacgaatcttttatgtattcccctaaaaaaaaccatgtcataattagtctcattaaaatacgattgtatgtaaaaaaaatcataccgtatgtagaaatatggacttcattctgtaaataaaagaaaaattaacgtgtcaagatctttgttaatcagtaattaaaatctaaaatgacttaactcaatccgcaacacataggactgggagcgtaatcatcacgatccgatcgggacatatgtttgtctccatcgtacggatagggtatatgagcgtgtttttcacgcgcatcattcgcgtgaactaagaatgctaatgaattcgttaattcgttaaaataaaataaaataaattatattagaaattaaaagaaaagaaagaaagaaaaaaaaaaaagacaaggcgtgagataataaaaccctttggctttctcatagagatttgtccggtctcttgttcctctttctcctttcttcactgtagaatccgtcgaccaaacaactagctccaatggcataatgagcattgtagtttgcaatttcttcttccgtgaagaagaagaagatg

SEQ ID NO: 16582 - DNA, 3003 bp, Unknown
  misc_feature (1)..( 3003): 2750-1469P.txt file - cDNA_ID_1569187; gDNA_ID_2936587; Annot_ID_195130
tctccaagaggaggtaacttatcagtcttggaaacactagatacccatggttttctcctcccgactatgtcaagggcccagcgacgagcagtggttactaactccgcaggtggcaccacagcatcaataagacccaaagaatgaccttcctcagctttaactggcttagatgtctatatgtttcaacaaaagagatgctattacactttaaccaaggcacgctaatgctaccataagaataaggcactgacataccaaaatcatttcaagggctttggtgagaccaacaagacgcgggagacgctgcgttcctacatcaatccaaaggagtataattagcattataaacgaaagtgacttgactcattcaacaaaaaaaatgaaacgaagatcctcttcccatcctcagctcagtattatgcattgagaatgccttgacttctccacgagttttaaaccatatattgatcagagaattcaaggacttcacagtcagcgaagttgaatagatacctccaaaaccaggaataacaccaagttgcagctcaggcaagcctaactgtgcagcaggagctgatatcctagcatgacaagcctggaaacaaaccatacaactgtatcaccatccttcctcctcaaaaggatttctcgtgaaggtaataaataacatagaaactcataccatagcaagttctaatcctcctcccaaggcaagtccatcaatggcagcgacagacggtttcctagcagctaaatccaaggaaagaaatcaaatccctcagcaacacaacttacacaagtattccataaatcaaataaagtgggtttaagtagaaagatcaccttcaagcaagtcggttatgatgtcaatcgaaatgtaaccagcctttggctctttgactgagaaaattcataacaccagtatacgttactaactagatcaacacataccacactgattcaataaccaaagatacaaaagagacagaaacataccattccccttctgcatttcaccaaaaccagatatatcaaagccaccagagaacctcccctttgcacctgtagttaaataaaaaggaacacaaaagccattaccagatcatctccaaagttttcataaaaaatgttgtgtttttagcgaggaagagaatgatctccagaaataccagtaataacaatagctttaacatcattcctgctcaaggcctcctcgtaattacttttgagattgtatagcactgtacacaaatatccaaaaacagagtcacatacaaagaaaattcacataaacagatcataaattcgatcggaagctcaattacaatcggcgatatttacaaaaccaaatcacgaagcgaaattgacctaaatctgaagaggtaaaatccagtaaattccggatcataaaaataaaatgaatctgagagtacgtaccgtcgaaggatagagaattgacgggaggattgatgagtgttatgacggcaacgccatcgccaccaacttccatcaccgtcttccccttggttcgtgaatccattttcgagcttcgttgagattttgcgagtcaaaattttcggaattaatgaaaaagagaggagacgtgagaaatcagatgattatataattgcaaaagatgatgacgtcagtgataatatggtagagtggcacactcctcaaagcaacggtactttgataatgttttcgatatgtgaatttttatttgttattcgtatccaatttatgtataagttgaattaatcacgaattaggaacaaaatatttgcatttaaactctgcggatttattactaataaatatgtttggctggtcatagtcctgcgactaccaaacttggcggatcttatcttgatactacggatttgtaactaagcgaccctatataggattttacagttgtaaataaactttactagaaagagtatctctttttttttttaacattattagttttttttttttgcgatttatttatgacatataatcgatcatgctgaatattatatcttgtaatatatgttaattctaccatgacatccgttttttgtttaatcagattaaaaaacaaatgtaaatgcaatcaatagttttagacaagtattcaaaccataacttgttttttattctctctatttatggtccggtgaaatatcttttcacatgactaagtatcaactttcatacagttaaccataacagtaataaaacgtctaaaacttaagacttcactaacaatgatggatttgcttaaaacttaaaggacgtaaacgaatatcttccaagatcaaagacggttggcaaaactcaaaagacaaaagacgtaagttagatgtaattttgggttggtaggtagctcactttccaaagataatgttaggcgtttagtgatgaaatagattgtattttggaagtagcctcacattcacatctctaacttgtttgttcatttttaattgttcaaacttcaaagtgtaacaaagaataatcaagtgcaatcttatgttggttaaggttatctttcttgctttaatgaattctgtctatgagaaaagtgtgtccactttgtaagtctggccttttggcatttttcttttcggctttagtggatctgcttgtaaaaggctttttttgaagtcgatatatatagcccaccatctgaaggaaaaaaaaaaagtgatgtacatgaggatacgcgtgtaccgttgatcctctccgtgatattgctgatgtggcatagataagccaatccgatagttttttttctctttttcttttggtactaatccaaatagttattaatactaatcagtaccttagtcttaatccggatactcgaacagaaacaaacacacgggtacgtaacatttatctttttaagctctcttcttagaaacatcttccatcaactcaatctgtttgtctatttcttctcccttgtactgttttttgttttttaccaaagaccaaccgttcataacaatg

SEQ ID NO: 16583 - DNA, 3003 bp, Unknown; identical to SEQ ID NO: 16582
  misc_feature (1)..( 3003): 2750-1469P.txt file - cDNA_ID_1569187; gDNA_ID_2936587; Annot_ID_143874

SEQ ID NO: 16584 - DNA, 3000 bp, Unknown; identical to SEQ ID NO: 13783
  misc_feature (1)..( 3000): 2750-1469P.txt file - cDNA_ID_1569191; gDNA_ID_2214651; Annot_ID_188645

SEQ ID NO: 16585 - DNA, 3000 bp, Unknown; identical to SEQ ID NO: 13783
  misc_feature (1)..( 3000): 2750-1469P.txt file - cDNA_ID_1569191; gDNA_ID_2214651; Annot_ID_136428

SEQ ID NO: 16586 - DNA, 3003 bp, Unknown
  misc_feature (1)..( 3003): 2750-1469P.txt file - cDNA_ID_1570116; gDNA_ID_2214570; Annot_ID_135048
taaacagtggacgtggcaccttaagttttgtatcggatttcagttccatggtcttctctaggatgtttctcgctgagagatatgttgcacccatcttctgagtggtacctccagcctcgccttcttgtacatttcctgtgatgtaatctaacagctttgttttaccagtatcgatatgacccatcatacagcaaatgggagaacggactttgtcttcctcggagagcttattacgtctagagtgttcatcgccaacaatttgctgcttatcatctccacctcgagcactcggcttcttcagatccattgctaaacaatcgaataagctttaccttatatgggagatgacttgatcgacaaggttgagacagaaaacgagaattagctatgattttttctttgtgaaacttcctatacggtggagcaaacacgttgtgtagatatataccgattctaagtatgtaacgatgctgcttaaataatttctagaccatgcaagatataattgttttttctcggattaagattcatttacataaatgattttaaatggaatgaaatctactatatattaaaaggtaaatttttgtaaatctttaattattattcatatccaatgccattaatgtttttatataatacattttaaagatttttctaacttacttaaaaggataaaaaataaaaaagattacacatatagacacaatctagctactgcaaaaaagatttttttaaaaagcataaatctactttatttactaattataaatttaatttgtttcacttttattagtgataacaagattaattgttttgtttacacaaacaatattgttttatgatttcacttatatgaacattattatcaagagttataaagtttgcaaaagaaataggtttttattgactgaagaattgagaaattttctcatcacctttaaaattaatattgggcctagcgatgaaccgggccaacgcccattaaacatatccgataatagtttaaacccggagagactcaaagtagagaaaaccctaattgtatataaactaaaaatacttccttaattcttcacttcttcatcgccgtctgcacaaaaccctaatctcacaatctcctacgagatctatcagtctccacggtaaacgacactaatccatttcaatttctccatcgtcttctccgatcaaattctccatttacttatctgttcactatttttccagaagatgaaggttgttgccgcatacttgctcgctgttttgagcggaaaagcttcaccaaccagtgccgatatcaagactatccttggatcaggttcgttttgatgaatcgcaatcgatttcattacaatatgattagattcgttgtttgagtcgctggagaattcgatttgaaatctttattagatagttgagaacttgcttaagctgaaatgatatgtatattagggatttttatggttcctatcgacttaaacggtgtttatgatagtcgagatgcgtaagtattgttaagagtaatgatttagtgaacaatgggatacaataatgagtttgggatgattgatggaatgtggcattgttgtttttgtttggtgttgcagttggtgctgagacagaggattctcagattgagcttttgttgaaggaagtgaaaggaaaagatttggctgagttgattgctgctggaagggagaagttagcttcagtgccgtctggtggcggaggtggtgttgcggttgcttctgctacatctggaggtggaggaggtggtggtgcttctgctgctgagtccaagaaagaagagaagaaggaagaaaaggaagaatccgatgatgtaagtttactttccttctaacaaaagtcttgatcttaatagtagcttgaaatttaacctaaaaatgatggctcacttgtgtgtgtttttgtttttaatttgcaggacatgggtttcagtctattcgagtaagctggtagtagcatgaaaagtccggttttgttgtcctcttttaatattgtaaccttttgaaatctatatgttgttgttgtttagtttgtattcgatcatcttttttagacattgctgaaattctcaagagtttttgacccgaatgtcatttgcactttgttgttagcatttctgcttctatctcaatcgcctttgtcactctggagtttttagtagccaacaaaagcattggtcctagtcatggtcttaaatcttgactcgaatggtgatgagatacctctagccttgactttgctaatgatacgttgtcgttcatttggaacctagattcagattcggcttacgtatgacttcaagaatagtattattgtaagaaaaggataaaaaaaaaattctagtcttgaattgttcccccttcaatgccgtccaatatgtaaatacatcataattcgtatgagaaaataactagactatgctaaaactttgacaccacaaatttattagtaacttgcaaaacatatcacttgtcaactacatataccgagaaatgccatacgcaggcgatgtttcggaaacaacaggtgtagagttgaagctacttttgatgtcatcgaccaagaaggtgctatagaagacgaggttagaggtgaaatcccatccatcaaacaaaataaaactagagaattgtataatctggtcgttctcttctcaacatcaatattacccgtcaatcgaaatattgagcccatataaatatgggcttgaaagaactgggcctaaataaaattttaaattcggagatacattgataagattaaaaaccctaagcgtatataaatcatatagttttcattttttcgtacttcttctccatcgccgtctaaaaaccctaatctcactccgcctcctgcgagatccatcaacacttccgcagtaagcgcctccatttccatttctctctccttcttctcctacgtaatcgtactatgtttgatttttgatctgtttttgtttttcttcagaaaatg

SEQ ID NO: 16587 - DNA, 3003 bp, Unknown
  misc_feature (1)..( 3003): 2750-1469P.txt file - cDNA_ID_1570138; gDNA_ID_1621201; Annot_ID_57657
ggcggcagtggtgtggatcttgttttgagttgtgtcgataactatgaagcaaggatggctgtcaaccaggtagctgttacttctttctcgaaaaggcttttttgttacaaattccacagttcttacttcaccatcgagcatttttgatcttacattctacataattcaattagttgggaatggaaaatatataaaatattctagattggctctgatttgagtttattcttatgaaatataggcatgcaatgagttacgtcaaacatggatggagtcaggtaaatagtatgctaataattatatgtacttctttttttcatttctcttttggctaacaaaaaaggtgatattttgtgcaggtgtatccgaagatgctgtttcaggtcacatacagctcttggttcccggagaaactgcttgttttgcttgtgcacctcccctggtatgtttttttccttcttatatcactcttacaactctaacctataatgccctgcattaattagtgcttgaggaatgtatcagtggaatatgggtggttttaaggattctgtgatccagggtattgttaatactactttttggattttctctaagcaatctctttactctgtggtaggtcgtggcatctggaattgatgaacggacacttaaacgggaaggggtctgtgctgcatctctgccaactactatggtaaatttcataccaccttacaatacagttcaaaatttggctatgttgactatttatcaagttttctgctattgcttttgtttatttaagcgctatctatatattttaagactcttgtttgattgtcaattcagggtgttgttgcggggcttttggttcaaaactctctcaagttcttactaaattttggtgaagtttctccatacttggtataggctttgcttcctccagctctcctcacagttaacactttatagtttatcacagaatgattataatttgaatcagttaaagcttactagttttatgcccgttacttgatcccacagggttataattcactgaaggattttttcccaaccatgaaaatgagaccaaatccacaatgctcgaatgtagcttgtctagagcggcaggtaacctgattaaatgcaaccacaaaactatctcagcttgtctttgttttgcgccttttgtttccatccatgttctggtgaaaaagttgaaatcccaaaatgcagaaagaatatatgcttgcaaaaccagaaagggatgctgctgctaaagctaagatggaagctgatgcatccacaactatcgatgaaggtccactccatgatgataatgagtggaacataaggtaataactcagtgaattagttaaaaatcaaaatttgtatttttgttatcatattttctcctttccagccatatttgcaacaagaaatctgatgtgtatctcatgtctttttatcagtgttgtcgatgatgaaaatgagaaggatactacaaaagctgcctcaagttcaggttacttaaacttgggactctatgtgctatccatgtgaaaatgtatcaaatataagtcctgttcttctgactgttatctaaattgatcctgtgttatgtgtagatacattacccgaagggcttactcgggagcttccagttgcagatgagtatgagaaagcaatagccatagcctcagggtcaggagaaacagaggaggaagatgaccttgaagatctgaagaaacagctcgaagctctcaacgctgcttgagtctttatgagggagaaaaaatagttgttttagcatatttatacatgaaagaggctacaagtgcaattgtgtatgcaaaaagagtgtgttaggattggtaaattggatctcatggacatataaacgtttttgatgatgacttctcccgtttttttagttgttaccaaagacaaaaagatacaattttgaagatgtttcatggatttattgtcataatcatccgaactagaacttagaaattcaaattagaaaaagattttgtccaatgatgatgatccaagtttggtttgtaatgtgtaaaccagcttttttggaggtaagatattaattgcgcggggaaatcaactagatgacgtgtgaatcgcgaattacaattacgtttttggatggagaactgtcttttttttcctttttatatccctaaaatacttttttgtacattcatttatatcaggaaaaacagagttgtaaccaaattattacagagatattcaaagatatttcaacctatcaactaaagatgacgtgtatattgagaatggcaattgcgtttatgagtgggaaaccaaattatttcattaacatgatctttaggaataccgctaataagagattactaatcactatttgaggttttaatttaaatctttgtagtcctgattttgaatatttcgttttagctaaatcagctccaatttttcccagttatcgtttgtcgaattcatattactgttaatttagttaacttccgaagactattagtacatgattcttcaacaaagcaaataaagaaaagaatcttgatgtcgttctctcaacaattcaacaaaacttggtctcgacgactcgaccgtgtgagatgtttgagaagtcagaacaccacacgtgtcgacataaagcccgcaccacgcacgcttttcgtctggatatatccaaattactttacagaaatcatttgtattgtttgttaataaaaactttgaaccactttgattactatattatttttttggaatttattctggtgacattaatgttctatcctccacgcggttctcataaaccgacttggcttctttatttttcctttatctttctctatatatttacacacacacgcatttgtgcagagatattcaaagattagaaacattcttgatagatacaaaaaacatttttcagacacaaaatcataaaatctttgcctttagtagatcaaagttctttacattaatcgttagaagatg

SEQ ID NO: 16588 - DNA, 3003 bp, Unknown; identical to SEQ ID NO: 16587
  misc_feature (1)..( 3003): 2750-1469P.txt file - cDNA_ID_1570138; gDNA_ID_1621201; Annot_ID_174902

SEQ ID NO: 16589 - DNA, 3000 bp, Unknown; identical to SEQ ID NO: 221
  misc_feature (1)..( 3000): 2750-1469P.txt file - cDNA_ID_1570138; gDNA_ID_30942; Annot_ID_146843

SEQ ID NO: 16590 - DNA, 3000 bp, Unknown; identical to SEQ ID NO: 14171
  misc_feature (1)..( 3000): 2750-1469P.txt file - cDNA_ID_1570474; gDNA_ID_2214704; Annot_ID_136939

SEQ ID NO: 16591 - DNA, 3000 bp, Unknown; identical to SEQ ID NO: 14171
  misc_feature (1)..( 3000): 2750-1469P.txt file - cDNA_ID_1570474; gDNA_ID_2214704; Annot_ID_189790

SEQ ID NO: 16592 - DNA, 3003 bp, Unknown
  misc_feature (1)..( 3003): 2750-1469P.txt file - cDNA_ID_1570595; gDNA_ID_1620627; Annot_ID_47167
cagctcaacaagaatggataattgtactggagaaaatcccatggcttctcagttgaacattctccgatgcccgttcttgaggaacatcaatgagcccactaacctctctttctcttcatccttgccttttcccatccctgtaagtaaccgtctgttggttcactccatattgacatttcttatagattctgatcttgtctcatcatatatataggcaagagctgggaaaggacctatatttgaagatggtcccaattttgatacggcgtttaggcttttccatggccaagatggagttgtccctctctctgacaccgctcgaactgaagcccagaagcctgtgcctgtattccatccacttgctgctaaggcggccactattagtctctcatcctttggatctggagggccttttggatttgatgcattttctgacatgtttaaaaatcaaaagaagaagtcagattcatccaaaaataaggtaaaggttttatgagtttcttgctcaacatttatcttttaaaactgatgtgcataggtaaagaaatgtgtctaaggaaatagttaagcttctaagattgcttaagtagtatgcaatgtgttggcttatgagatagaaaatcatgatatttcttttctcttagagcaccgcttaattgttgtttctctttcagggaggaaaccacgaagccatgggcgacgaatggcttaaaacaggaaactgcccaatagcaaaatcatatcgagctgtaagtggtgtggcaccacttgtggcaaagatcctgcaaccccctccaggcatgaaatttaaatgccctcaagcaatagtcacagctcgagcagcgatatcaaaaacacctttcgccaagaacctccgtccacaacctttaccagctaaagtactagtgatcgggatgctgggcatggcgttaaatgtgcctttaggggtctggagagagcacactgaaaagttttcggcatcttggtttatagctcttcacgcagcggttccattcataggaatactgagaaagtcagtgttgatgcctaaaacagctatggtattcaccatagcagcatcagttttgggacaggtgattgggtcaagagcagagaggcggagactcaagtctgtagctgagaagaagttgacattggaggtaccaaatccgtcttctgttgaagcagatcagatgcaatttgccggagtttcatcagatggaagatgcggtgataaagtggtgatgaagtggaatcccatgatgcttgatgttgcaagccctgtgtcttccggagcagctactgttgtctgctaaaaggattttgtaattctcttcgaggatttatatatataattgtttttcttgtatttttttcggctgattgtatttaaaaagtttcttaatgtttgagaaaaacaagaataaagccattttttaaactgttaattgtattttaatgtaaaagacttgtttgattgaataaaaggaaagagaagttggaaatttggtgtttatgcatctcataggcaagttttcaaatatgaacaatgttaaatgagtcgttcaatagtgcttatgatatcgtggttgcaaaacatcagttatagagtggttgatggtgtagtgattaaacattgcatttcgtgatcacttgtttgggtccactcttgcatccttgctaaacctactccaaaattggtaaacctactctgaagtttgcagaactagtctaaaagattttcttaaaaggcaggccactagatagaagagaaatcacttacaagagtttcttaaacttttctttttaaagataagtgattatggaacattaaacttaagtttactctcataacctctattatcatcaaatctccttcttaaattttttttttttttttttgaaacaaatggattttattaaaaatacaaaaaaaattgtatatttggattacgtcaactcttacaattttgctagtctcatagaaagatgtcatacaatgcttgcatgtattgcttataacagtacgtgtgcttttgttatttcttttctagtattgtaattgcgtcgtacaagaaaacttataagatgcgtcggaattcgaaataaaacaaataaggttggaatgtatcacatgattttcatacgtttttacaatttctgataagtcccccttggtatgatggtatcgactttgttttcagaaagttgagtttgtttcttttccgaaaactaacgatgtcaaataatgtgaattcacaacatatataaaaaaatgataagaagagagcttaattttgagcgagtgttacaaattaattaaaaactgtgtctagtttaacacttaaaaaaattgcaatttaaatgataactacccctggattattttcataacaattttgtacatgaaagaatttaagataatatattattttaccaaattagaaaagctaaaaaaataagtactataatttgttgtatttagtgaaagaataaatgttgctgggaaaaaaagtgaaagaataaatgctttgggtatataccttatattaaaaacaaaacgaaaaaaaattaatgatatttgttaccatatatattatatacaatctataaacagaaattaagataatttatctgaaaagtgttttcaatgaggaaaataacaataaacagaaaaaatgaggtgtatgtacaaagatttgttaccaaatttaaagtattcaaacagaaagtacccatctgtttaggcaaaggattcgatcatcaaacgtcctacaatatcttgttttgcgatctcacccacaaatttatttcctataaattctcttcctctgtctgatctcttctattcaagcccacttcttttctctttctcttgtcttcgtggagttttcggatcttacacaacaatatctttgtcttactgtatttcttgtcctttttcttcttacctttctaacaattattaagaagagtaaagcttgaatttaaataaaaatgatg

SEQ ID NO: 16593 - DNA, 748 bp, Unknown
  misc_feature (1)..( 748): 2750-1469P.txt file - cDNA_ID_1570595; gDNA_ID_1620658; Annot_ID_163690
gaattcacaacatatataaaaaaatgataagaagagagcttaattttgagcgagtgttacaaattaattaaaaactgtgtctagtttaacacttaaaaaaattgcaatttaaatgataactacccctggattattttcataacaattttgtacatgaaagaatttaagataatatattattttaccaaattagaaaagctaaaaaaataagtactataatttgttgtatttagtgaaagaataaatgttgctgggaaaaaaagtgaaagaataaatgctttgggtatataccttatattaaaaacaaaacgaaaaaaaattaatgatatttgttaccatatatattatatacaatctataaacagaaattaagataatttatctgaaaagtgttttcaatgaggaaaataacaataaacagaaaaaatgaggtgtatgtacaaagatttgttaccaaatttaaagtattcaaacagaaagtacccatctgtttaggcaaaggattcgatcatcaaacgtcctacaatatcttgttttgcgatctcacccacaaatttatttcctataaattctcttcctctgtctgatctcttctattcaagcccacttcttttctctttctcttgtcttcgtggagttttcggatcttacacaacaatatctttgtcttactgtatttcttgtcctttttcttcttacctttctaacaattattaagaagagtaaagcttgaatttaaataaaaatg

SEQ ID NO: 16594 - DNA, 3003 bp, Unknown
  misc_feature (1)..( 3003): 2750-1469P.txt file - cDNA_ID_1570595; gDNA_ID_1620627; Annot_ID_162523
tttcagctcaacaagaatggataattgtactggagaaaatcccatggcttctcagttgaacattctccgatgcccgttcttgaggaacatcaatgagcccactaacctctctttctcttcatccttgccttttcccatccctgtaagtaaccgtctgttggttcactccatattgacatttcttatagattctgatcttgtctcatcatatatataggcaagagctgggaaaggacctatatttgaagatggtcccaattttgatacggcgtttaggcttttccatggccaagatggagttgtccctctctctgacaccgctcgaactgaagcccagaagcctgtgcctgtattccatccacttgctgctaaggcggccactattagtctctcatcctttggatctggagggccttttggatttgatgcattttctgacatgtttaaaaatcaaaagaagaagtcagattcatccaaaaataaggtaaaggttttatgagtttcttgctcaacatttatcttttaaaactgatgtgcataggtaaagaaatgtgtctaaggaaatagttaagcttctaagattgcttaagtagtatgcaatgtgttggcttatgagatagaaaatcatgatatttcttttctcttagagcaccgcttaattgttgtttctctttcagggaggaaaccacgaagccatgggcgacgaatggcttaaaacaggaaactgcccaatagcaaaatcatatcgagctgtaagtggtgtggcaccacttgtggcaaagatcctgcaaccccctccaggcatgaaatttaaatgccctcaagcaatagtcacagctcgagcagcgatatcaaaaacacctttcgccaagaacctccgtccacaacctttaccagctaaagtactagtgatcgggatgctgggcatggcgttaaatgtgcctttaggggtctggagagagcacactgaaaagttttcggcatcttggtttatagctcttcacgcagcggttccattcataggaatactgagaaagtcagtgttgatgcctaaaacagctatggtattcaccatagcagcatcagttttgggacaggtgattgggtcaagagcagagaggcggagactcaagtctgtagctgagaagaagttgacattggaggtaccaaatccgtcttctgttgaagcagatcagatgcaatttgccggagtttcatcagatggaagatgcggtgataaagtggtgatgaagtggaatcccatgatgcttgatgttgcaagccctgtgtcttccggagcagctactgttgtctgctaaaaggattttgtaattctcttcgaggatttatatatataattgtttttcttgtatttttttcggctgattgtatttaaaaagtttcttaatgtttgagaaaaacaagaataaagccattttttaaactgttaattgtattttaatgtaaaagacttgtttgattgaataaaaggaaagagaagttggaaatttggtgtttatgcatctcataggcaagttttcaaatatgaacaatgttaaatgagtcgttcaatagtgcttatgatatcgtggttgcaaaacatcagttatagagtggttgatggtgtagtgattaaacattgcatttcgtgatcacttgtttgggtccactcttgcatccttgctaaacctactccaaaattggtaaacctactctgaagtttgcagaactagtctaaaagattttcttaaaaggcaggccactagatagaagagaaatcacttacaagagtttcttaaacttttctttttaaagataagtgattatggaacattaaacttaagtttactctcataacctctattatcatcaaatctccttcttaaattttttttttttttttttgaaacaaatggattttattaaaaatacaaaaaaaattgtatatttggattacgtcaactcttacaattttgctagtctcatagaaagatgtcatacaatgcttgcatgtattgcttataacagtacgtgtgcttttgttatttcttttctagtattgtaattgcgtcgtacaagaaaacttataagatgcgtcggaattcgaaataaaacaaataaggttggaatgtatcacatgattttcatacgtttttacaatttctgataagtcccccttggtatgatggtatcgactttgttttcagaaagttgagtttgtttcttttccgaaaactaacgatgtcaaataatgtgaattcacaacatatataaaaaaatgataagaagagagcttaattttgagcgagtgttacaaattaattaaaaactgtgtctagtttaacacttaaaaaaattgcaatttaaatgataactacccctggattattttcataacaattttgtacatgaaagaatttaagataatatattattttaccaaattagaaaagctaaaaaaataagtactataatttgttgtatttagtgaaagaataaatgttgctgggaaaaaaagtgaaagaataaatgctttgggtatataccttatattaaaaacaaaacgaaaaaaaattaatgatatttgttaccatatatattatatacaatctataaacagaaattaagataatttatctgaaaagtgttttcaatgaggaaaataacaataaacagaaaaaatgaggtgtatgtacaaagatttgttaccaaatttaaagtattcaaacagaaagtacccatctgtttaggcaaaggattcgatcatcaaacgtcctacaatatcttgttttgcgatctcacccacaaatttatttcctataaattctcttcctctgtctgatctcttctattcaagcccacttcttttctctttctcttgtcttcgtggagttttcggatcttacacaacaatatctttgtcttactgtatttcttgtcctttttcttcttacctttctaacaattattaagaagagtaaagcttgaatttaaataaaaatg

SEQ ID NO: 16595 - DNA, 3003 bp, Unknown; identical to SEQ ID NO: 16594
  misc_feature (1)..( 3003): 2750-1469P.txt file - cDNA_ID_1570595; gDNA_ID_2926186; Annot_ID_140811

SEQ ID NO: 16596 - DNA, 3003 bp, Unknown; identical to SEQ ID NO: 16594
  misc_feature (1)..( 3003): 2750-1469P.txt file - cDNA_ID_1570595; gDNA_ID_2926186; Annot_ID_200653

SEQ ID NO: 16597 - DNA, 3003 bp, Unknown
  misc_feature (1)..( 3003): 2750-1469P.txt file - cDNA_ID_1570716; gDNA_ID_2214566; Annot_ID_134961
gaagaaaacgaacttgatcaggttttgctctatttcattaggcttgcttcttctcattgaatcatcagcatgtgattttgtaaattgccacggtttagtaattaaccaggctttatggtggtttcagggtttggacgcgggaattgatgcgcctccacttgcaaaggcttatgaaggtgttttctacaattacttaagcataggtttgttgaacttctctttttgatatcctaaacaattttcacaattgtttttctgaccagattcttgtgtttgtctggtttgtttaggtatggatgctcaagttgcatatggcttccaccatcttcgcaacactaaaccatatcttgctcaaggccctatttcaaataaggtttgtttattatatttgcacctaaactttggactcattatttgtctttgttaaaagctaaagtagttatgttggttttgagaaacgacattaccaaccacacaatgtttgcttttgcagattatatattcaagttttggttgcagtcagggttggttttgcacgccttgtgtcaacgatccaggtttaaggttcgccatttcgactcttattgtgtagttgaacttgtgtgtaagtctctgcttaagccctttgttgtgttgttgaccccttgtttgtgctatatgaatttgcaggggacttaggaacataatgaaaattcacatcaaaaaggttaactgctctcagtgggaagagatcgcagtcccgaaaaagtaaaaaacagttttcgatatatgatttatgtattacaatctttgatatcaatgcttaaaacctgatgctatggatttctcttgtagtgtgagatcaattgtcgcattgaatcttcacagctatggaagtggaagccatccttggggcaatctaaaaccggactatctagagaaggtattgtttctgttccatttcatcatatatgaactcagttctctgatgttaacccgaatgttttctttggtttttctcagagaggctttgtggaagcacattgtgatgatggtttgatagagattttcggttttaagcaaggatggcacgcgtcatttgtcatggctgagctcatctctgccaagcacatagctcaggtaacttcaaaagacactggtcaatgtataatctttttagccatgtgtttgactgtttcattttggtgatcatttcaggctgctgcggtaagatttgagctaagaggaggtgactggagagacgcattcttgcaaatggatggtgagccatggaagcaaccaatgagcactgagtactcaacatttgtggagatcaagaaggttccttatcaatctctgatgataaataatgaatgattgagattcaaagctggattctttgtacaaagctaattgttttgtatttggatttgattcagttagtcatagatatagcctaagctttttagtcttcttttcttttaaatctgagattgtgaccatttttctctttttaatttctgcttattgttggttttgtacatttttgtgttgtgaggaatgaagtttgtttatttataagaatgtgggaagataatatttggtcaaatttcaatctctcttcaatctttgtaattctagcattgagcacatagatgtgattctttgtcatatttttatttattttaacactagttcgactgagaaccaatttatcatcgacaccaatttctaagtaagaatatttttaataattatcattattagtcgtatatttttaccagaataataaaaaattaaaaacctaagttaataaaccacacaaaaaagtttttctctcttcgctctctcgtagtttgtaaagatagaaactgaaatttcttttgtttttgttaaccggatagttttccggtgagtcgccgtcccgtttaattcgggctttcgtccgacatcttctagctacgttagtggagatggttggctttttgtatggcatcgttggctaacttagcgacgttggccagcttccgtacggcagcgttgggcttacactaacagcgttggtcatctttgtttttgttttgttacttcaaaggtttgatgatgaagctttatggcatgcagaatcgtcagatctgaagagggtttctctttacaagatctattctccttctgttttgtttagcttcactattgggttatgcttttggctctggtagtttttcggcgatgtgtgcgtttccagcaattaccctcgtttggatctaccatatttaagacagtttcaattttattttcgcctaagattgggttaaagcttctatcctatgcaaatttgatatgcctttagtgcttttgcaagagagttcgaagattcaatggttggacaagtttgaactactcaatttttttaatttctttacccgttttgatgaattatttgtgattctagcaaccatatgagattaggaaattgatgtttgttctataacatctaattgccataatcggtgatagaaaaaaagagtttcattgctcggtgctttcccggcgatggttctccgattcaccagacttgagtctcatccggtggaggttgtggaagattcacgtgtccttagcttattattattggtctgacacgtcttaagcttatctcttttttgtgacgtaaaagtctgttgtggacctcatatgtagactgtcttgagccttttatgttgtaacactgagcctcagtatattaaaaataaatctttctctgaaaaaaaaaaaaaaaaagttaaaaacctacgctaaaaaattctaggtcttggaaaagagtatttgggccaaatgatcacattaattagttatgggctgaaataacattctgaagttttatgaggaccgagagaactaagtttaagaaaaatgttgaaaaaagcgtattagcagagggacaaacgctttttagggttttagatttcctctgagagagaattttcgaaagcttgagagagatttccaactacgttagccatg

SEQ ID NO: 16598 - DNA, 3003 bp, Unknown
  misc_feature (1)..( 3003): 2750-1469P.txt file - cDNA_ID_1570735; gDNA_ID_2214491; Annot_ID_183669
ctccttcttcttcttcttcttcttcttctcttctctgtttcttctctcctctgctttaaactctgatggagttctcttactgagtttcaaatactctgttcttcttgatcctctctctttattacaatcatggaactacgaccacgacaatccttgttcatggcgaggtgtgttgtgtaataacgattcaagagttgttactttatctctcccaaactctaacctcgttggttcgattccttccgatctgggtttcctccaaaacctccaaagtcttaatctttccaataattcactcaatgggtcattaccggttgagtttttcgccgccgataagctccggtttcttgatttatcaaataacttgatctccggcgagatccctgtatcaatcggaggtttacacaacctccagacgttaaatctctccgataacatcttcaccgggaaactaccagctaacttagcgtctcttggaagcttaacggaggtttctctgaagaacaactacttctccggcgagtttcccggcggcggatggagatcggttcagtatctagacatttcttcaaatctaatcaacggttcactcccacctgatttctccggcgacaatctccgatacctgaatgtctcgtataaccaaatctccggagagattcctccgaatgttggtgccggttttcctcaaaacgccaccgttgatttctccttcaacaatttaaccggttcaatcccagattctccggtttaccttaaccagaaatcaatttcgttttccggaaacccgggtttatgcggaggtccgacccgaaacccgtgtcccattccttcatctccggccaccgtctcgccaccaacctctacacctgcactcgcagctatacctaaatcaatcgggtctaatcgagaaaccgaaccgaacaacaactcaaatcctcgaaccgggttaagaccaggagttataatcggaatcatagtcggagatatcgccggaatcggaatcctcgctcttatcttcttctacgtttataaatacaaaaacaacaagacagtggagaagaagaacaatcatagcctagaagctcatgaagctaaagacacaacttcgttatcaccatcatcatcaacaactacatcttcttcatctccagaacaatcaagcagatttgcaaaatggtcatgtctccgtaagaatcaagaaaccgatgaaaccgaagaagaagacgaagaaaatcaacggtcaggagagattggagagaataagaaagggactttagtaaccattgatggaggagagaaagagcttgaagttgaaactttgcttaaggcttctgcttacattttaggagccactggttcgagtataatgtacaagactgttcttgaggacggtacggttctcgcggttcgtcggttaggtgagaatggtttgagtcaacaacgccggtttaaagactttgaggcacatattcgagctattggtaaattggttcacccgaatttggtacgtcttcgtggattctattggggcaccgacgagaaattggtcatttacgattttgttcctaacggcagtctcgtcaacgcccgttacagtgagtcaaaatcatctctttcacatttcaatctttttcctcgctttatgataaaggcacatgttagcataagatcaagtcgcacgctagcatcaccagggttttgctactgtgttcatattagttggtagtagttaaattacacctgtattaataaagtcaacggctggtcaaattttgattctttgtgctattggacagggaaaggagggtcttcgccgtgccatttaccgtgggagactcggctcaagatagtaaaaggtttggctcgtgggcttgcttacctccacgacaagaaacatgtgcacggtaacttgaagcctagtaacatactcttgggccaagatatggagcccaagatcggagatttcgggctcgaaaggcttctcgccggggatactagctataaccgagctagtggatcatctcggattttcagtagcaagcgattgacagcatcctcgcgtgaatttggtaccatcgggcccacaccgagcccaagtccaagctccgttgggcccatatctccctattgcgcacccgagtcgctccgcaatctcaaaccaaacccgaaatgggatgtgtttgggtttggagtgatcctcctcgagctgctcacgggaaaaatagtgtcgatagacgaggtgggggtaggaaatgggctgaccgtagaggacgggaaccgggcgctaataatggctgatgtagcgatccgctccgaattggaaggcaaagaggactttttacttggccttttcaaattgggatatagttgtgcatctcaaattccacaaaagagaccgaccatgaaagaggcgttagtagtgtttgaaagatatcctattagctcatcggctaagagtccatcgtaccattacggacactattaacgtttgatcttacactaactctagtctctaagcgtttctctatggccaaagtatatacacatgatgcaaattgttctttcttgttgtttgtccacttgagtttttatatatgattctttaggatactaccactaggttagcttggtttgtaatcgttttttgtttaatttagtgtaagttcggtttgtgttggagacttggagttggctcccatatacttaaatcttcaaacataagttaatgtgttatactatattttcaaccagtagaccaatcatataaatcgtttaataatttctgaaccactaaacccgcaagtaaaccgatagattgatcgtataatttcaaccggttcggatagtaaatagtagatcttccgtaaaccggatatgatctgatctgatctcccaaaaagtcccaaatccaaatctacgaatctccgtctcctccgtcgcattttccgaggtagagagagagatcaaaccaaagagacacagagagagtatccaccgatg

SEQ ID NO: 16599 - DNA, 3003 bp, Unknown
  misc_feature (1)..( 3003): 2750-1469P.txt file - cDNA_ID_1570779; gDNA_ID_2926274; Annot_ID_143505
tgtccctccaaagaagccacctctcttaacttagcctaaaagagagtttccaagaatatatttcaacaaaaagagagagtgagaattgttatatgaaatcaagaattgtagaaagtaacctcattagccaaactaacagctgcagcaagattcttgtcgaatttactagcgaggtcacggaccgaaagccgcttgtgctgatcagacaacaactcgctctctttctcgacagtctccttcacagatggacctttttcatcttcctttggttcctctactatctgattatcaggtcctaatttatatgttggaaagtgatcagaagcaaagctcacatctactgatactggaaccactgataaagataatgtcccttctatttcaggacacactttcgtcattttatctccggatctttatctgtttcaacaacaataaacaaagagcaaatcaaaaaatcattagatgatttgaattggaaggaagattactagattagctctaatctagttcataggaaaagatttaaggcagaacaagaaatgcattatactatcgattacactaaatgagaaagaatcagaacatcaaagggcagttaaaaaaacagaacaaacattttatatatatttttaaaaaagtggagaatttctaactcatgtaaccaaacattgatgtcatgaaacagtatacgacaaaaatcaggagaaatgaaagtagaatcaatcaactcaagaaaaacacaaacaaacttacggataaactcaagaccaagaaacagagaatctcaagagtgaagaaggaagaaggaagaagaagaataaagacaactggttctttagtctatctctctctagtcttcgtcgtcgtttggcatcttttttcttttttagcttttacaaaagcgtcaaagacgacaggataaatgggcaatgcagagaagaaaaaagagacacttttgttcctctctctctctcttcttgaacactgcttgttctctctctctctttctttcacgccatcatcgttagaaaacccaaagagtgcaaaaagagaaagaagaaaacgattataatttgttgtcaatgcctggtctcgtcttttgtttgctgggatgaaaaaaagtgaccacgcgctgttacatggtgtttgaaccacacgctctggcgcgagttgtcgtcggggcccgaccgaccctttggctccactggatttctcttctttttctctttttcacattattgattttgtgttttctagtttagcttttcgtgtggatctaattatgttcctttaacaaccattattatttcttctcaatcttaagcaaactatctaagaaactaaactttcaaatccaatatatgataaagagttaatgtagagatacatgttatatgactctaagctacaaatactaattttttaacaaaatgtataaaaagaatcagatacaaaattcaagaaaaacagtggatatatgtgtccaatccttttacaacctgtaatactacatttttagatccattactaaaattaggatatctcaatttcttaactaaccaatcaataatatgcaaaagcttatccaaagttacaaacattattgtattagaccatcttggagagtggtgagagatactgtaacatttggcgtgtagtcatgagtactacatttggtggaatctatgtttttagttgaaaggtcaaactcaaattagttttcctcctaagagctatcaaatgcgttaacatcacgattcacgagttacatatatagctagtatataattagtactataagttacaattgttttcgaattacattaatttcttttttcctagtcgaagttcacgaatctttttatcatgaccggagtctctaagattcgaatacagttttttggagcataatcttcttcgaatgacaataatagcaacaagttttttcgttacagtttcatttcatcaattcgtatggcataataatcacttatacactaatgtttttgctaaaatttatccatctcttttcatattaagattgaatgaattaaacaattagttaggttgatatttatcaattttcgtggtccatggttgtttaattcaataactcatcacgcattttatcatgtttggacaaataaatagaacaattggacaaattatcattaaagaccagtagagtgggtctctctagaattataatactttaatgttaaggaattttcttaattaaattccaagaatttaatatcctagcctcactaaagtgacaaaaaaggctaagcagagcatgtgatatttcaggtcacgttaacatgaatagatggttcaaacatcataatcgcacttttactttctgtttgtggtataacaagagagtactctgtactataatgagagatgcatttgactttaattagataccaatcactttagttataaactaattttcgtaagctgtaaagcatttcttacttaattcttagataatacaactctactttgtgtcttaatgatgtgtttgtgttatccatgactataattaactctgagcattaagcatatgcaacggggtccatgtagaatccaatgataccaaacctactcgccatcactttttttcacttcttgtctcctttttccttattttgttggcttttacttatttagttaagagtttgtagtgaatgaacagacgtttactagtattatctagtactttgtgggttaattgtggatgaagacaataattttgattaggcaataaagaaatgggtttggtctttggtgggctagtagtaagcccataaagaagaaagaggttcagacaacggaaaaataagggtatgacgtggcaagatatcattggttggaagaaagagattggcgggtgaagttgtttgtgccgtctacgaatttagggtttaatttgtgttaatgagccaccgtgtttcgattctatcatctcatttctcacctgcctccgccgtcatg

SEQ ID NO: 16600 - DNA, 3003 bp, Unknown
  misc_feature (1)..( 3003): 2750-1469P.txt file - cDNA_ID_1570779; gDNA_ID_2926274; Annot_ID_205253
tccgtgcgtcctctcatgtattctaaagcatcccttagcttcttcaacataacatgtccctccaaagaagccacctctcttaacttagcctaaaagagagtttccaagaatatatttcaacaaaaagagagagtgagaattgttatatgaaatcaagaattgtagaaagtaacctcattagccaaactaacagctgcagcaagattcttgtcgaatttactagcgaggtcacggaccgaaagccgcttgtgctgatcagacaacaactcgctctctttctcgacagtctccttcacagatggacctttttcatcttcctttggttcctctactatctgattatcaggtcctaatttatatgttggaaagtgatcagaagcaaagctcacatctactgatactggaaccactgataaagataatgtcccttctatttcaggacacactttcgtcattttatctccggatctttatctgtttcaacaacaataaacaaagagcaaatcaaaaaatcattagatgatttgaattggaaggaagattactagattagctctaatctagttcataggaaaagatttaaggcagaacaagaaatgcattatactatcgattacactaaatgagaaagaatcagaacatcaaagggcagttaaaaaaacagaacaaacattttatatatatttttaaaaaagtggagaatttctaactcatgtaaccaaacattgatgtcatgaaacagtatacgacaaaaatcaggagaaatgaaagtagaatcaatcaactcaagaaaaacacaaacaaacttacggataaactcaagaccaagaaacagagaatctcaagagtgaagaaggaagaaggaagaagaagaataaagacaactggttctttagtctatctctctctagtcttcgtcgtcgtttggcatcttttttcttttttagcttttacaaaagcgtcaaagacgacaggataaatgggcaatgcagagaagaaaaaagagacacttttgttcctctctctctctcttcttgaacactgcttgttctctctctctctttctttcacgccatcatcgttagaaaacccaaagagtgcaaaaagagaaagaagaaaacgattataatttgttgtcaatgcctggtctcgtcttttgtttgctgggatgaaaaaaagtgaccacgcgctgttacatggtgtttgaaccacacgctctggcgcgagttgtcgtcggggcccgaccgaccctttggctccactggatttctcttctttttctctttttcacattattgattttgtgttttctagtttagcttttcgtgtggatctaattatgttcctttaacaaccattattatttcttctcaatcttaagcaaactatctaagaaactaaactttcaaatccaatatatgataaagagttaatgtagagatacatgttatatgactctaagctacaaatactaattttttaacaaaatgtataaaaagaatcagatacaaaattcaagaaaaacagtggatatatgtgtccaatccttttacaacctgtaatactacatttttagatccattactaaaattaggatatctcaatttcttaactaaccaatcaataatatgcaaaagcttatccaaagttacaaacattattgtattagaccatcttggagagtggtgagagatactgtaacatttggcgtgtagtcatgagtactacatttggtggaatctatgtttttagttgaaaggtcaaactcaaattagttttcctcctaagagctatcaaatgcgttaacatcacgattcacgagttacatatatagctagtatataattagtactataagttacaattgttttcgaattacattaatttcttttttcctagtcgaagttcacgaatctttttatcatgaccggagtctctaagattcgaatacagttttttggagcataatcttcttcgaatgacaataatagcaacaagttttttcgttacagtttcatttcatcaattcgtatggcataataatcacttatacactaatgtttttgctaaaatttatccatctcttttcatattaagattgaatgaattaaacaattagttaggttgatatttatcaattttcgtggtccatggttgtttaattcaataactcatcacgcattttatcatgtttggacaaataaatagaacaattggacaaattatcattaaagaccagtagagtgggtctctctagaattataatactttaatgttaaggaattttcttaattaaattccaagaatttaatatcctagcctcactaaagtgacaaaaaaggctaagcagagcatgtgatatttcaggtcacgttaacatgaatagatggttcaaacatcataatcgcacttttactttctgtttgtggtataacaagagagtactctgtactataatgagagatgcatttgactttaattagataccaatcactttagttataaactaattttcgtaagctgtaaagcatttcttacttaattcttagataatacaactctactttgtgtcttaatgatgtgtttgtgttatccatgactataattaactctgagcattaagcatatgcaacggggtccatgtagaatccaatgataccaaacctactcgccatcactttttttcacttcttgtctcctttttccttattttgttggcttttacttatttagttaagagtttgtagtgaatgaacagacgtttactagtattatctagtactttgtgggttaattgtggatgaagacaataattttgattaggcaataaagaaatgggtttggtctttggtgggctagtagtaagcccataaagaagaaagaggttcagacaacggaaaaataagggtatgacgtggcaagatatcattggttggaagaaagagattggcgggtgaagttgtttgtgccgtctacgaatttagggtttaatttgtgttaatg

SEQ ID NO: 16601 - DNA, 1577 bp, Unknown; identical to SEQ ID NO: 4420
  misc_feature (1)..( 1577): 2750-1469P.txt file - cDNA_ID_1571642; gDNA_ID_1620705; Annot_ID_48854

SEQ ID NO: 16602 - DNA, 1577 bp, Unknown; identical to SEQ ID NO: 4420
  misc_feature (1)..( 1577): 2750-1469P.txt file - cDNA_ID_1571642; gDNA_ID_1620705; Annot_ID_165236

SEQ ID NO: 16603 - DNA, 3003 bp, Unknown
  misc_feature (1)..( 3003): 2750-1469P.txt file - cDNA_ID_1571642; gDNA_ID_2926196; Annot_ID_141265
acaatttaagggatctggaaagcccctgttgtatctcttgcatggtcttaatactgacagcagtaacttctcaaaacctgccagctttgaggttttgacatttcatcctttcttcttcactttctctggagatttggtcttatgtttgtcttgtcttgatgctgaagatgaattatcttaccgcatgtcttgtgatctagaatttcaggattctgatgctcgtactgttttcctgatatttggaatctcatttgtaattatttctttttactgttgtcctgtcttatttcaggggatagacaagtttgagactgatttgactactttacatcctattttggcggaatgtcgagttattaaatcaagtttggagcttcaactaatacagtttgcaaatgatataagttctgaagctcatatagaggtgtgaatttgatttcctaacatgttttctctcgaattgttgtttgtctttttaaatggtatgcttagaccaatgaatgaaataaattgatgaaacgattttcttatctgttggcttgttcacaatctgtcgtttttgtatcatcttacgacttaggtttctgacctcaattcttcttatccactccatgtagacagtttttttcttctctttttgcaattctcttacatctttccaactttaaccatgtgttttttaatccacattaaggttatgaggaaagtcacaccgggcatgaaagaatatcagatggaaagtatgtttttgcatcacagctacatgtacggtggctgtaggcattgctcgtacacatgcatttgtgcaacaggggataataggtaagtttggtggataaatcttgttattgctgaatatgcagaaatattccttttcaggtgtttgtactgaaaaactaacaaaacgatgttaaattgtttgtagtgctgttcttcattatgggcatgctgcggctccaaatgatagggtaaagggaacacacattcctcgcttttttagttctctcattattccctgtttgaaaatgttttaatacttgttgcagacttttgaagatggagatttggcattgcttgatatgggtgctgaataccatttttatgggtctgacataacatgctcattccccgtgagttcttctagcatcaaatctattcttaattttcctctgaattgtctttgcaccgcattgacttgtgtttttaatcttgtttacatgaacatcataatttgctgaatgtagttatctagagaaagtggtctctaatatttatcaattggtgtgcaggtcaatggtaaatttacaagtgaccagagtctaatctacaatgtaagtgccttacaagattggtgcaacgtggatgtattagaaatgtgtgctctattttttgtcttcgcacaatccagagtttggtgagtctcttgaagctttacatctgaataagtttctctgattttgccttcctttcaggctgttctggatgcacataattctgtaatctctgcgatgaagccaggagtaaactgggtggatatgcacaagtaagtcttactgagatgctatatagctctgttctactatgcatgcagatgcagtaattgggattgacaatgtaagcgtaaactcagttgctttggtccattttgatttatcctcttgttagggagataaattgaaatacatctccatatggttattcagctttctttgtcgactgaagcaaattaatgtacaggttagctgaaaaaatcatccttgagtcactgaagaaggggtccatactcactgggtaattctctctgtgttagacatttcaatactcttctctaaaggttaattcattctcatggtttcgttctctgttcctagtgatgtagatgacatgatggtacagcgcttgggtgctgttttcatgcctcatggactaggtcacttcatgggcatcgacactcacgatactggtggctacccaaaggtacatcaaatcttttttcaacccaatagtatcatcacgtaaataaaaccacagtccctgtgtcttacccgttgctttgatctttcattcttttagggagtggagagaccaaagaaacctggattgaagtcattacgaactgcaagagacctacttgaaggaatggtaagggccgattgtttcaagtagaaatgcttttggttcttctcatttatcgtctctgttcattgtcctaatcgtatttatgtcaggtaataacggtggaaccaggatgctatttcatcaaggcattgctgttcccagccatggcaaacgcaacaacctctaagttcttcaaccgtgaaacaatagagagattcagaaatttcggaggtgtcagaatcgaaagcgatttggtaatgtcaaattcatattcactacaacgtctacaagttaaaacactctcaagagtaatgtcatatacaataatctcattttgttgtatatgtgtgatttcttttttaggtcgttactgctaatggctgcaagaacatgacgaatgttccacgagagacatgggagatcgaagctgtgatggctggagggccttggccaccgaccaagtgatcgtagctactcttaggcagcttatggaaattaaaaacttgataagtaaaactcaataatacaacctttatttttgttaatgggaataaggaaaaattgcctgtgttttactaatcttgtacatgtagtttattttgtttcagtgtcttgtttgtgtggttggatattaaaccgattgaatgttcaagtggacagataaaatctaaccggtttggtgcttgtcgacgaaaaccgaaccggtacagaaaatatcttgagcacaattttagttctaatataaaattcattaacaagagagaaaaaaaaaacttcaaattaaaagcttcgtgtcttcataaaaccctaatctcgcgacttcgtctctatccccaaaaaccctttcctctcttccttcttgtgtgagaccgagaaaaaaagatg

SEQ ID NO: 16604 - DNA, 3003 bp, Unknown; identical to SEQ ID NO: 16603
  misc_feature (1)..( 3003): 2750-1469P.txt file - cDNA_ID_1571642; gDNA_ID_2926196; Annot_ID_201445

SEQ ID NO: 16605 - DNA, 3003 bp, Unknown
  misc_feature (1)..( 3003): 2750-1469P.txt file - cDNA_ID_1572180; gDNA_ID_1971889; Annot_ID_58457
agtaacgctataccacgaatccatgagacaattgttaaaaaactgaagttttaacccttcttaaaacagtatattaataatattttaaaattttataaatattgattcaaatacatccaccatataacccaattccaaaataaaacccgttctgtaatttctttacctgtcccgtgattttttttaaagtagtaatttttaaaatttaagaattatttattatatataagagttttataaattgcatcattctctaatacatttatattttatagtttaattttatatatagtaacattatacataccacataattttttggttttatataaccttttctaaattaggatgatttgatatgtttaatattagtggtcttaaaaaataataaattaaagatttaacccgtattgtgaattaattatattttacctttttattattgttgattcaaaaccccatttctccaaatctgtcttgccaaaaagccatttatttaataatattaattttatttatgatatgactctaattataatctaaatattttagctaataacataggagtgcaccatatttatttaataggagaatgtaccatatgacccgaatgcacttttaccaaaatccaccaaaaagtcttgcaaaaatactatagagataagaaacgatagtcggttttgataggtataagattaacaaatatattaattagcttaaattagttaaagagtacaaattgaaaagttatattacactttattcgaatatattatcaaaacttatataacagagagatttgataaaattgtaattgttgaatactttttttttgtgctaatttttatgtaattaagatttaattgatttcgtatataaaatattaaattgttttacgaacttatttgtttatatttggtaagagataaatatttgaatattcggtatattttgattcagtttagaaaatctttgatgacccgtctttagatccaataagccctataattaagaaatgaatattgtcgttaaatgaattttggtaaccttaataacgtcattaaaagattttgtttttgattaaatttttctaatatcattgtcatgtaattaattacaaaaattaaggttacatttcaaatgtactttccaaaataatataataggatttctttgggtacaaggtgaccaatgatcatctagaatcccgcaaccgtcaaaatcacaagttttagcgtaaacagtttatggattgtttgactttaataattggacaaatgttgtaaacaataatcactactacgtgttttaacgttaggttgggcatttttcaagtaacaatgaaactaatttatttattttggtagggataaaacaaaatttaatgcaatgttcaatatgtattagtattgtttttgatcgagtactaaaattctgtaattcgttcacttaatttaaaggtatagaatcataaaacgataattatttttggtaaacaaaactattagtcaaaagtcaaaactgacatttaatttgaattgaaaccaaggaaataaactaattttatttaaattatgttattaaatctttaaaaatcatctgataattacatgaaggaagcttggtcagccataagaagaataacaacttttttccttttttttttgttttgttaatccgttagtatataaacaacagtattcctagtttctttcaccgactcttctaatctctgcgatcgtacatcagaaacctctatctcatcgccgaggtaaatctttcagacgctgtcccttctcgtaaaaatcgaaactttgaatcaaatctacgtgaaatttttgtatttctctgcatgtttgatcaattctatatgaaaccgcgtttaagggttttagagtttttcatctcattcgttaatttcattgcatgtgtgcaggaaaaaagatcttacaatggctattaacaccatcacgaacgaagaagatgatgcatcaaacaactttggatgcaatatctgtcttgaattggcaagagaaccgatcgtgactctatgtggtcatttgttctgttggccttgtctctacaagtggctccattaccattctaaatcaaatcattgtcctgtttgtaaagctttggttaaggaagatactttggttcctttgtatggaatgggtaagccatcttctgatccgagatcgaaactcaatagtggtgttactgtccctaatcgaccagctgcgactaggactgaaacagctcgacctcgtcttgaacaaagacatcatgggtctagtttctttggtgggcattcaagttttgctgccatgccaactggtttacggttttcaaatttcttgttgtaatggaaagtatcttttgatgaatctgagtctgtttttttgacaatgtttttgaaactattattatacattgtctacgatttttgttattttgacaattaatgtttagagctacttttacattcttataaaaaatttgcatctgcttgtaatatttgattctccaatcttccgctttgtgaaaaatcgtcataagcttgttctcgtgctacatctgcagattgatcaacatgaatgctgattatagtatatgatccttaatatatgattatcgcacagatgaatttaaagcttcacatttaatcgtgtaatttggagtagatggcaaaagaacatggaaattaactaaatgacaatgatgtgatgtaaatttttgttttgaccattttgtttttgttaacatatgtaacgaatctacacagagtatttgtgttttcaagctccttgttaagcccaatgaaggtttttaatgggctctaatgggccgattcaataagttggaaagctcatgaagcgagagggaccgtgcctaatctcatcttcactctgctcgttatcttcttcctttttacctgttcaacgaaactcctgagctcagcttcactttgctcgacgttatcttcttcgttcagcgacaatg

SEQ ID NO: 16606 - DNA, 3003 bp, Unknown; identical to SEQ ID NO: 16605
  misc_feature (1)..( 3003): 2750-1469P.txt file - cDNA_ID_1572180; gDNA_ID_2684202; Annot_ID_191247

SEQ ID NO: 16607 - DNA, 3003 bp, Unknown; identical to SEQ ID NO: 16605
  misc_feature (1)..( 3003): 2750-1469P.txt file - cDNA_ID_1572180; gDNA_ID_1971889; Annot_ID_176805

SEQ ID NO: 16608 - DNA, 3003 bp, Unknown
  misc_feature (1)..( 3003): 2750-1469P.txt file - cDNA_ID_1572338; gDNA_ID_2214575; Annot_ID_186311
gatagaaaaaacgtacgactctgagctttacaacggctatttggcaatttacaacggatatggcgacttacgctattttactgtaaagattgaaaatgatatttgtgtgtcgttaggtaaaacattagtgaaaacaaaaggtggatagacaagatatggtcatatctatctaaccatacacagagacgtttgctgccatgcatgcatgatgcatatatatatatatatgtggatataaaatatatttaatttatatacacatagtccatagatagatagataaatagacgtagagagggagagagcaggagacaagaagagagtaagcacgcagagctttcgagcatgagcatgctagaaaaagagccatgtgtgctcactctcttctgtcgccttcgttattgctattcccttacctcctttagttgacttgcttcatcttcttgcatgcatatgattttgatgttatattagcctcggtccctaaaattactatatgatatgatgatatgatatgaaacagtttgtctgattttagggtctatatataaggattgctagggtctatatatgatgatgcatgcatagatttcatcatcatcatccactgaccactagctacgtttaatttatagaaagattccgccggattaaactcttatttcctgtcaatttgagcaacaagattctctcttttcaattatatatacataacacatgtctataatatacgtacaaaccaataaaattggactcttaacaaaattttgagagtgagagatcccacttaaaacgaaataaactatttgtttggtcattgcatgcgtaaacgaccacttgaacaattaagtatacataacataggtctagatctatgtgaaagattcccaaacttaagatctctagctagaacattcattgatcctccaatcaaaaaccaaaggaataaaaagtaatctttgtaagggcgaatgtaaaaccgaaacgtaagctagaggaattgatattaaaatggaagtaaaagcgaatattactaaaggttttggagttaattaaataaagacaaaagatgcaaggacaacgaattatgaacatcttcgaaatacgtttttaatattgttttggcatttgatttgatttgattctccttccacattcccttgttcatatgtgtttgtgtctcacgcaagcactacataagcggtccccctaaatacgtttctagaaacgtcaacgtttattcaatcataccaaaatttacatgtgtattcatcaatcagccgaccataaactacatggtccattagtcattacctatactgcaatttttctagcttttaacagccattatgtacttcacagtttggaatactggtatgacgaagaaaagtcgaggtaaaaaacgtattagaataaatgtttatcgtccaaagatcgcaccagcaaagaataagaaacctaaaccaacaaaggaacaattaatggaccctgaattttctgatgaagacgtacttaccagcttgggttttgatgatggcggttacataataccactaccgaaaaaatctctcatgttgattaatctaccagattcttttcgagatgagttgcaaacgatgcatgtcagtttttatctccgagaagttggcaaacttatgtttgggtgaggacaaatatgctctagtgaatagtactaagaagttgatgcttacagatggtctaggacggcttcatttgttttggatgaattcaattttttttccgaatcagtatttgcgaatgagatttatgtagccctagatgtgagatttatgaaagctggaagtgccaaaaagaaaggtggagattttaattgtaacaaaaacgcacagagtcttctttatgattttttcttggtagatatagatgaggagatatatgggtcaaaatttgaagagacggaagaccaaaagaagtggaacaaaaaattttgaattgatttgtcttcatcatattgtgctattaacattaaacacgaaatagagcatctgaatcttgaattctatggaatctctaaaacgaatagacagatctccgcggaggaagtgaaattctctactcatactgcattcaaaattaattgagtttttcaattacattggaggtttatcctttgatactttcggtttggtgatttgaatgaaatgttggttttgacagaaaaatgaataacacttgcattaaaatcatcaaaaattgaataacactagaatctaaggaggtgtattcgatcttatattttaagttatttgagtttttatataattttgattttttaaagaatttggatgaatttaaggaggttgttatgatttatggtaaaatcctctcaaattccacctaaaaccatgagatttaaaattatatatttttaactaagaaaatccacttaagtctcttaaagtcactaaaatccaatctttaaaatgttttcaataacagaagatttttaaggagattttaaaatcagtaattcaatagcattagatttcatgatacttttaaaaattcataattgaataacataggatatgttagtttgaataagatatcctaggtgttaatttactatttttaaaaaggtaagattttttttcatgtttttaaaaaatgtgagagtttttttacctatttttctattaaaatgaaatgtataaaattaaaattttgtttttaaataaaattactaaattaaatattacaaaatatgtatatattactatttagaattcaaatattatcgatacaaaattaaatttatttcttcaattcgtctatttaagcaagctagtaatttgatcgacaaaaaaaaaacaagctagtaaaatataattaacagaattactaaatcggccggtttagggattgctttctctcagtcgtcaattgcactaaaccactggtggtaatatcgctggcgtttcgcaagtatcaccgggaattgcaaagaagcagaggaccatg

SEQ ID NO: 16609 - DNA, 3000 bp, Unknown; identical to SEQ ID NO: 5982
  misc_feature (1)..( 3000): 2750-1469P.txt file - cDNA_ID_1572397; gDNA_ID_1620835; Annot_ID_57966

SEQ ID NO: 16610 - DNA, 3000 bp, Unknown; identical to SEQ ID NO: 5982
  misc_feature (1)..( 3000): 2750-1469P.txt file - cDNA_ID_1572397; gDNA_ID_1620835; Annot_ID_169849

SEQ ID NO: 16611 - DNA, 3003 bp, Unknown
  misc_feature (1)..( 3003): 2750-1469P.txt file - cDNA_ID_1572587; gDNA_ID_2926300; Annot_ID_205657
ctctattattagtttctacattttaaaaatgatagtgttagtttcttaattagtttatcaaaaacaattcaccaaacattattgtcacattttgtttttcgaaaagtagccaaacaaaagtttattgtgagcatgagatgtttatatggtgtgtttcaattttataatattgtagccaaacaaaaaaccatcttattatcttacccataaaaccccggaaattaatggaggtctacacacctaaatttcgaaaaataaatttgcatttttaaggcgcatatgagatgtttatggcaaaagttcaatttcagaagataatagccagacgagaaaccgtgttagagaatttcctctttatttaaccaatgagaaccccgaacaattaatactggtctacaaaaggctcctagtttttttattaactcgtacttttaaatgcttagacgagatatttatggcaactcaaatctcatcgtatcattttgtaaagagtaactatgctatgtaaagttacccctaaaaagctaggtccagcgtccacagaagttctctgaattttatttaatgatttgatttcttttgatttgtaaaattatttgaaaatgtgatgttatcgttcttaattgtatttaatattacatgtggtgaacctataagtaatatataaacgagagtacgaggaaacatttcccttgcaatttgttttgaaaagtttcttacaaaatggcattttggttaagtttgatatttttctgcttttgcacatttgcatcctcaactccaccggatgatccggtcaagtgtgagtcaggaaacaacatgtgcactgtgacgaactcgtacggagccttccccgaccgttctatatgtgaagcggcaaaggtggagtaccccaagaccgaggctgagttagtctctatagtggctgcagccactagagccggccaaaaagtgcgggttgtgactcggtacgttcacagcatcccaaagctcgtttgtactgatggaaaggacggtgttctcataagcaccaagtttttaaacaacgtggtgggaaccaatcccgaagccaagactttgacagttgagagcggtgtgacgttaaggcagcttatcggagaagcggctgaattggagctggctttgccacacgcaccatattggtggggactcacggttggaggattgatggggacaggtgctcatggaagttcgttgtggggtaaaggaagtgcggttcatgattatgtgagtgagataagaatggtgagtcccggtttggcttctgatgggtatgttaaggttcgggttcttagcgagacaatagatcctgatgaatttcgtgcagccaaagtttctctaggcgttctaggtgttatctctcaagtaactttccagttgcaaccaatgttcaagagatcgttaacctttgttatgcaaaacgattcggatttcggagatcaagccgtgactttcggggaaaaacatgagtttgcagatttcttatggttaccaagccaaggcaaagtggtgtatcgaatggacgaccgagttccggtcaacacttcaggcaatggcttgttcgactttttcccattccgtccacaactctctgtagcgttagccatcattagatccttaggtaaatttattctttgtttctcaagataactaatacaaaatatatttgatcatttgcatagtttttttggtaaaaaatatttgatttgcatagttataatgtttcttataaacaactgcttcatgatatgaagaggagagtgaagagtcatccggagatgcaaacgacaagtgtgcgagagcagagcaaataacgtcgtttttgttttccatctcctacggtgtgactaacaatggtaaaaatattcgttcacttacttatgcatctttctattgtttccatatgtatgagactttacaactttctatcacatattcatttgtaatttccacgggcaggtatggaattcacaggctatccggtgatcggaaagcaaaaccatatgatgtcgtcgggtacatgtctagacagccatcaggacggactgatcacgtcttgtccttgggatccacggataaaaggccaattctttcaccaaacagcattcagtatccctctcacacgtgtcaaaggtttcatcaacgacatcaaagcactcgtaaagattgaaccgaaatctctctgcgcccttgaacgcagcaatggtatcctcatccgttatgtgacatcctctcctgcttttcttgggaaagaagaaaaagctttagattttgacctaacttactaccgaagcaaagatgatcccttagcaccacgtctctacgaggatttcatcgaagagatcgaacaaatggcgatatttaaatacaatgcattgccacattgggggaagaataggaacctagcgtttgatggcgtgattagaaagtacaagaacgcaaacacgtttttgaaagtaaaagagagatttgatcctttagggttgttttcgacggaatggaccaaccaaattctaggtttaaaaggaaacgtgacgattgtgaaagaaggatgtgccttggaaggactttgtgtttgttcggatgatgctcattgtgctcccaagaaaggttatttgtgtcgaccaggtaaagtttatacaaaggctagagtttgtactcatgtaaaatcagtaaatggctatgacgatcataccaaatttaatttgatgtttaatcgtatatgagaaaagtgaaaacagaacattttacagaacaacgtcttttgttcattatgacaagcttaacaagttttatggtcggtcacacgggcctttgttgttgggctttagccggtttatttggttcaattcggtttacatggttagtcctcgaataaaataatttcggtttaagatttgttacggctcctccgtcaatgtatcgtcgttgatcccaaatttcttctgaacaatttcgattttgaattcgcgctgagtgatg

SEQ ID NO: 16612 - DNA, 646 bp, Unknown; identical to SEQ ID NO: 21
  misc_feature (1)..( 646): 2750-1469P.txt file - cDNA_ID_1573308; gDNA_ID_818; Annot_ID_144538
  misc_feature (199)..(199): n is a, c, g, or t

SEQ ID NO: 16613 - DNA, 3003 bp, Unknown
  misc_feature (1)..( 3003): 2750-1469P.txt file - cDNA_ID_1580298; gDNA_ID_2684204; Annot_ID_191363
catcaacaccagaaccaatagcaccatctccaacccccaaaatcgaaaccgtctgaggagcaggaacaaccttaggaaccctaacttgaacggtacctccaataaaaacattagaagaaacagcaggatccttgagaaactcctccactcgaataacctctttcaaaaacttatgtttcgcattggctccacggagatcccgagaaaaccctaaggagcaatggcaaatccgacgactacaacaaaagagagtcgattaaacagagaagaagataatagtgaagcgttaaaggaatagatagatagagataccatgtaattggacaagctacgtgaaaggccatcccatatatcctcaccccaacaaaaattattcctctcgcctccaaacggaaaaaaaaaaaaaaaaatcgagattttgatttttagagatcgcttctttctcttttttttttttatatttaatataataatataaggatcggtaatgttaataactctattagtattaatgaattaatcagtagtttctttgtgtagtagaaaaagggtcgtctcttttggtgagctctgtgagttttggtttggacgcagagataaggtgcttttctcatctcaaccttaatcaacgatgtttttaagatgcagccaaagaaaccgagtgcgtgttgcttcttccaatcaaaagcttccacgtcacatcacaattgtgttcttcactatacaatattggaatttttggatagacagctgttgcatttttaacccaaaactttcctaagtattttaccaaataatcatatatatatagaagagaaaaatctgtagagcaataaaaacttagaaatccaaaatctttgacttggtaaatttgttattgtctaaaaacaccgatggtgacattgtaacaatattttttacgaaatatgccatcacacagttttgcttatttgtgcacaacagaaaatttaatatgcaatttatctatttaatgatctaatgactacaaatgatcttgatttttttgccaaacataaatctccccgaaacgttagagtagccaagtcttcctttacgataataacaccaaatctaaaagaagacgagagggagaaactcaagtaagaatttgaattatagtatcaagaacctttctcgaccagccccactaaaacgagagagaagatgatcgaaaaacatttgttctccaaactggttttgggccaactttctatgatttaaaattgggctcaaaacttttatcaatgaaaggtaaaatgatacatttgggctccaaactagttttaggccagctttctatgaggtaaagtcccatacaaattattattttttgttgttggggttgattattcaatgtagacatcaatgtacaaactacccaactacaaagcatctttactttaaactcaactactctctcttatttaactaaaactactaaattaattgattagtatatcatagcttacaaaacatgtttttaggttttatattcccgagcaaaacacttgtctaatctagtgtgtgttattatggttacaacttacaacgagttaatctgatcaaaaataagagaaggcaagtgaaagctagacataaccattcgtaattaataattgcaacatggagcaatcgcggccgcatgggggcaaatgtatcgagtggataacataaatagatagaaaacgccaaggaccctacacaacacgtaatttagtgatgtgtttattctattattcagctgatagccacatgcattcgctgactataacaagcctatagtcataatattgcacatgcctctgattttgtatagatagagatattcatttaaaatgccaattattattggaaccagccaaaggcagaattgccaacgccttctcttcctccataattacctttgcatctgccgcaattcccgttattacgatcaacaaaaaaagagccaacaatctgatgatatcttgtgcaattcttatacgatcttgtcaagcataaacaatatgaaaaagaatctgattttgaatgtgcaattaactttatgccaaagtaaatgatactttaataactcggtaatcgttattaataatatacgtgtgttttatagatgctgccgcctgccgcctatatgtgacttggttgttcattaccgatgttttgagatttataaactaagttagtggtatattttgtgtttttttacatgttagaccagttcttttttaaaacgcttatatgatgaggtagagtatatttactataatgtagtagtttaatattgaagtcttgagaatatttgctctgtttagttagcacatcgataatttttgacatcagccatatctctacgcatactaagtatcatttccaagatagtttaccatcaaagacgacaaaattcccactagctttgttatgaggaaacaataactctatgtatatgcatgcatgaaaacatttttagatttatgtagtaaaatttcaatatctctacagtaacaagcatatatcaataacactaaccaaggaaaactcattctctaattatctcctctcatctttgatcttctcaatattgtctcatttagctaactttagttcctctcaatttctcttattaccatacaaaatttactaattactgtacaaaaattaccaaataaaaggccacaaatatcttaggaagaaatgaagcaaggcacaagtgccaatacgagattagagagcatgaattaaggagaaaagtcggtttcggttcagtaagacagacagacaaaatccatcgttggggtccagtcacattacctctttctacgtgatttcctctctctccactcgcttttaatcctttcacttgtataaagtcgtagcatctcgagatcgtcttcctctcacaatctcaaattcttcggaccttttctctctcccctgaagctcccctcactcactcttctccgaggaagaacaacagagacaatg

SEQ ID NO: 16614 - DNA, 3003 bp, Unknown; identical to SEQ ID NO: 16613
  misc_feature (1)..( 3003): 2750-1469P.txt file - cDNA_ID_1580298; gDNA_ID_2684204; Annot_ID_137302

SEQ ID NO: 16615 - DNA, 3000 bp, Unknown; identical to SEQ ID NO: 15143
  misc_feature (1)..( 3000): 2750-1469P.txt file - cDNA_ID_1580305; gDNA_ID_2926059; Annot_ID_196166

SEQ ID NO: 16616 - DNA, 3000 bp, Unknown; identical to SEQ ID NO: 13062
  misc_feature (1)..( 3000): 2750-1469P.txt file - cDNA_ID_1580388; gDNA_ID_2214595; Annot_ID_135467

SEQ ID NO: 16617 - DNA, 3000 bp, Unknown; identical to SEQ ID NO: 13062
  misc_feature (1)..( 3000): 2750-1469P.txt file - cDNA_ID_1580388; gDNA_ID_2214595; Annot_ID_186879

SEQ ID NO: 16618 - DNA, 119 bp, Unknown; identical to SEQ ID NO: 311
  misc_feature (1)..( 119): 2750-1469P.txt file - cDNA_ID_1580388; gDNA_ID_1563642; Annot_ID_148043
  misc_feature (28)..(29): n is a, c, g, or t
  misc_feature (36)..(40): n is a, c, g, or t

SEQ ID NO: 16619 - DNA, 3000 bp, Unknown; identical to SEQ ID NO: 11178
  misc_feature (1)..( 3000): 2750-1469P.txt file - cDNA_ID_1581498; gDNA_ID_2214482; Annot_ID_133297

SEQ ID NO: 16620 - DNA, 3000 bp, Unknown; identical to SEQ ID NO: 11178
  misc_feature (1)..( 3000): 2750-1469P.txt file - cDNA_ID_1581498; gDNA_ID_2214482; Annot_ID_183401

SEQ ID NO: 16621 - DNA, 3003 bp, Unknown
  misc_feature (1)..( 3003): 2750-1469P.txt file - cDNA_ID_1582322; gDNA_ID_1974077; Annot_ID_180419
gtgtcgatttcttgaataaacaggtcctggagcgtcttgtttcaactctagatcgatgtgcatcacgtacatgctcattgcctgttgaaactgtagagctgatgcctgcccattgtagcagattttccttgacatgcttacaaaaattgttttccttgagcaggtaataacacgttgagcatgtcatgtccatgattatagcatagtcctttactctcttgactgcttcatctgcaaaggcactagcattttatacttgataatgtactagctcttgctcctcatatgagtccctaatcaactctagttgtgtattttgcatcaagcacacatagcaatatgcatatatatcatagagagagtccgcaggcacattgccatttctgctgcagaagattaggaatgtccatggatttggtacccattcctgctccctgtttaacatactgatatcaattaattttttagtttcagctctgaaaccgagaactggcactccacaagagcagaagtgagcaagatctctatcaccacactaatggccagatgtgaattcattttgagtagatttttaatcgacgaaaataatctaggtaaggctctccattttcttataaactccaacatctttttcgcttgccattccttaatcagtggttatcttttggcaggcaaccgtccaatcccaacagctagacttgaagagattatctttaccctccaagaactttaccgcctcagcattcatcctgaggttgcatctgttcttccgttgcaaccctacctgaaaaacgttctacgcgaagataaccgtgacacccgtgcacacctacttgtcctttttccctctctgtgcgagattgtgttatcaaggtaatataacttctacaattattgttttgtgttcgaagcacaaaagggtgacagcaaattctctgtatggaccctatcaagttaagattttgagagtttttttttcaccagggaaatgcgggtgagagagctggtgcaaattttactacgagcagttgctacggaactaggcctagaaaaggttagtctatccagttgatggcaatagatgggaatgtttctcagcagatttgagttcttacattagattcttgagaaattttggttttataccatataggttgtattctttgttttagcgtgttctgaattactctgtgtgctgtattctacaatacgccattctccgagattttatgttggtttggttcaacaaagtactctgttaactgattctgagaaccacggttcgatcatcaatacagtctagaccatcctaacctgccttcgtgtacttggtccattgacgatgtttggttaacttgtgctatttcattctgatcttgttgaaaataaatttgtgtttcaactcgtatatgcctattttaattaggtaaaattaaaaacttgagaatcttatatagatcaacatatatacatttgtttaagtttatataaacttgcttctcaataacaagaaagaagaattgcatcatttggactgattgatccgagcggcggcagcgacagaggcagccacaccggttgggtatgtagtgagatgaggatcgttcctcatctcggcgccagtcactccctctgcgtcctttctcgttgctgctttatccgatggtaatttgctactcgctccctttcataatcattgtttcccaaaatcgaaaaaaaacattagaacccgaaaatgaaagaaataaaactagatattggattcaagcattttatgtatcacgtcttatgtgctattacttacagtgagaacgtcggctagcgtagtcttggtatcgtcagagccgatacgagcattaagagtggcggctgattgagctgaagccgcaacaccgccgggcatgatattggtccgccccgtagctctaacctcggccgcttgaatggcggctgcgtcactccactccaccggcttattccctgccgtgagaaccgctgcctctagagcctctccaattgttatggttccttccgatttcagaggattagctaccacctttttctggttaacttctccctccgcctacaaatttaacgttctaattatacaaattatgatattaacacaacagcgatgatactagcacaaaccactagattatatagtcacaaatcaacctgttcaccggaggcctcggctacaacacctttctctttgtcctccgccgccttaatgcctccctccgttgtcgaaatcttctctgcctctccttttacatcagcacaatctataggtttctgcagctgttcttcgctcattttttggggtaactctttctctcttttcctttttttctctaggcaacaatatttataaatgtaatggtcagaatttatataagttttgcattagccattcaattctgtgactatcttacataaacaacaacaacggctctcctcaactttctctgattttccctcttaatttagccaataacaatcaaacatatgaatgattcggttcggttttcactgaaccgaagaaatccaatcgatttcgctttggttagaacaatcaaaccgataattgaaccagttaaatactatccggtttagctaactcaatcaatcggttagggtcttttaattagggttttaaagtttcagtctctctcacttcttctttcactcacataacaaaaaaaaaaacttcgttcacttgccgcaaagtcgccggaaccaacttacttagctcaccgtctcgccggagtttcgacaatcaaaggtttctcttctctccctgtttcacatctcacgacggatcaaattagggttttcaattgaatcagaatcagtgctggctctgtttgaatctattgttccgaatttgtgatttaatcttctaattagctttgttgtatccattttggagcaatcattcaatttcataatatctcaaataccttgattgatcaatagcgagaagaagcacgaagaatg

SEQ ID NO: 16622 - DNA, 3003 bp, Unknown
  misc_feature (1)..( 3003): 2750-1469P.txt file - cDNA_ID_1582349; gDNA_ID_1972122; Annot_ID_179027
aacatgaagatggcattaagactggcaagtcaagtaaaaaggagaaagcagataatggtttagcaaaaacatctgcaaagaagccacttgcagaaactatgatggtaaagcccagtggaaaaaagttagtccattcagatgctaagaaaaagaattcagaaggtgcaagcatggatacgcctattccccaatcatcaaagagcaaggtaatcagttatttgaaccatgatttcgcttatctgtatataatatactagaacttccttaaacttataatggggtaactgtgcagaagaaggattctcgtgcaacgacgcctgcaaccaaaaagtctgaacaagctcctaagagccatcccaagatgaaacggatagcaggagaggaagtggtgattattttgttgctttctctgtccatgatatgaggcattgacttctcacctgtattcatatggtatagattcctcttttcaggagtccaatacaaacgagcttggtgaagaactcgttggtaagagagttaatgtctggtggccactcgacaagaagtaagtttattgttaaacttactaacttcatttttgatactatatgatgaatgatagcaatcttacgatttgtatttgcacaggttttatgaaggtgtcataaaatcttattgtagagttaagaagatgcatcaagtgagttaacttctctatttggtattttaaaattctctatttattgcataactggtttatatagaattttcccactgatggtctcgcaggtaacatattctgatggcgatgttgaagagcttaatctgaaaaaagaacgttttaagataatcgaggataaatcttcagccagtgaggtgaaaatttcttacattctatcattcaccattctttatatttaccaaaatttcaatgtatctggtttccctaataaaatctaagcaggataaggaagatgatctgcttgagtctactcctttatctgccttgtaagtgaaacttccatagttctatgataacccacaatttataattttaatttagctttagtcttgagttttttgctgttatgtgcagtatacaaagggagaaatccaagaagaggaaaattgtgtctaagaatgtggaaccgagtagttctccagaagtcaggtatgaaagtatataagaattctagttttagttgtttgaaagtttgatccgtgagtgaattagttcacaattatggatgtagatcctctatgcaaacaatgaagaagaaagactctgtaacagactccattaagcaaacaaaaagaaccaaaggtgcactgaaggctgtaagcaatgaaccagaaagcactacagggaaaaatcttaaatccttgaaaaagctgaatggtgaacctgataaaacaagaggcagaactggcaaaaagcagaaggtgactcaagctatgcaccggaaaatcgaaaaagattgtgatgagcaggaagacctcgaaaccaaagatgaagaagacagtctgaaattggggaaagaatcagatgcagagcctgatcgtatggaagatcaccaagaattgcctgaaaatcacaatgtagaaaccaaaactgatggagaagagcaggaggcagcgaaagagccaacggcagagtctaaaactaatggagaggagccaaatgcagaacccgaaactgatggaaaagagcataaatcattgaaggagccaaatgcagagcccaaatctgatggagaagagcaggaggcagcaaaagagccaaatgctgagctcaaaactgatggagaaaatcaggaggcagcaaaagagctaactgcagaacgcaaaactgatgaggaagagcacaaggtagctgatgaggtagagcaaaagtcacagaaagagacaaatgtagaaccggaagctgagggagaagagcaaaagtcagtggaagagccaaatgcagaacccaagaccaaggtagaagagaaagagtcagcaaaagagcaaactgcagacacaaaattgattgagaaggaggatatgtctaagacaaagggagaagagattgataaagaaacatattcaagcatccctgagactggtaaagtaggaaacgaagctgaagaagatgatcagagagtgattaaggaactggaagaagagtctgacaaggcagaagtcagtactacggtgcttgaggttgatccatgaatgaaggattgttaggtaaatgttaatccaggaaaaaaagattggttcttgtggtttaggtaacttatgtattaagtgaagctgcttgtttagagactaatggtgtgttttatgagtagattcttctgacctatgtctcgttatggaactagtttgatcttatgtcaccttgctagcagcagatattgatatttatatatttaagagacatgcgcatgagaatgagggtatggaaaagtccatatcagatgacacaaacaatgatcgtatgtgtagtcacttgtgcatttccagttttggacataaaattctgatattgcatagaaatgtttttaaataacactaatccaaacctaaataaaatatctctatacatcatctagaaatgtatggcttgatcaagaattgtagataataataccctgagttaaatgattgtaggtattatttcagttttcaaaattgtccaaatttatgagctatattaaagataatattttcaataaggtgtgtagttctaaatgtttcttcttcttccaccaacccctctttctatatgtatgttcttttttctaaaataattgtttgttcttttttagatatatcaaattaaatataaaaaatattgacaaaacttatttaccattgttaggtgaacttggcaagtgtgtaaatataaagataacattccttttcgttctttatatatacgaaacgtaccacaaatttctaactaaagcattcatagtctctcgaaagcctcttttcagaaccgaagctctttactttcgtccaccgggaaatatg

SEQ ID NO: 16623 - DNA, 3000 bp, Unknown; identical to SEQ ID NO: 1408
  misc_feature (1)..( 3000): 2750-1469P.txt file - cDNA_ID_1582551; gDNA_ID_1620397; Annot_ID_155811

SEQ ID NO: 16624 - DNA, 3000 bp, Unknown; identical to SEQ ID NO: 11072
  misc_feature (1)..( 3000): 2750-1469P.txt file - cDNA_ID_1582654; gDNA_ID_2214478; Annot_ID_133161

SEQ ID NO: 16625 - DNA, 3003 bp, Unknown
  misc_feature (1)..( 3003): 2750-1469P.txt file - cDNA_ID_1582835; gDNA_ID_1620304; Annot_ID_152754
attcctcatttaatgggcctttgtaacgtttcatctatagttggtttaaggcccatatatttgtctggcctgatgtagtacaataattaacggcacaataattaagtagtcacatgactaccaaaattagtgtggtgagtgggtaaactgtgaagtttcagttcccattgtcccgtagtgagaaagcaccagtccgcacatgactagccctcactttaaccattcccccataagaaattactttttgagaatgattcggatctagttcatggcctattagtaactttcaaaaaaaaaaaaaaaaaatcttgctttagcttatgttattaacttattattggccgaccattgtccctcgttaatttaatattcgactgcactttttttgttttattgtgtgtggtgcaattcatcgtttatactttatccacacatccttgaccatagcatctaactaataaaatacgatggagactagctcttaccatagcatctttttttttttaatactaataaattgtttaaaactcgatgtttagttgagtacactatgtggccccaaaaagaaaccctaacgaaacctacacttgaatctatatatatggagtcatggagaagtagctcttgctccacttacgtttttagcatttaacaagcaatcaatatcattaggattatatatggagaacaagtttttcgctgcattcttcttgcttcttgtcctcttctcatctcgtaagtcttttccttctatatatatgcattggtccatgaccatatttgattgacaataaatatatatatatatgatatatatgtgaagtcagtgttacgtgatctatctccattcttatgtgttgcattttatttgtgtaattaaatagaggagatcattgggggtgaaggaaggacatgccaatcaaagagccaccacttcaaatacatgtgtacgtccaaccacaactgtgccatagtttgccgtaacgagggattttccggtggtcgctgccatggcttccatcgccgttgctactgcacccgcctttgctaactagtttattttccattaatccatttaaatgtactttttctttctttttattttgaatactaataaagttcatcttcttctttttctcgtttgacatctattgttgggtaaatctcgattctagaggaacgaactgagatatatgtattaataaaaatctcacgctgattctgaaacaagcaatgtactagaacgttgtgtcatgtgtgtttattgattaactagagttaaatttgatttaataaaaatgtcatttgatctatgttttgaatcagcactccaataaagattatcaatatcataaagaagtttctcttaattatgagaatatttataacaatatacatttttagttatcattttaacccaaagtccacattttcttttagtcagttattatccaaaaaatcgtttatacttcccggccaaaggtttccttaaagggattttcaacaatcattttccaaaaacatttgaagaagcatatatatacacatttctatggaaaaaagcgttcaagaaatcacatacaacatctaacatttatgcaaactattttttcatataaaatctgataatttttatacacaatattctgtttatttttacacaatgttctgaaatttgccgattttgattgagtttcaaatgaccaaagttaacatttgaccaatttcaagtatggatttatggaaatgtcataactagagcaagagagacataaaagagaaatagtactaagaaaaatggaaaaagtacatcatcaacataagagcaaatgtctcaatgcattattctatatatttttttttatctatcggttctgttataatagtcaagagaagtaaaaataataggagtatgaagaatgcaacaacccacactaagatgtttataacatcatatgtacacgatgaatgccaaatgaactaatttgcggtctaagtcatcatcatctgttaccattgaatcacttcaactttgtgtcaagtccccaaatccggattgttccatcatcacttgctgaggccaccatatagaggttagtcgggtttcaactgacacacttcaccgatcctgagtatcctcgcaatacactacaagattacgtcagtgttcttcgtatgacccatatgtatacctgacacatcaaagaaatattactcggaagactctaaaagagattgataagaactgttttcccccatatctatgtcttttttacgttgtagattaattattcttgatttgggtatcataaatttaaattaaacaatctagttaaaaatgatgagatctatttggagtgaaattaaacaattttaataaaaatgtatgtgttatatgtatatatacatatatagattaagtggagtgaaaattaacttaataaaaatatcattgatatatgttttgaattagcactctaaaggttatcaatatcataaatgagcttctcttacgagaatatatatatgtaagaatatacatttttagttaattcaaaatttcattcgattatttgtttgaacccaaggtgcacatatgttcccgtaagccgatagtcataacatttgaagcattaacacatttctatgggggaaaaacgttcaatcaaccacataattgtaaacaactaacatttatacaaacgatcgtctgaaaaaaattgattcatataaaatctgataactttagtttatagtatacacactgttttgaaatttgcggatttagattgattcaagttcaaaaaatttgaaaatgtccaaagtcaacatttgaccaagaagtcgagtgttgtttttaatattgatggctaatatgattttaaagcccatacataaaagcccaaatacggcccaataaaggaaaagactcctctgggaagaagaactaaaaaagaaactgggattttggaagaagtggtcgagagaaaacaaacgataatg

SEQ ID NO: 16626 - DNA, 3 bp, Unknown
  misc_feature (1)..( 3): 2750-1469P.txt file - cDNA_ID_1585658; gDNA_ID_782; Annot_ID_144518
tgg

SEQ ID NO: 16627 - DNA, 2754 bp, Unknown
  misc_feature (1)..( 2754): 2750-1469P.txt file - cDNA_ID_1585780; gDNA_ID_1028; Annot_ID_144734
aacatataaaatagcttttgattacatttaactatttaagaaataagaattaagatagaataaaaaagctattaactagttcttcatcacctttaattaaatagttatttagaataaatttattttgagaatcagtacaattgcataaatgaatacaattatgtctataaaaattcactcttattagttatttcaactcttttaggcataaagcttgtaaaactttttttcttctttaaataataaaatttggaccctttaattttttataattaatttcctgtagatttaaaaccaaatcttgataacagtcgtgacagatctttaagtagatcatcattatctatgcataacacgaactcgagtatgaagaatgaacctctaactggctgagctaaataaacttgactattttactctatctttgaatacgatattgtttcaagggtatagtttcatattaaaacacttcaatgtggctgcttcttaatcaccacaaaaacaagtacttagttagtagtgaaaaactaaaaaccagtttaaacaggtagatatacaacactgtttagataaccgagatggttggcgaattaaacatagttttattaataattgaagaaggaaaacgacagatcaccaaagtagggactatgacattaagaagggaatcaaaacttagtgtttggttattcatgggtttgtcctttttctcttgtaattcagttcctctttgtcgtcttcagttactcttattacttctttgggggttaaaatgtgaaagcctattcatatcaaatcatggatatgacttatgcaataatggacttgttggataacagtaagtgggtgatatgttttggaagtagtttcagtttttttcctattggagaaagagaagaggtcaaaaaaggaatcataacaacttgatttggaggaggaagactttaaagagtgatagacaatggtattaaataagtggggaagagtactatatactgatgagataatcattaattgataaatggaattttcattgcagagtggcacatgtggttaatttaaagctgaagaaacttgtgagccccatattcttcattacaaaaccatttatgtcttattgtagtgtagactgtagagtacatacatgtagacggaccatcgaattttgaaattcagatttggtgtacctttgaaaattcatatcattatgactcaagagtctacgtatctctaaaaatgttcttgtcttctgtgatactttttttttgttagccaggcaatacaaccatcaaaaactaaaagcaataagaatggttggtgcgtttctacttaggttgtatctcccacgctaaactagtgagcacgagttagtcatttaagtatagctccatctaattatagattgtgtccgaacttcgcggttcaaaatcagtgtttcttcttcgaacttctattggttgttatcgcttgtacttttttgtcgtgcttttttttagtcatatttgttgtaaattttggattttctatttttttattttttttataacctttgtccaaatataaaaatgatataaacacttaacagttatcaaaaaaaaaaactaatatactaatgcagaatttatatcaaaagtattttatttctttatgtctttcatagtttattagttaaccacaaatatactaatgcagaatttatatcaaaagtattttatttccgtaacattcaaattgaaagtaattaccttttgtcataaaagtaattatgttgtggcagttataagtggttaactacttacattgtcgaatcataaaaaggtaaattccatatacattacatgcaaaacaggagggtttgaaagaaagcatgggcttaaaaccttacttacaagctatttattgggccgattatttaactcatcaattggttgcaatttgagcacttacgtaataatcatgtggtgaagggttcgaatcctcacctctacatttaccatttttgtattttattcttcacaaatagtgggcttgaaagccatatatgatcttcatttcttgtaagttgtaactcaaacgtactttattcaaaagtgatattgggagataaatctccatttagccatagtgtttatttatttttgataatcttcatttaatcatagttattaacttaatatggtaaccgatattcaaccgataaaacaaaaaaaagatccaagtcaataagaaaaaacccaaaaatatagtaactgctaaaaaaaaaacttaattttgcgatacagaaatattttctcaccccaccccagattcaccccattaaccgtttcaaaaggaaattaaggagttgttcatagtttcgtttgtaaattgcaattgtaagtttgtaactgtaatagaattagattatttagggtttgcttgatcctcgatctgtgatcgattgatctcgcttcgcacccagcaggtatcatttttattccattttctctccggccgtgtagttaatttgttaatgcattttatgtttgcatggtgaatctaacgattttttggaattgttttatatcaatccgaaacaaaaatgattaatatttttcgagacaaatctttgcgttgatttatgatatacgaacaaaaagaagaaacaaaccgtattacagattttatcggagaaagtttgcataacaaaccatatgtatacagatgttacaatgaaagtgatatttcaggtttatttaatgagcgtgaaagatg

SEQ ID NO: 16628 - DNA, 3003 bp, Unknown
  misc_feature (1)..( 3003): 2750-1469P.txt file - cDNA_ID_1585796; gDNA_ID_1007; Annot_ID_144573
  misc_feature (2208)..(2208): n is a, c, g, or t
catggtcctaaaagcccatttgacatccttacatgttcttcatctgttggaacccaatcatattcgagtcacccgtcatctgtcacctcttcctctagttttccctcgaggaaaatatctggtatcgtttcaacgagttgaggcagatcatcaaatggatcgtcaagaatatatgtgtgctgtattattatgtttttaaagggatcaacagaaactttggctatcctagttagagtgtcaaacccctcggcagtctccccatacacctgaaaaagggcctagtaatttgatatatacacaaaacaaagaataggtagatcattaataactagcacttacattgcgttttcgatcgacatggtctagaccatcactaagtgtaatatagaattaaaaatgaattaaacaaatgacataagactcggcttttacagattttttgagatggtcgttggtctggtttgcttcattatttttctcagttcttaggatcgattgcctacaattctagtttttgtttgatctttcattttttttaaagttccacaattcttagttgttatggtctttttgtgccatgtattgtatcaagtgcttcttgtgtatagtgatttagttttcgagaattttttgtttccgcagatattagtatttcaaaaacgtattgatatccattatttcacccctaatttatataatcaaaaattcaattaaaaaaaatatggtgtgtatcgccaacgtagaatttcaatatatataatattacagtctttttttccgcacataatattacagtttctacttaagttaatgatatgaattatttaggtatttatataaaatatttaattatatttttacacactaaaaacaaataatgttaattattaattattattatattaatctttaaatgatacatgaataaacgagacaatgagtaaataatatattttggaaaattgagacaaaaagggacaggacaaaaggaagctgtgcaccgccaactggaccgtggctgtagtcttctaccttccactgtcatagaaacagaataatactctttgttctttgcttcttccatggaaactctccacttactagaaataaataaacctacttttcgttaataacttaggccaaaacaaagattaattatatcaaaattttactagttaattaactttaaaatatactttttaattaggttaaaacgttctttagttgaaatttgcaagtgattagttatattagcttcaactaatggaaacatctcacaatttgtcaaaaactcgtttagaaaacaaattgaagtctagtagccttattttacgtggaatagactttatatatggtaataaaaattataaatattcttgcaatgaattttattttttctgttgactttctcaaatttgagtactgatttgatttgttgcacaaaaaaaaaagagtacttatttctgaattttgaaatcatcttagaatgtataattgtattattaaagtttttgagttttttttgtgaaaataaagtttttgagttaattgtgatcatacatgtatctatgtgtaatcttaaaactatctaatcatattcactactttctttttttatatttatcaaccagaaattaaattaagtaaataaccattaaattaagtacaatagaaagttatgttttcagattttcttgtgatgtttgtcggtgcttcaaattttttctcttctttgaaaaattgataattatatagttttctgactttttcttgtttgtcggtagaataagagaattcggatgagtaataatggatgactataaggttaattcgttcattttacattagcaaatgcattagtactcatgatagtagtttaagtatcatatgaaagttacacaacaactaagctgtttttataacttgaaaatatcataacactattcaatgtttaacaaacggagccggactccatttgcaatcttttaaagtaaaactagaggatcatattctcaatattaaaattaattttaatattccaacaatgactctttgtgatttgccatctcaacaatgaccgacaatttataatttattttagttaatgtcgtttatcaaaataaaatatcattctttcttgttaacattaattagcagtttcgaagtaatatagaaagacgaaattgtgaacttcacatttttgtaacnggtaccaaagtagataagacttcttttacacatctacttaagttccatatatctcttcttctaattactacactaaaatataaaaagaaaaacttaactatcaagcaactaaaagaatgaaaagtatttgtacattgtacatgaggctagatggattagagatccatgttgcaattcaataatggcattcctcaaattagctttccaaactttcatttatgttatttggaaagaacataatcgcaggttttattctcgaataactagatttctatcggcttgattatatatatcaaaaacaccattcgttactagctaaagccttaatagttacctattagatcaattgacttagaaaatcttagaatatgttataaatttggtttatttttatgttttacgggcgaattttttttgttttttataattgcttgatttttaaaaaatgttgtatttttttaatgaaaaaaacaaattactaaccgatttcttgtccaatttttcagaaaataatttttaagttgagaaatttactaaaaatataaaaactactaaatatattaatttaagactaattttaaagacaataataattataaaattgattaatgacgtacgcgtttgtgtaaatttaccaaaccatacccttcaaaaacccaaccacaaaatttgacaaactcatcgtttaacaaacatttcactttcctcttctcccaccattttcagagctcagagaaaaagaaagaaagaaaaaaagcttcgtgctccttcaccttcccaaatcggaaaacaatg

SEQ ID NO: 16629 - DNA, 5 bp, Unknown
  misc_feature (1)..( 5): 2750-1469P.txt file - cDNA_ID_1586187; gDNA_ID_1336; Annot_ID_144994
ttatg

SEQ ID NO: 16630 - DNA, 868 bp, Unknown; identical to SEQ ID NO: 34
  misc_feature (1)..( 868): 2750-1469P.txt file - cDNA_ID_1586207; gDNA_ID_1303; Annot_ID_144969

SEQ ID NO: 16631 - DNA, 1100 bp, Unknown; identical to SEQ ID NO: 51
  misc_feature (1)..( 1100): 2750-1469P.txt file - cDNA_ID_1587274; gDNA_ID_1775; Annot_ID_145354
  misc_feature (624)..(624): n is a, c, g, or t
  misc_feature (647)..(647): n is a, c, g, or t

SEQ ID NO: 16632 - DNA, 2984 bp, Unknown; identical to SEQ ID NO: 47
  misc_feature (1)..( 2984): 2750-1469P.txt file - cDNA_ID_1587391; gDNA_ID_1731; Annot_ID_145324

SEQ ID NO: 16633 - DNA, 2503 bp, Unknown
  misc_feature (1)..( 2503): 2750-1469P.txt file - cDNA_ID_1587654; gDNA_ID_655; Annot_ID_144494
  misc_feature (356)..(356): n is a, c, g, or t
accaccgaaaacaaactcagcttcttcttagctaagcaggcttaaggggcggctggacttatctaataataaaaatttgagtatctaaacgaataaattggagatattcttttagtgttatcctaattatagttataaaacaattataaccttagaaagtttcttggaaatttaatggtaatttcattaccgtaaatagtttttctttcttcttcacgttttttttttttgtttttgtcaaaactttcttttctcttttctctataaaaactaaaaaggcaaactttcctcccttttttgggtacacttgcccaaatgctcctctcagggctcaaattaaaggggggaaaaacagncaataaaatattaaaaatcatgaacacgatcttaaaaaaattatcgtgttttaagaaaaaggttaaatctttacgaatattcgaatccaggtcactctcttcttcgtcttcttcctcattcactcctcaaaagttcgacgtttttctaagcttcagaggcaaagatactcgcaagaacttcgtcagttttctctacaaggcgctagtatcaaaagggattcgaactttcaaagacgacgaggaattggagagaggccgtccgattccgccggagcttctccaagcaatcaaagggtcgagaatcgccgtggtcgtggtctctgcaacttaccctgcttcttcctggtgtctcgaagaactcagggagattctgaaacttgagaagctgggtttgctcactgtgatacccattttctatgagattgatccttcagccgtgaggagacagagcggagtagtctcgaaacagttcaagaagcatgagaagagatatagcagagaaagagtcaaatcgtggagggaagcgttgaccaaattggctagtctctccggcgagtgttcaaagaattggtataaatctccgaaactttcttaaagattgaagaatcgggtcgataatttcagattaagatctcttgtatagtttctcaaagttttgatttttttctctgtttctcaaatttaaggtctttgtctctgtttctgttttagggaagatctgtcgaatcgtttctcaaagtttcgatttttatctctgtttctcaaagttaggatcattgtttctgtttctcaaagttagggtcttcgtctctgtttctcaaaattaggatcattgtctctgtttctcaaagttagggtctttgtctctgtttctgttttagggaagatgactcgaagctggtcgatggaattactgagaagatatcaacaaagttgttctcggaaaaaccaaggaatgataatatcctaattgggatcgaccaacacatgggggaattgtatccactatttaacctgaattcgaatgaagatgttcaagtcattgggatttggggaagaggaagtaatggtagatcagcactagcaagccacgtttaccaaaacatcaaacatcactttgaagctcattgttttctcgaagacgtgagacggatttcgctacatttccgtgactctcatttacaagacgagcttctttcaaatatgcaaggagaaggtttgacaacaaagaactgtcataggtgtcttaagacgatcaaagcaaggctaaggaacaagaaggttcttcttgtggcgaacgatgtagacaagcttgaacaattcgatgcacttgctgaagaatttagctggtttggtcctggaagcagaatcatcataaccacacaagatagacaattgcttatttcatcagtagtgaggagtgtctacgaagttaagctcttgaggtgttacgcagttcgtgagctctttaggtcaaatgccttcaaagaaagagaaagagacgatactgttgggttcgaccagtctacatatcgagccatgtatatttcaggtcatgtgtttttgaccttgagatatattttcactttgttgtgtgatagaggtcaacttagagaaaggataaatgcaatagtacatagtctttagattcattaatccttttaggtacaaagtgttgtatttaggttgaataagttggttagattcaggaatattaacttgatgtgtttgtttgttctatagtgaatgttacgccattttttttacatatggatgtgccacttgtgtatggatttgtgtactatccatttggtaaactattttattcttaagacggttcacaacaaattcatttaaacttgtaattgttttataaattatctatatcaatctcgtccgacagttgacttagttgtaaccaccagaaaagtaagatgataatttatgtttatccatgttcattttcttattttggcggctcatcttctctttctgagtagtttagtgaaacagaagctgacaaacaaaaaatgaaaatgccaggaaacacactagagcagaagactcctagttcaacttctcttgtgttaatgtgcctataaatatcctttgagatattcatagagtatcagaaataaaaaaaaatg

SEQ ID NO: 16634 - DNA, 23 bp, Unknown
  misc_feature (1)..( 23): 2750-1469P.txt file - cDNA_ID_1593869; gDNA_ID_1590659; Annot_ID_149904
  misc_feature (8)..(8): n is a, c, g, or t
gtcgcggnggttcttctgccatg

SEQ ID NO: 16635 - DNA, 3 bp, Unknown
  misc_feature (1)..( 3): 2750-1469P.txt file - cDNA_ID_1594736; gDNA_ID_148; Annot_ID_143950
ctg

SEQ ID NO: 16636 - DNA, 1166 bp, Unknown; identical to SEQ ID NO: 48
  misc_feature (1)..( 1166): 2750-1469P.txt file - cDNA_ID_1595874; gDNA_ID_1738; Annot_ID_145335
  misc_feature (33)..(33): n is a, c, g, or t

SEQ ID NO: 16637 - DNA, 67 bp, Unknown; identical to SEQ ID NO: 44
  misc_feature (1)..( 67): 2750-1469P.txt file - cDNA_ID_1596062; gDNA_ID_1579; Annot_ID_145191

SEQ ID NO: 16638 - DNA, 1185 bp, Unknown; identical to SEQ ID NO: 401
  misc_feature (1)..( 1185): 2750-1469P.txt file - cDNA_ID_1596076; gDNA_ID_1590766; Annot_ID_150020

SEQ ID NO: 16639 - DNA, 927 bp, Unknown; identical to SEQ ID NO: 399
  misc_feature (1)..( 927): 2750-1469P.txt file - cDNA_ID_1596099; gDNA_ID_1590760; Annot_ID_150006
  misc_feature (13)..(13): n is a, c, g, or t

SEQ ID NO: 16640 - DNA, 3000 bp, Unknown; identical to SEQ ID NO: 5755
  misc_feature (1)..( 3000): 2750-1469P.txt file - cDNA_ID_1596158; gDNA_ID_1620814; Annot_ID_50647

SEQ ID NO: 16641 - DNA, 239 bp, Unknown; identical to SEQ ID NO: 395
  misc_feature (1)..( 239): 2750-1469P.txt file - cDNA_ID_1596158; gDNA_ID_1590743; Annot_ID_149977

SEQ ID NO: 16642 - DNA, 3000 bp, Unknown; identical to SEQ ID NO: 5755
  misc_feature (1)..( 3000): 2750-1469P.txt file - cDNA_ID_1596158; gDNA_ID_1620814; Annot_ID_169187

SEQ ID NO: 16643 - DNA, 2024 bp, Unknown; identical to SEQ ID NO: 3
  misc_feature (1)..( 2024): 2750-1469P.txt file - cDNA_ID_1596316; gDNA_ID_141; Annot_ID_143938
  misc_feature (20)..(20): n is a, c, g, or t
  misc_feature (391)..(391): n is a, c, g, or t
  misc_feature (587)..(587): n is a, c, g, or t
  misc_feature (709)..(709): n is a, c, g, or t
  misc_feature (1094)..(1094): n is a, c, g, or t
  misc_feature (1306)..(1307): n is a, c, g, or t
  misc_feature (1309)..(1309): n is a, c, g, or t
  misc_feature (1336)..(1336): n is a, c, g, or t
  misc_feature (1727)..(1727): n is a, c, g, or t
  misc_feature (1864)..(1864): n is a, c, g, or t
  misc_feature (1967)..(1967): n is a, c, g, or t

SEQ ID NO: 16644 - DNA, 58 bp, Unknown; identical to SEQ ID NO: 35
  misc_feature (1)..( 58): 2750-1469P.txt file - cDNA_ID_1596332; gDNA_ID_1330; Annot_ID_144987

SEQ ID NO: 16645 - DNA, 356 bp, Unknown; identical to SEQ ID NO: 388
  misc_feature (1)..( 356): 2750-1469P.txt file - cDNA_ID_1596933; gDNA_ID_1590610; Annot_ID_149852

SEQ ID NO: 16646 - DNA, 35 bp, Unknown; identical to SEQ ID NO: 608
  misc_feature (1)..( 35): 2750-1469P.txt file - cDNA_ID_1597137; gDNA_ID_1592312; Annot_ID_152242
  misc_feature (6)..(6): n is a, c, g, or t

SEQ ID NO: 16647 - DNA, 394 bp, Unknown; identical to SEQ ID NO: 624
  misc_feature (1)..( 394): 2750-1469P.txt file - cDNA_ID_1597184; gDNA_ID_1592452; Annot_ID_152489

SEQ ID NO: 16648 - DNA, 1867 bp, Unknown; identical to SEQ ID NO: 610
  misc_feature (1)..( 1867): 2750-1469P.txt file - cDNA_ID_1597200; gDNA_ID_1592316; Annot_ID_152249

SEQ ID NO: 16649 - DNA, 1727 bp, Unknown; identical to SEQ ID NO: 391
  misc_feature (1)..( 1727): 2750-1469P.txt file - cDNA_ID_1597200; gDNA_ID_1590645; Annot_ID_149888
  misc_feature (447)..(453): n is a, c, g, or t

SEQ ID NO: 16650 - DNA, 1032 bp, Unknown; identical to SEQ ID NO: 6
  misc_feature (1)..( 1032): 2750-1469P.txt file - cDNA_ID_1597245; gDNA_ID_226; Annot_ID_144017
  misc_feature (69)..(69): n is a, c, g, or t
  misc_feature (369)..(369): n is a, c, g, or t
  misc_feature (450)..(450): n is a, c, g, or t
  misc_feature (604)..(604): n is a, c, g, or t
  misc_feature (606)..(607): n is a, c, g, or t
  misc_feature (609)..(609): n is a, c, g, or t
  misc_feature (802)..(802): n is a, c, g, or t
  misc_feature (805)..(805): n is a, c, g, or t

SEQ ID NO: 16651 - DNA, 3000 bp, Unknown
  misc_feature (1)..( 3000): 2750-1469P.txt file - cDNA_ID_1662819; gDNA_ID_2926261; Annot_ID_143224
accctttccctctctctctacattgatttttcattttcggtggttctttgcagttttatttgattgattgatttttgaaaaggtcttctttttttggttgtatgattcacgggaatgattgagatttctagtattgtatctgcaatgatccgtgggaacaaacgtgtcatctgatttgaattccatgagcttgatgtaccatttggctacattcttctccttgctggatttgtattgcatttgatgattacttctttcgtgtggattgttcagttctgagataatcctttgttttactaggaaagtttcctcttttcggtgcgttaatcatagtatgattcaccactggcttcttggtttttgaaatttgatcttgtgtatcaatccttttgagttcttcattgttagggacatggatgttttaactgtatactatgtttgtaggatttatagctgtttaaaggcatgctgaggaacttgcattctgaaatttatgttttcttaaccaaagagctttgtttgttcttagcattggaaattttgttgtgttttaagcgtttctgtaatatacagcatctgatcaatatatttttttctcttggtttattacgttggttttagtatttaaggtttcactgaatttgttattattgatttgtttggatgaatttggtatacttggcttctctgattcattctttcgtccagaaggaaatgaacatttgagtttattgatggattatggattgacctgtttagatgtaattctttggttgatgactaaagctccttgcttgtaaatcattggaatgcgttatccatagtgtgattcacattggcttctagattccaattttttgttcttctgtttccatgttgatcattgaatttgttctcttgttttttttatggagattatcgtatttaagtttccactccccgagtttgatacgatggtttgaattgtttggatggatctcatacttcatggaatccgttttatgtacttttgtttttccttagaagattatacatcaatggtcacatcttgattgtggtagtcctgtggcttattcttattcttgtagaacacttgaccaagtataaagtttgcctttgatgtgaaatattaatgtttcatgctattttcaggcttctcttctcaagtccttgctcaaggaaatgagataggttttggttcagaagtcccagccacagtcgaagctgtcaaaacgcctaactcaaagattgtctatgatgaccataaccatgagcgttacccacctggtgaccctagcaagcgtgcattcgcctattttgtcttgtcgggtgggaggtttgtttatgcctctgtcctccgcctgcttgttttgaagcttattgtgagcatgtctgcaagtaaagatgtccttgcccttgcatcccttgaggttgacctagggagcatagaaccaggaactaccgtgacagtcaagtggcgtggaaagcccgtcttcatcaggcgaagaacagaagatgacatcaagctggccaatagtgtggatgttggatccctgagggacccacaagaagactcggttagggtcaagaatccagaatggttagtggttgttggagtgtgcactcatttggggtgcatccccttgcctaatgctggtgattatggtggttggttttgtccgtgtcacggatcacattacgatatatctggaagaattaggaaaggtcctgcaccatacaacctggaagtaccaacctacagcttcctggaagagaataagttactcatcggttgattaataaaagcacaacagtcaagagtctggatctgaatgatgatcttcacttgttctttttttcttttaattaatattttccggcatgttagagcaagattgacttgtttttgctgaataatacaaacttgtgatttttgtttgaagtatactcaatcttcgtttatccatcgctagtaaaagacgactatgttcatagtctgtgtttattatttaacatgcctatttgtcctatgtatgagtgagattcctttcgtatctcataattctaaacatcgtcattccaattaaaaagttgtatttacatttgagtttcgatagtatctcaacgttcataaaagaaaaactaaaggtatgagaaaaaccaacgtagaaacaaacaacaaaaggtaatatatcagctttgattgatagtttacaggaagataaccgaataagttcaaactgtattcgtaagacatcccgtgaatgaatattcaatcatccaaaagtggcatagctagattttttctagattggctaagaacacaaaaacataatattttattctgtttaatcttttttagttaagaaaaaatgtttgacacacaaaagccaaagtttgatttgggtaaaaaccattgtgggagatgaaaatgttaaaatcttgtttgttttggtcaccaacaacggccatgaactatatgggaagtgacttatctcttgtaagttgttttccttttgggatatgggaagtgacttctccgacccttgcaaactaacaacggccattacacactaattacaagccaaaggtcctcactaagcaacctctcgtgtttatcataagacaccgctctatctcttattattttattcattgttttctaatttcagactgattaatcatacattagagaaagtttattaaaaccatctgatgtaaaaaatcacatttatctaaattaaataaatttgttatctagtatataactatttattgttttaacatttggataaattgtaagaaattagaatgtaaaataagacagaaaatggtcaactatgagcatctatcgccatcatgatatagtttcgtcgtttgcgttcccgacctaactcaaaacttcaccaaccccatttttaagcccctttctttgtttttatcctccgatcgatcaaaccaagaaaaaacactttcgtatttccctcgacgaaaaaaatg

SEQ ID NO: 16652 - DNA, 3000 bp, Unknown; identical to SEQ ID NO: 16651
  misc_feature (1)..( 3000): 2750-1469P.txt file - cDNA_ID_1662819; gDNA_ID_2926261; Annot_ID_204742

SEQ ID NO: 16653 - DNA, 3000 bp, Unknown; identical to SEQ ID NO: 6166
  misc_feature (1)..( 3000): 2750-1469P.txt file - cDNA_ID_1662829; gDNA_ID_1620852; Annot_ID_51008

SEQ ID NO: 16654 - DNA, 3000 bp, Unknown
  misc_feature (1)..( 3000): 2750-1469P.txt file - cDNA_ID_1662833; gDNA_ID_1971851; Annot_ID_58408
ataagaatctatataacgtttttgttgttttgtgattacggttgggcagaaaatctatacgatgtgtttgtgaacataagagatgatgaagcagaacactgcaagacaatgagagcttgtcagactctaggcagtctgcgttctccacactccattttagaagatgatgatactgaagaagaatcagggtgtgttgttcctgaggaggctcattgcgaaggtattgtagactgcctcaagaaatccattacaagttaataaattagaaagtaaactaaaaaagattatttgtatcagctcatgaacaatagatataatcccatatacttgggaataaaggaataatgtgaaattcccatcgttgtgctagtgtgtgagagaatcaaataccctaatgatgtaaatgtactttgatgagcttaagtcgttgtagaccattttatccatactactagcctttgtggttgcattgtcggtttcttcaattcttatttcacaggagtaaaaaaaatgtttaaaagtacaaaatcattgaatgtatcattctctcaaaaagcatattggtattagcgtttagaatctctatatcccacacttttatttttattggttttgttggggagagtgtggcgcaaagacgacgtcgtctatgcgaacatttcacgtgggaaaagccttgattcatgcgccttctttaatttttcttctttttttttttttttttttgtctcttctttgcctttcactttttaaaatgattttccgcgggtttaataacaaaaatgttttcccgccagaaaggttttaccaaaaaaccatgttccggttatagcacaggtaagagaattcatcagtctagtataattagcagtaatcaaattcgaatactttgatcgtcgcttttatttcagagttagcgttacattaatagtacctttattcgattgatgatttgtttaatctttaatagggtttgaactccgatggaggaccttttttgttggtaatattcccttcgtttcacaatataagttgttttaactaaaaatacgtatattaagaatatttatttttaaaatgttcaaccaattataaaaaaaactgtagaatataaataatcataaagtattaaaataatatataatttgcatagaaacttgaaaacaacttatattataaaacaaaaaatttggtataaaacaacttatattatgaaacggagggagtataaacttaagtactaattcgattttgtttctattcgagaccttgaagacttttttatttaattttaaaactaagtcgtacagttacagaaacagcattaaatttttcctcttaagtaaatttattttttctctttctatcagaaattcagaagaactaacattatagttgcccccattgcgtacactgtacatcatttctcggtaaattacacataattataagttgattaaccttttaagttttaaacaatgatgtaagtaacttattaaaaattggtttttaaaaattgaaagttatatactcaagttggaaaaatattttacaaatatactcgattccactactactgtaattttgtgtggaataccagtcaaacagaatcgttataactgttaaaaattagtaaaactgtataaagtaattttaattcgcgggaaatcaatattcggaagcaactttaacaaaaaaaataaagaaatgtgaagagaaaaaaaaaactctgaaaacttcctttataatgtcatcatcactgcgagacccaaagatctaaacagtttctctctctccctcacagggctctctcatggcggagctaatctgtctatttcactggtgattctgtttcactatctgagaatttgtttagagtttccgttaccgagtcgatgatgagtgaactcgatctcggaacgagtcagaggatgacggaaacacaccgcacgacgacgacgtttcttgatttgctccgacgacagatgagcggtcacgatctcaccagaaggaaacggacgttaaaagaacggttgagattcaaatgcatcggatgctgtggtccaacctggaatctccgtctaactaacaacaccactcttcacagtccaacctcaagagacgacgaaatcgaagagttacaaattgaaaccggactcgttctcgaatcggatcatggatcgggtacgggtatgaatctcgcgacagcgttagaagcggagaggtataaccgtggagaatcgacggaggcggaggcagatatgacgccgaggagagtttcgttgatgagattgttggaagagacggcggagaaaatcgttgatgacgacgggaaagaaacggagatattaacggcgtctattgggacgttaacgggtaatgattcggtgtgttgcgtgtgtatgggaagaaagaaaggcgctgcgtttattccatgtggtcatactttttgcagagtgtgctctagagaattgtggctgaaccgtggatcgtgtcctctttgtaaccgtccgatcattgagatactcgatattttctgaaaacgatcggacggctaaaagttctcgatccacgtgagtaagtgaggtgatccctagatacgtttccaaagttttaactacggtttgtgtactttgtacgtttcttttggttattgaagaagatgatgtaaatgcaaaaaagaatacaagaggttttttgttcacgaggcccatttagtctattcaagcccagtaaaccgttattttggattttatctagcctaaacaatgctcgcctcacaccgtcgagtggattcttggccgttgatcttgtctctcacgtggcagtatcgtagtcgaatgtacatgatctatgtggaatagtcgatattatccctcttggtgtgagtttggtagttgatgaaagcaaaacatttacgtaacaatgtctataaaatcagtacaggtctattcttgttcactagcttcgaaattttagtcgaagaaacaaaaaaaaatg

SEQ ID NO: 16655 - DNA, 3000 bp, Unknown; identical to SEQ ID NO: 16654
  misc_feature (1)..( 3000): 2750-1469P.txt file - cDNA_ID_1662833; gDNA_ID_1971851; Annot_ID_176393

SEQ ID NO: 16656 - DNA, 1066 bp, Unknown
  misc_feature (1)..( 1066): 2750-1469P.txt file - cDNA_ID_1662833; gDNA_ID_2926179; Annot_ID_140493
acggaaacacaccgcacgacgacgacgtttcttgatttgctccgacgacagatgagcggtcacgatctcaccagaaggaaacggacgttaaaagaacggttgagattcaaatgcatcggatgctgtggtccaacctggaatctccgtctaactaacaacaccactcttcacagtccaacctcaagagacgacgaaatcgaagagttacaaattgaaaccggactcgttctcgaatcggatcatggatcgggtacgggtatgaatctcgcgacagcgttagaagcggagaggtataaccgtggagaatcgacggaggcggaggcagatatgacgccgaggagagtttcgttgatgagattgttggaagagacggcggagaaaatcgttgatgacgacgggaaagaaacggagatattaacggcgtctattgggacgttaacgggtaatgattcggtgtgttgcgtgtgtatgggaagaaagaaaggcgctgcgtttattccatgtggtcatactttttgcagagtgtgctctagagaattgtggctgaaccgtggatcgtgtcctctttgtaaccgtccgatcattgagatactcgatattttctgaaaacgatcggacggctaaaagttctcgatccacgtgagtaagtgaggtgatccctagatacgtttccaaagttttaactacggtttgtgtactttgtacgtttcttttggttattgaagaagatgatgtaaatgcaaaaaagaatacaagaggttttttgttcacgaggcccatttagtctattcaagcccagtaaaccgttattttggattttatctagcctaaacaatgctcgcctcacaccgtcgagtggattcttggccgttgatcttgtctctcacgtggcagtatcgtagtcgaatgtacatgatctatgtggaatagtcgatattatccctcttggtgtgagtttggtagttgatgaaagcaaaacatttacgtaacaatgtctataaaatcagtacaggtctattcttgttcactagcttcgaaattttagtcgaagaaacaaaaaaaaatg

SEQ ID NO: 16657 - DNA, 1066 bp, Unknown; identical to SEQ ID NO: 16656
  misc_feature (1)..( 1066): 2750-1469P.txt file - cDNA_ID_1662833; gDNA_ID_2926179; Annot_ID_200112

SEQ ID NO: 16658 - DNA, 3000 bp, Unknown; identical to SEQ ID NO: 16654
  misc_feature (1)..( 3000): 2750-1469P.txt file - cDNA_ID_1662833; gDNA_ID_2926180; Annot_ID_200150

SEQ ID NO: 16659 - DNA, 3000 bp, Unknown
  misc_feature (1)..( 3000): 2750-1469P.txt file - cDNA_ID_1662911; gDNA_ID_2936584; Annot_ID_195017
attattgttagattacgtacactaatttataagcatttggaagcctaactcttaagttgccatcattgttttaccaacaacactgagcaaacgtgacaattacttgaccaatgacaatctttgttgtgaatcgaaaagctgaatttccaacccatgatttgcctaggtttaataccagcttttcatcatacacgtgaaaaataattactcctaaatctatagtgggaatccaattcgaaagcaagactcagtttctcacaaaaaagtcatagactgaactatacaaacgccacgaaagtaagcaagaaaaatgatatagaccattgattacgtaatacacaaaatatggtcattaatcaatgtcaagacacaaggacaagactgattaagagaaacaaacaaaactcttctaattggtttccactaatttaaatcactaagccggatttttctttaatcacacagaaactttacttcaaaagtaaaccaacaagagctgcttctctttaatacatggcatatattagtatattctctggtgtttagtggcctactactatattaatctccagtagaaaagccaaacaccagtctggattattctgtcattcattttctatatacaggactagtttctaaatcctaatctttgtaccattatccataatggagaataaacctaacctaatacctcgaagagtttatcctaatagttgtgaaagatcaaatcaagtaattacccaaaaagcttaacaggctggactttccataggatttgtctggcttaatatacaaaaatgtaaagaacagcttgcatgagaatggaaacaaaggctagcacatgtcttggtaagatctatataacctatcgatttgagatgcacatagaaacaagcatgctatatatatgaagcaaataaattaggtggggttgcattacattgtatcaaacagagctaagaatggaacacatcaaggtatattagaacctagcaacttaaatgctacagaagcctatgtatcaaatgtgtgatggagagaagactttgcatttggataacacaagtcaccatagatgagacgatcaagtgtcatatcagttgtgccaataaaattttagggatcaatcattggttaggacttaggaatgagactaactagctgcttatgaggcctacttgcaaactcactctcaacctaccaatggatctagtgagagactacttggtttgggcctagcatgagctaaatttaaaacattcaatcagaaggcttaggaagtttaacattcaacaaaaaggacacagagagaagaaggtagcatttcaaccgcataagacttcactgagatatctgtacttacttttactagagaacgtgtgttgcagttatttttaaagagtgaattctaaaaaaaaaataaaaaacaatgttagaactgatctttcctttggtagacacatcccagtagttgaaatatgttaatagtgttgaagttcaagaggtgctaatagccaacttaaactaaacagctgtgaccttcattagcagagatgcaacataaaatgacaaacaggataaatgtgctattgaaggcagatcagtatacaaccccaatcttatgcaacgttgaaattattattgttatcatcctatgagaaggaaaccagaatcaatgtgacaaaggtaagaaacgtaaagtgaattaccttgaagaatcatgttggaagtggtccacggtaagcacgttcctctcctgagctgaagaagaccacaatcgcagctaagatagcccaaagaatgaaactcaaaagcacaatgcggaatttcacagtaacaactctatcgacccagttaatttctgcagaattgtcaactgaacagatcagttttttcagctcattgatctccccacgcaaggattgcacagaagcgggcaagtccacaatcgactggatccgatcagtagaagacgtgtcaatacgagcctccacactagtaatggttgaaactggagaatcatcagccggaagacaaatctctggggttgacattaagtctaggctcgatccttgaataacactctgaggagagaacaacataattcgagccagtaatcagtacccagacacataatggctaaaattgaggtttaatctttccaattcgtcatcaagcgcagacaaaatcgattcaattttcgaaaatttaacatctaatcttaacggatctgagcgtttacaaagcaacacaacgaaaaacttcgatggaaactaaacctaactaaaacattggagcgaagcatatacctcagcctcggaatcagagatcgcaccagaaatctgagagatcggactaaaatccatcggatccttcgtgctttcaaaagatacgtcggaaaatgttgcgatctgtctcttctccgtcgtaaccttcagttcagagaagcattgattcgaatttgagtagaacgatgtgggaagaagaaaacaatggcgattttaaggatcgatctaataaaattaccttccgattcttcatctcaggatccttgagtctcttagctccgagttctgatgagcgcgcgaagcttttcctgggaatttgaatttccttcatctctctccaatgttttcaaatttggagcttgtcagttttcgaaaatgtgaaatagtgagtgaactacaaaactatcaagcaagataattttatttgtagtacgcttcttacatgggcttaagggccgataactatttttattcaaggcccaatatagatcgttctcgctcatcgcaaaattaacctactaaaccggaattcggttcggttgtggtattgtttagccggtttggttccagcctcacccgatagaattagcctttagggtttctaacgtcgaagcttgaaacactatcgaacctcaaaatctctgttgccggaaattttcttcaccgaaactgaaagaagtcgaaagagagaagagaagaaattgaagcaatg

SEQ ID NO: 16660 - DNA, 3000 bp, Unknown; identical to SEQ ID NO: 16659
  misc_feature (1)..( 3000): 2750-1469P.txt file - cDNA_ID_1662911; gDNA_ID_2936584; Annot_ID_143809

SEQ ID NO: 16661 - DNA, 3000 bp, Unknown; identical to SEQ ID NO: 9156
  misc_feature (1)..( 3000): 2750-1469P.txt file - cDNA_ID_1662981; gDNA_ID_1972015; Annot_ID_177882

SEQ ID NO: 16662 - DNA, 3003 bp, Unknown
  misc_feature (1)..( 3003): 2750-1469P.txt file - cDNA_ID_1662993; gDNA_ID_1971819; Annot_ID_176081
tttgatggcaacaacatcgatcctcctctgcgctggtctagctgcggttttaagcagcacatatgcagtgaagaagcctctaaacgacgctgtttttggagctcgcggagagttcatggtggctctcaagtacgtcacgatactcaccatattcctcttctccttcttctctcactctctctcaattcgtttcatcaaccaagttaacatcctcatcaacactccttttcctcctgaggagttggaggacgagatgatgatgaccgcggaggagtacgtggcggagttgctagagagagggtttattttgaatactgtggggaatcggttgttctacgcggctttgccgttgatgctttggatatttggaccggtgcttgtgtttttgtgctcggtcgtgatggttcctctactttacaacctcgatttcttcttcttcggtaaagaaagaagaaaacttgatcaaaagtctagttttggatctgtgtaaaatcgagttctggtcagtagaacaagtgatttgtaattaagtgatatcatcgtcctctttgttaaatcctggactaccgatgaacgcatgaggactttacatggaagttgaaaagttcgaagatcatagtttaggtttcaattctagatcttccgattaagaaaaaaaaatgtaattaaataacgcattataattttcatatattagggtttttcggccgtatgtatttggtgtggtgtaatatatgtcacgttttggtttattgagcgttattattggcatttccatgtgggtgactttataacgtatcagcatatctcacagctctcttggtatgtacgtttctcttttttctttttctttttctgttagtgtttatatgcatgtggcttacgttgggcaagaaacgggacaaaaaatgtgatgttcacatctattccgtgcattagtatctgtcttattaagttttgttgttatgttatgtgttaggaaccagtcgtcacgaggctatttaaatcctccctaagacaatgtagaaatatacctacacggttatttttctgtgtagtatgaaatcaaactgtttagaactcgtttagagatgacaattcagattatgatgttagctaattatatccgaatctagttctgaagcccatgttcgcctagattaaaattgtatcattgtatgttaactaactctatttttcatatatatattttcaattttggtttagattaggtaaacaaaaagctatttcatgctacaaacaaatacaattttagtgatgaaaattttcgtagttaaaactttagtttcgtacgtagctaaatagctaaacgacagttgctaaataacttactcgtgactatccgttgatacacaaatttcatggataatagctactgaccatttaacaacgagatagccagagatatatcatagagatagccaattaaactgttggcaaaagtaccatgggctgtccttaagtgggcctaaatctaataaaattataaactgtggcctgttaggcatgtgatatttttctctttttcttcaagcctttttataaaaataaatgtcaagagatgatgaaggcatttgcacttttgaagaattgaagtaggagctcaaagcgaaggattacgatgatagacatctctgtaatgatttaacaaaactcaaatacaacatcaagtttggaagatcactggactgttttgtgtttgatcatttactcacctgtaattcttttttactaatatataacttataagaaatcataaactataatcttttttttttttgggtttaatgagacttttttctgtcctttttttgaacacctgtgaatcatagactataatcgaacttcatccccttttttttttttttgggaaacttagagaagaacaaaacatttgtgaggctgatgatttgatgagaccgcaacgttggagaactttggagtatattaataatatacattttcaatattatcagtatatgcattttcaactaggccttgctttatacaccggagattataattaatgaaaagatgaattacgttaatgtcattgcttctggtttgagttggcaaactccacgtaccacgtacatataattattattgagtagttgctaattaattatacttttgtcttgttaaaactagtattataaattggttaatgccataaagcaaacgatagaccagacacatctctgataatccagcggtacttatttgtcatgattctgtgatccaatcaattaatcgtatagatttagctatcgcgaatcgtgattccaacctttacataaattctttttaaattagggcaaattgtgttggatcaagcatagtaataacataatacgtacttataaaattgttaacgtgccggtgttgtttggagagaaaaacaaagattcttagctctcaggcaattaaaaaaacgagtatcgaaaaattcagaatagaagttgcttagttaacgagaaattaaatggtgcatcgaatatctaatggtttaatctggatatagtaaaattagtactccacgattagttagcaggcaagtagatgaatgtcattaatttgatgatctgattgaattgctttcgaaaaaggacaataataataatatcgactggttaattggttgtcatattttacccaaaaaggatcaaccattggatttacgccacgtcattaatgtgaaaatacaaaagtggatccgatggatgccgcgtgtcatcgtcggtcacgacatacccacgaagccatttacctcacgtttagtaccatctatctctctctctctcgtcttggcacgctgtttctttttttcctactggttaagaaatttctacggtccatggtcaaaaacacaccttcataaatatacagagagatcgtgagagagcagagaggaaacgtttctcttgttcgttggaatctccgtccctttttgttgatcgacggtggtgaatcttagacatg

SEQ ID NO: 16663 - DNA, 3003 bp, Unknown
  misc_feature (1)..( 3003): 2750-1469P.txt file - cDNA_ID_1663020; gDNA_ID_2213660; Annot_ID_181845
tcgacaaaatcctgcatttttaaagtaccacgagagagaactagttagtttcagatcacaaaaaccattgcaagaaaggtttcttatataatcagtggcattgagaagttgaaggtaatctgaaaaagtgagagaaatggaactaactggctgagattttcatcattgaccttcccaagtttcgctacaacaccaacaacaccttttgtcaacatcaactgagaagcttgagcaccatgaagagtctcaaccagacttaaaactccagcagctgagttttcgtggcgaaggatctgtgcattgatatcttcaccctgaagactgttatcagagttttcacttctaggagtaggagacgagttaagcttactcatatgaactgcagaagaaacgaaacaaagacatattggataatctcaatcaacataaatcactgaaacgtaaaagtctatgatatctcagaaccttgcaagtcgacgatagcttcatccattttgtttttctgagacttgagaaacttgagattatcctcatgctgtttgattttgttacccatagcttcaagatcagattcaagcctcttggaattgaacatagcaaactcagcgtgagcaatgcctcctccattctgagtttcatttcttgcaactggtgaagattgatccaaattcatcatccttgttggatcttgaacattcaacggagtggtctgaaacgaaatctacaaaattggatacaaaaatgactcaaaaactattcctgtataaaccctaactcttaaaattcgtaaaaaactgaaacacaaaccctcaaatttaatccaatgtggtcgcatgcaataaaaaaagaaacaaaatgtcgagagtagatacatcaataaacaataaagcacgagtcttttctccagattcacagaaaaattcagagagacttcatcgtttaagagagatcatagactaaagttcgttcgttttttcccaactaatctagttccattttgcaattgaactgagtttttttcaaccaacctgttgaccagtcggatacattgctcctcagcttcaatgttatcaccggagaatctttctgcttcaatgttatcaccggtgaatctctctctctctctttctctctgcttcttctccggtctctgtgagtgtgagggtttaatttttgtctttagtgttcttctggagaaaaacagccaattgttgtgaagtaattaaactaaattaaaatacaccaataataaaaggaacgtattttgccaaaaatgtaagaaaagtttccttttatcattcaattatattttctggccttatttaaggcccaataatcttcggagattccaagtgggctttgtgcttcatacctccttctgagcctgactttctcactttgtagcatattagtttgataatgaaaaaacccgaaccagaggtaatttctcgtatttgagttcgataccgatacatgtcaaaccagtttttatcttacaaattcaactagttctgtgtcatgcgttaggttcgttaggaaaacgactctgtgtatcgatattgtcgaacgccgtactggttttctattaaaaaaaaatcatgtgacatgatgttatgtttttgcctaaacattatcatttataacatattttataaggaatgttgaatttaagctttgattacattagaaagaaaaaaaaaatgaattccagctttgtttatgcttaaaaaaaaatagtttagctactcgtgtggatgtatgagactctcaatgagtagtgaaatcgaaaggtggtccaattttggaggtggtgtaggtcttgggtcctcataaagaaagttaggtcgccgttattaaaacaactgcacattttcatttttgtgtttttttttctctcttttaatttacatcttaagacaaatgatcggcatcatttgatattttaatatcaaagttttgtagttcttgagtaaattctgtatgtatacctaaacgaatgaaacctttaaatttttcgttcattctttaaaatgtgtcggataaatattgcttctaaactcatgttaccaatgttaatcatataaatcagaactttatgtataaatgcatattatatgcatgtgaccaatagtttattttaagctcgatataaaggaaggataaatctcatgaatatatatatttaaaaatattttgttaagtagcatatttaaccatacaaataaaagtattattaaaaactgaattttatcaaactaattagtaaataagtaaatttatttatagaatatagtttttttttgtttttaaatatataaattccaaagtatgtattggcttcaacttgaatttcctcagattacactagtacatatatattcgaaatatggcatcttctcatcaaaaatatgtaaacataataggtccacaagtccacaaaatttaagaaaaagtcaaataatattttatataggatataacaaatatgtaaatacagaattcgatcattacaaatgtcagaagactttataacaaatggaaataaaggcgattggcgttaaaataagagaagacaaaagtagaaacctcgtgaacttcgtaaaaacacttaacggcgtttaaccgaaccccacgtgactccgttaatgattttcattttatcggtggtgaaatgagtgagacatcctctccttctcaacttaagtctctctgtgacttctctctctcacctcttcttatctctctcgttctctttctctaaacttcaacaatcgcttctaatcgtttgatcacattgcacaaacatgtaagttcctcaattaacatatatgtctaacttttatgcatgttgttgtatgtatgacaatgttatacatttttggttttggctacaattggaattggttttgctattggtgtaattacagctatttttgggaatctttaaacataatgtttcagtattaatagagcttatgatcaaagagtgttgccggaaatatg

SEQ ID NO: 16664 - DNA, 3003 bp, Unknown
  misc_feature (1)..( 3003): 2750-1469P.txt file - cDNA_ID_1663090; gDNA_ID_1620392; Annot_ID_155640
taaaacaaaaaattgtgttgcctttgttaatcctctttacttactcatatctaaatacaaacacaaaatattggcatttaaaacaatcaagacatagttctttgcttatatatgatatattgattgttgtataattagtatatatataaacttacgagagaaaccgaatcacgagccgctaaggccaagatatcagcacaagagacaacaccaggacatgctgcctcgagctgcctcttggcatcgtcaatgacctcaaaaccatggaggttaacgtttgcgccagcggttctttcagagttaggtcccgataaaagcaccgaaccatcacaaccttggacaaagcaatcatggttgtgcattctcagtaacccgggtgcaacctttggatctgaaccaaagtgagatgccacagtggtccgaacaattgtctcggcattagggcacgtagtcgagtagaacccgatcctcgtaccttggccataaacggcgatgagacaactaaggaagactatgaccaaagcaaatgatcggaccaagcccattttttctttttgttggtttgtgttttagataagaccgcaagtgtgtttcgagttagtagatagagtttgttttagatgcatggaaagtgatacgagaacgtgagtaacttatagagggattgagaagtcaaatggtgatgttgaagtcagcgaaaggggctagagtgttgaggtaatttgacaaaacgacgacgttgtaatccaattcaaaactgaaaaccgcgttatgtgattggtcatgagctggcttcgcgcgttgacgattgcagatcatgttgggtttgttttttctcttttgttcgtttctatcaaactaattcctaattaatagtgtgtaatcatttataatgaatgtgattatagaatattgttttagcaggcgttaaactttgattcaactctaattctttattaaggaaactcgtattagtgcatgatattttcatctacaatgcaccgactttggactggttaatcgaataagtgttaaaatactttaggaaaagaaaaagtgttaaaatatccaaaacatgaacatccactattcaacaaaagttcactgaccgtctcacaaaagtgttaaaatatccaaaacatgaacattcactaatcactattcaacaaaagtccacggacatcactattcaacaaaagtccacggaccgatccatcgtgagagattagtgtattgaccggaacatatagatagtatagtctttaacaaacaaacaaataacaaaatagtatagtgggttttcttaataattaagctttgtttctttgactggttcggtttgttttgttcgaattttagtaatctggaaatggaagaatgatgtcgaatttttcagttcgattttttggtaaagatatatatttcggataaagatcgggttctacccgcaccaggtttgctatatagaatgatgttgtgatgataaagattaattctatacgtttactttcataacagattaatgactaatggcgacacgttgattggtggtgatcactgatcaatagccagaactcatgctgactaagactaaccatcgttgttggtccataggaattttttctgcaattaatttttatttgaaacaataaaaatttgtaacagaatagtgacatataacaaataaagagttttctacttgtccctttaggatataataaagtcagatgttttaaaaagaagagttttctatgaattcctgtttcttaaaataatttttgtcaatatagatgttattttcctataaaaatccatgcatgacgttaacaaagactagaaaaattcaaaaattgaagattatcatatattatatcttgtcgtcgttgatgtatattcatcgaccaaattttggtctctacacatatgtatatattggcgtcgaagcttaaaagaaaaaaaaagtaaaaacccttatggtctatatataaatcttgtttttatggtaccaaaaccatattctaactaatcgtaacgcaagtgatcgtctttgcttcaaatgtaaagctagataacctgaacgagtttggatgctggcatgctgcgaccttgaagtcggtccattgggtttttatttgtacatacggacaacattaattgcccatgagttgctaaaatccttctctgggtcttgttacaagcaccctcttcaaattagcctctatatattttgcatgaaaatagtctgagatttccccgcaaatgatatttgaattggaaataatttttctctaacccctaacccctaaaccctaaacactaaattgcataatctcaatttttctgttgagcacatctatctaaagatgttaattgagctgttcagatctaaatgggtgaagtccaaatatgaacaaaactaatgatacaaactcaatagcaccgtatccaaatatgaccaaactcaatagcaccgtatccaaatatgaccaaactcaaataagacaatgattaattagacagtgtatggaacctaaatatataatataattttctattttccgcaaaaacacattttctctcaaactcaaagaattgcatattttttaaattacattttttttttgccaaaattgtaaaaatattttttggagttaaaatgtcaatgtaaactccaaatagctagaaaatattttgaaatagacaaatttagtgggagctttgaaactttttcttttggtgaaaatattagttggggtattcggcttaaatacattttgctaatcagtccggtttaatattttctcgaaccggaaccggatcaatccacaattgactccaattacgtggcgaatcgtgaaaagatcatctatggaactgttcaaaaacgtctctttattttcttaaagatcaaaaacaaaatttctaatcatggactccaatttctctgatcattccctctaatttcggatttttgcatcttctccgatcatcttcaccactatg

SEQ ID NO: 16665 - DNA, 3000 bp, Unknown
  misc_feature (1)..( 3000): 2750-1469P.txt file - cDNA_ID_1663139; gDNA_ID_2926261; Annot_ID_204733
tcgctaggcttgcacagaggattgacattgacacccatgaaacattcagagctgccataccacgatgaaatcaacggaagaccaccgccatagaattccagcaacggaatgtactgtgccatggagcctgtaacgacggcttcgacgcattttgcttttggccaaagtctcttcactattgcctcccatgaggttttactgcattcttgctcgataaggctcgctaggtccggatttggagcggtgaggaacttactaatccctgagacacattgagggtctgtgatccagtcactgagacggccagtccttatgtttgagcataactcttgccaatgaccttccaagtacttgattactctgatgaagacagaagcaaagggtgcaccgaggcgagctacattatctcgttgtagaagcccacaaagcaattgacagtacatgctctgagtagtgtcttcacaagtagaaatttcatgcgggcttatctgtaatctatccctgcaagtaatataacaaacacgaaaaacaaacagtagtaagcaccaatgagcatgttcacaaaaaagtgaattgtgtaatgtaacgtggggaaaaagtttttgttaatttaccaaagagatgagttggttttgtttacgcttttcaaaatacaagttatcatagtcctgatcagtatcccagaggcagtctctctttcagggttcacgaaatagaacgtgagagactttccttctctaatcccctcgacgtacctgcaattacaatgaatgtttcttttggtatcacatcaataaaacaaacccacgttggagtttagaaatatttacttatagagtaaagatctatagagagatccaaacataatcctctgttccccatcctctgttgtcaaaggaatcaaattttgaattcctgctgtagtaccagagctgcaaaacatttaacttccgttatatattcttcacttcaattttaatgtacatcattaaagattaacgactcaagtatcaacaagtttcaaaccaaatttcctatattaatcttttttgtaaacaagtggacggacttatgaaactccatgtgcatgtgtgtcaatctcattttatgatatataagccaagattccaagtctcttctggaaattctctaatctataaatttgtctatatccctccagatcttgcatatacaaagctttgaaattattttggttatcctgcacagatccaaaaaaaaaggcggatcgttttgaaggcacctcatcacaagtaaactgatgggtcgatcacagatgagatcagacgcctctccattagcgatacgattgatgtaaggcttaatatcttcataggtcacaatgggtacgttcttcttgaaggtttgcttatcaacttgaccgttgaggaaacctttaagatactcggtatgagcattacgtgaaagtactgcttccaagatggaatcttgaatctgcgttacgttggtggtcacatcctcaagaagagacaggctagcttttgggtctgttagatcaaactttggcaacatgcttgcttttgattgtctgccaacaacaaaaaaaaaaaaccttctaagtcgtatcacgaaattgtttacaaaagagtgaagagcaagcaaacctttgttctggcgaggtggatggatgagctttggcctgtgtctttctatgcttgaaagctttgtaaggagagattagaaaaagcagtcagtcaaatggtgtggtgtgacgatatgttcgttgccgtatgatttgttcttatttccataaatagaattaactgacaaagcataagtaaagaaaatcccatttttagaaagataaatttattcattaaccctaattaattaggataatttttttttgaattaaaccgcaaacaaggtcggttcaacttgcgtctgtccggttaacaaaatattgaaccgatcgataaatcgtacgagagcagtcgcataaaaaagctccgaaagagagaaatcaatttgaccaatcaaataattgcggtggtgaaaatggctcgaaacgactcgcgatctaggtcgccgtctcaccgccgacggtactctcgctcgcctgtgactcatcgtagcagccgtcgtaccaggcgcgaccgcagccgctcaccctacacatcaaggtctgcaacaatcttccttgcttaatgtggagaaatcgaatctcgtatcttatggtgatgtgggggaattacgtttagatacttgggattagagaataggattagggcttagagaataggtttagggtttagcgattttgtcgagaacaaatttcaaatttgttacttcactttggatcgttgctgttttgcaaacgaatttctatggacattaatgttcgatgtccagctgctagtgaagaaggagctgctttagttcaacacattttcataagagtaggtttccaatttttgtaggcataagaagagcagatctcctgcaccaaggcaacaccaaagggatagaagtagttcattgtctccttccgagcatagaattgcgattgaagtgaagaaagaacaggaagacaaggcaaggtaattgattaaacattgtctttgtctttcagattgtattatactttattattttgtgtatgaagcaatatagttttccacattaggggaatgtattttgctagtgagcaagttgacatgcacgaaagggcaaaaatacatttcttgaattatcgcctctgtgattgttgatcaacctctttgtttccttatctaaattgaatactgtttggacatgaatagaagaataactgatcaatttgtgcgtttatatgatcttgaaaagtttttattggctagtgttatcagtcttatcttctttctaaatcttttttcccttactaaatgtagattgcagcatgaggcggagctcaagcgactagaagaagagactgcacagcggattgaggaagcagtaaggaaaaatgtagaggaaaggatg

SEQ ID NO: 16666 - DNA, 3000 bp, Unknown; identical to SEQ ID NO: 16665
  misc_feature (1)..( 3000): 2750-1469P.txt file - cDNA_ID_1663139; gDNA_ID_2926270; Annot_ID_205104

SEQ ID NO: 16667 - DNA, 3003 bp, Unknown
  misc_feature (1)..( 3003): 2750-1469P.txt file - cDNA_ID_1663143; gDNA_ID_2213665; Annot_ID_132672
ggtttacaattacaagctcgaagaggctttgaaacatggaagcacgaaggttactgacaaagacatgacaagctctccttcttcacctctgctaacttattttttgtttttaaagattgattagttttggtttttgtcaggtagaatcgtgcagaagcgtatttcccgctaattgttcctcatcagactcactttccagtctatacgaccaattaatttagccccaattgactaaattttttatacttaaaaataataaatattcactctgaccaacttgcgaccgaagaaatcaagaaaagcaaattaagatagtttaccaaacataattatttatatttttaagacatcggatgtcgtcaacaataaatttctgaaggagacaattgctcctaacatgatcgttcaatgattcagaacacaagacaacaaagaagtacataacatatattatatatatggaagctagagagtatatataatgttgcatgactgatataagaaaatatataatgtgtatgtaaagtggtttatgattcacaagttagttttctacttagtaacagcttcttcaagctctcttaagccaccaaccttctgttcaatttcttcgataagttcttcacgccatagctccgctcttgctttctcttctatgtcttcttgctgcatcatataacccaaaacacaataacaactctatccaatcttataatagttgtacacattgtgaatctgtgatgatataccaaaggtcaatggcccgagcaagcccagcccgacccaacttaggatcaatgttacctaccatcagatctgttaacgtttgaattattatatcaagcccaacccggctcaaacttactaagcatgattgatctatcaataggatggatcaatgttacctaccatctatcagattgtgactttcgtttagatgatcaaggttgtggattcatatttttgggtgcatatataccaacggtaaacgctaacctaaaagcacctatttttctttgtttagggaggtttatcgcatgctgagacacatggaggagtactcaaaaccggctctgaacaggtctacatggcctactaagaccaaggtgggatagtctgaggtcaaactagatctgaactggtccacagggtctagtaagaccacagcgggttggtcggtccattgcaacatccctagttataatttgtatgcatttctaagtttttttctttctttcctaatagtattagaaagggagagatacatacagtttcatagacccaatatccagttccatcccctccatctccacggtactcctctgagtcgtagaatggatcctgtattgatccaatatcacaaagtactattaagatcccaatgcagcaaatgtatcaaaagattcagtttgagttgttgttttcatacttttgctgaaccgaagtacaaacatccccaacaagtgaacatgatgtagaacatatctgccatatcaagatcaatatcaaaacataagaaaaagaagaaaaaaaagtctaagaaagaaaataaaatctctcaagaaaccccaagtgtttaacttacaaacattcttgatagctttatcacttagatgccacacgtgtttctctgtaatgatatcacgcattccttctatttgttgaaccatcacagccattaatggcaaatcatgtggcaatgcctttcttacacataagcttcctctcatcaaattcctttccctcttctcattaacattcttctaatttttcaaattctaagacgtaaattcacaagaatatggagattttttttctaattttagtcttagttagagaaaattacttacagatagccaatatccatgattcggtcctgaattctgcttcggctacaacacaatacacaattcttaaactttttttcgtaatgaaatatttttggtaagaatataaaataatatgtaccgagtgattgtaggaagaaggaatatgaagatttgtgaaggtgaaacttgtgaaagcttcagccattgttacttcttgatggtggcaatggagaagaaaaaaaaaaaatgttggtgtaatcttttttattttttcatttattttaatctttaagattagattttttgaggcagaaaatgtgtggataagggaattggtatcgtccactcttcacttttgtgataaacaaaataaaaaaataacgtacgttagcaatcacatcgcataacactttttttgtcttttaaaagcccaatttagacaatcacagtacacattttagccttctaaaacgctcaggttgggaacaactatttgccttaaagagtggtaaagatatttccagcaaaattcaactacaaactttcgtattttacccgtccaacaaactttccattcgcgcaggttagcaatcactaaacacgttcactcctctagacgtgcaagttagtaaccacactaaaattgctaataaatctttggttggtgaaattcaaactttccgcttatgtctcttcccaaatacatcatttgttgaatagcgtacgttggcaactattgccaaacttttaatgatatttccatctaattcaacttcctatgcgcgcatgttagcaatcatcccaaatacatcattcgttgaatagtgtatgttctatttgccaaactttcaatgatgtatatccatctaaaccagcttttattcgcgcatgttagcaatcacaataacacgtctactcttcttagcgactagtattttgtcaaaagtcggaagaaaatctccggccaagtcaacttctatcgctttaaaaagcgcatgttagctattaaaaagcgcacgttagcatcattttcgggaaattgctaatcaaactttccactttcgtcttcttcccgtgtatatctttaatctcctctgtttggtgactattatccaatttccaccgatcttctcctcataaaaacacctcttcctcaacgaattttttatccatg

SEQ ID NO: 16668 - DNA, 3003 bp, Unknown; identical to SEQ ID NO: 16667
  misc_feature (1)..( 3003): 2750-1469P.txt file - cDNA_ID_1663143; gDNA_ID_2213665; Annot_ID_182076

SEQ ID NO: 16669 - DNA, 3000 bp, Unknown; identical to SEQ ID NO: 1894
  misc_feature (1)..( 3000): 2750-1469P.txt file - cDNA_ID_1663168; gDNA_ID_1620463; Annot_ID_157806

SEQ ID NO: 16670 - DNA, 349 bp, Unknown; identical to SEQ ID NO: 404
  misc_feature (1)..( 349): 2750-1469P.txt file - cDNA_ID_1663178; gDNA_ID_1590770; Annot_ID_150034

SEQ ID NO: 16671 - DNA, 3003 bp, Unknown
  misc_feature (1)..( 3003): 2750-1469P.txt file - cDNA_ID_1663221; gDNA_ID_2214652; Annot_ID_188674
aaagtgttattcttgcaaatgaccttataataaaatggacactcttgtgaaaaaaaaataaaaaattgagatatgtcatgttccaaaaagtgatactgagaccatatctgaactcttattcaaactgttaacttcaactgtaacatgaaaccatgtcagttgtaaataaaaaattgacagaatcaaacgagtgatgttaacgtttttttaggaggtttcagaatacctcccatgtttagatatgtttcttgttgcttgttctgttctgaatccttttcacgttgtaggattatcatgtttttgcgtttggatgagtcgccaaggtgcaggttattgttggaatccctatcctcaacacgtcttgatgattctcctgtttcataaacccgtctgactcctggtgtgggcgcagcaacagaggattgaagtctgccaataccactttgagtagtaggatgagtgtaaggctggaaggctgcagttcttgaagatgagaagtagggagtagcagcagctaacctgattacatctaaaccggccaaatttggttcctttttacttttttagtatccggtcgctacttttggttgtgactattccggttcctcttgaaattagtttcctaaattaaaacgttcggaaaaattctaaaccggatagccaaaaatcgaagtatgccaagttttggccacccataatttcgaaaatacaatttgtcaattgcaaagcatcgttgcctgagtctcccattagccattagaccatttcgattttgcatacgcttttcacaagtaaattttagaaatgaacaaaattgcaactaaactgaaatggacatctccaaatgttagaatgagttccaacttccaacacactagtttttgtgcttatggatctgttatcttcttattaagcctaataaactaccactatctaaactactataccctaccggacactgtaacaaaacctctcttaatagctcagggcagataaacatccgatacctacactgtaacaaaatctgtagacgattaagagcgcaacataatacgttttatgtcacttcttagaatgatatagtaaggcagagatcctcaccttttcccttctgggacatacacaaaaataacttctggcaacgctaacagctcaactcagcttgtattttcttcttttactacacttttaagtttacactccttctgtggattttttcgtttcgcttgaatatgatgcacaaacgcagctactataacatggagctttgggggaggcttgcttgttgaagagacattatgaccagcatcctttaaagctttagccacatgcttttgggctttctggaagtgtatattacacagtgcaggaacagtcgacgcaagtgttggttttccacaaagtaatggtcctgctggggctctgaatgtacaatggaaacaatgcagagttaggtgagaattgcttaaattatcattatatgctaattacaaaccagcatacaaacttacctatatatgaaatctaggttgtaaaaactcaaatctgaaacttggtttatgttttaatactaccacaatgggactattctaacacaaatacattttcaaagggtgatatagttatgctaatactcatatcctgactattttacaaatacacatcaaaacagacaacttcaagcatctgcgtcagttatgtgtatcaaccagaacaacaaagcacatagagcaatattttaacacaaggcaactactgaatctataaatgattaccgacgatcactatctcgatgtccaaagctaagacttctcccaaaccctatgaaaaactttgaaaaaaagtcaagtgtcaatcccaaatcctttctgcaaacttgaaaaaaaaagagaaacaatctcttggctcactacataacacaaaacagctttgcagtttcaattcatcatcactacaacatcttcaccaactataatatgcaaagaacacaacttgaagcatcaattactttggtttatacgagaattttaaaaccaaataaagggaaagtgaaacaaaccgtttaatgacgtttgtgcaaccagtgtagagcttctgcttactatccttgagaatatgcaattgacagtatttcgtaagcgccatagctttagctttgcatccatacatacaactcccacaattactattcgcatactgatcactcttaacaccatcattgttagtaacattgtctccactaccttcaacagcatcaccaccatctccgatatctccctcttgaccaagcctccgtctcttattcgattgattattttcgtctttaaactgactaatcccatacttccaccaataatccctgtgttgtgccttgacatcctccattaaagcccaataattgtctctataacacttggccagctgcttcaggttgtgtgatcggcgtttgagaagctccgaccgggttatgtgactggagcgtgcgaggatttcatcttcttgtgacatcgtaatcggtgaattcgatgtcgacggtaagccgctggtgctagggttaggatttaaggtagagtttcgaattaggggctcggctgaggtggaagccactgcggttgttgatgcagcgccggaggaatacggaggccgtggtggtttcgaggagaaagggttttgctgaatgttcttggaagctgacgccattgccgtcgtcggaaaatgacagagcttcaaaatcagatgttcttgtcgggaatgaaattattaatttttaaaaaataatattagtacttaaattttaaaatatattaaagcccataaaatgtccattgggctgacatattcaacaaataggcccaaactcaattggatgtgagacctaagtttctgaattaggtcaatataaatactaaaatcatatctgataacgaacacgagcttaccgattctcttcgtctcaacatttagggtttcagagatcggctgattttcacatccacaagtatg

SEQ ID NO: 16672 - DNA, 3003 bp, Unknown; identical to SEQ ID NO: 16671
  misc_feature (1)..( 3003): 2750-1469P.txt file - cDNA_ID_1663221; gDNA_ID_2214652; Annot_ID_136447

SEQ ID NO: 16673 - DNA, 503 bp, Unknown; identical to SEQ ID NO: 281
  misc_feature (1)..( 503): 2750-1469P.txt file - cDNA_ID_1663334; gDNA_ID_1563335; Annot_ID_147489

SEQ ID NO: 16674 - DNA, 3003 bp, Unknown
  misc_feature (1)..( 3003): 2750-1469P.txt file - cDNA_ID_1663368; gDNA_ID_1620372; Annot_ID_155028
atgacaaagtcccaaacacttacaggttgcaaatccccaggacattttgatattttccaaggcttctaagaagggtcggagcgaaggtaagggcattggtgtactagtaatttatacaattttgtttggattagattgatgcacgtgcttttactctaacttgtaatagcttatctggcaaaaattacggttaagtagtgtatctgagatatagtaatgtagaacaatatgggcctatgataacctcctttgttgttttattgtcggtattataattctcgtcatatatatcatgactactaactttctgttgtgtggagcttgatattgatgtattgagtgttaattttctttctgttccacttttcttgttatagttcatgtttcttcgtgtgtaacctatagcatcaaaattttgcgaatcttatggattatctctagttagtatatattggaaatttgccattttgataatttttttgtctagtgaattgaatggcaatgatgcatgtcctgatggttgtccagtgatccagttatgatatatttcaatcttccatttcacagccaacatcgatgattctgagcggcttcgtccagaagaactgaaccagcagaatatagaagctttagtagctgaaagcaacctggtacatcctgcaaccttctttccttatgattgtgttattatcgtcaacccctgtagaactttgccacagaatgatatagacttgggtagttaccaaatgggcatgagtacactatgggatgatcattctattttcttccgcagaaaatggagatccttccagttaacgatctggatgttgctcttcacaattttgtgaacaaggatgataaactagccttctactcatgcgttcagtacaatcttcaagagactcgtgtatgtactattttttacttcaccattcaatacaaagttctgcataggatattatttttatttcgtagcacgtccttgttattgcttttatgatttatctcttccctctttttgtacagggtaaacttgcaaaggattcagatgccaagaaatttgaggaagatgacttgattcttaaagtgggagagtgcttagaggcaagaagatatagattcagttagttctgccgcagattatgagaaccagcagaatattgatctcacttgcattattgttcgtgcaggaacgcttgaaagataggtccactcgacccactggttcctcacagtttttatccactggattgacttcagaggtttaaattctcttttttagattttccttgcctctgtccttccgttggtttctcacagtgctattttctacctgagattggtacagaatttgacaaaaggaagcagtggcatcgcgaatgcttcgttcagtgatgatgaagacacaactcagatgtctggtttagctcctcccactagaggacgaagaggttcatccactgctaatacaactcgtggtagagctaaagccccaaccagaggacgaggccgtggtaaggcctcaagtgcgatgaagcaaaccactcttgatagttctcttggtttccgccagtctcaaaggtaactttttgacagcacatttaaccagtttagggtaggattcacggacgtgcaaggaaatgattggcatcactagctagctaatgttatgtccctaatttgtctttcatagatctgcttcggctgctgcttcagctgccttcaaaagtgcttccaccattggagaagatgatgtagattctccttcaagcgaagaagtcgagcctgaagattttaacaaacctgacagcagttcggtatggactattccttacactgttattcatttgttcactaccataagaaagcccatgtaaaaacttgacaacatataacttttggcattcttatttctctatttgaagtaaattttgcgtttttacttttcctgattcttgtttgatatccactaaaggaggacgatgagagcactaaaggcaaaggacgtaaaagaccagctactactaagagaggcagaggtagaggttctgggacttcaaaacgtggtagaaaaaacgaaagctcttcttcacttaataggctactcagtagcaaagacgatgacgaggacgaagatgatgaagacagagaaaagaagcttaacaaatctcagcctcgggtttgttaatcacatctattttcccttctttcgctgcttattagcaggttttagtaagttgttgttaaccatttgagatcaaagctcacttaatagtacaatttgaatatgcaggttacaaggaactatggagctctaagaagataaatacatatcaaaccccaatctctgacatcacaacgaagcttcatttttctgttattttctagcgacctctcaagcggaacaacttctgaagaagagaaattagtactaacaagagttctgtgagatgatgtacagagaattttgtagtgtttttttttcttgctctttttaaggttacgttgttgatgaatgaggcaatatgattaacgtcagtaagaagtctaaaactgtagtaaccaacaagttacttagccaataatttaatccctaattttacatttgaaattcaaataatttgggacaatctaattaatattggaaattcgaataatttaactaatattacattttacatctaaatcatagtttataggaaaaaaaataaaacattataaaataaagagtaaaaaacttaaatgggcaaccagaaaagaaatatggataaaaaagagatggaattagagatacttcaaatccaaagctgtttcctgattggctaatcccaacatctcactctctatctatatcccatctctgattctcccacctctcttctcatccacaaaatactaacataaaagtcaaagtccctgagaccaatactttcaccaaacagcaaaacaagaagaacaacaacactaagcaaaaaagaaaagctcaagccgagagagacaatg

SEQ ID NO: 16675 - DNA, 3003 bp, Unknown
  misc_feature (1)..( 3003): 2750-1469P.txt file - cDNA_ID_1663391; gDNA_ID_1621111; Annot_ID_56088
ggcacactattgattggacttggctatggtgctcactgggccatcgtcccagccactgcctctgagctctttggtctaaagaagtttggagctttatacaatttcctgacgctggccaacccagcgggatccttagtcttttcggggctgatcgcaagttccatttatgaccgcgaagcagagaggcaagcacaaggatccttgttcaatcctgacgatgtcctgagatgccgaggttccatctgttacttcttgacgtcactcataatgtctggattctgcctcattgcggccgccttgagtatgatccttgtgcaacgtacgaagccggtttacacaaatctctacggcaaaacccgcaactgattttaagataccatattacgaaaatatcccaccaagaaaagaagctgggttctttgagtttcatacctatatatatgattgtgttcatcatcttattctttggcttggtcttccacttccccatacatgtgtatttggttatgtaacgattttttgtgtccggtgttgtgtatggattttgaattcgcatttgtaataattgtattcacattattcatattctccagctacaaggtgtctttgtgtgtagatgtcaaacaaagacctaatctgtgtctgtctctgttttaagtgccagacgccataagatcttggcgcagggaagactcgtcgtcctcaaccaccatccacggcaatataggtccctatacaaaccaaccacacggtcaagttaaggtccttggatggatgaagcacagaatgtttagataatatattaccttcccttcccttatgaccttgggatatggtcctgtcatatccacgatggtggatggttcagccactcgtatacctccgtctaccacaaaatccagaccctgtaaaaggaaaccgaaacagagaatagagcaaccaaagatgttctttagtcgctgagaaagagtgagagctataaatacctctggtccatatatgtcacctattgcggttgggtcgatcaataggtccctaggaaccaatagtaagtaaaaagcaaagtggtaaacatacaaaagcgagattattctcaagtctcatttcaatgtcaaaactctctcttgtgtgctaagtaaacagaacctgtgtgaaagtaaaacacctctgaactcattttcactatctcacaaacctgcattatcgatccaattctcccatcttatatcttcttacatattaaggatcagagaaggtgatcaaacctgataattatgtagatgtagctgaagctaagatataaggctcaggaaccacaaaaacatatcactgaatatttcaaattagcttcagcattttatgagtcaaaatactaagaaacaatgcaaattctctcatgaaaaggctctcacattgcttttgcattctccgcaattatgatccaaaccttaaccaaaaacaactaccctataagagtataagaccatgtctgcagaaatcagtagtaacacaagaatttcatgagatattaaagaagaagaaaagtaggccacacaatagaattgaggaatcaagaaaacagatacatacacttgggaaggaccagcacagcagacgtctgttactactaactaactcagacttgtcattgaactatattatatacggctcacttgttttgctgcagtaactggcttatcttcttttctggcttgcgttaataacatgagtagagagaaaacacgacttccgtcgagtagattcctatcaaacaacaccggttctcgaatctttcgacaagccaagcaaaagtaggtgggcatgaaaatttgttccccatgaaacagaggacattcgttgttacctattctaataaccgattcaaaattccgaatcgcagacttaataaatgtggacaattaaccaaaccgtgcattgctaggtctaaaccgcattggtttatgacccaccaatcaaggagcgatgggtgagaaacctaataacactgctgctgtgactttatcatatccttagtccaattgggatcttcgtctgcgtgagacgcgttcacacctgcgacagatgaaatcacggaaataccactgcccaacgtgttcgcaataaaagtcctctgatgcctaatttcgtcaatttactgaagaaaattcaacatcaacgccctttttgataatttccccaaagttagtgggccctccacacgaagcatgtatcctccaattgcatattgccaattatttcctaataatattgaaggattattcttttcccatctatataccaccaaccctaagatccgaacgtccattttaaagccgtgcgtttaatcatgatcgtcaattatattggcaaatttgaccacacgatatccgtcatctaacggcatctacagatctaccagaacgttctcattcatgactctatatatttcgcatttcttctcctcaacgctctcataaaaagtagtactcgtgtcttactcgtgccagccactcgcatttctccagattttattatccttcctcgaaacaaggtatgacggaaactctctctctccctctctgatccgtcgttgctgcttccattttcatcttgactcgatcggatcattgttatgcttggcttgatctgtgcttaatgatgtgtttttcgtagtagatccacgattcgttgctgcgatcggcgttattatcgtcagctctctcgtttctgttctgtggttcgatattgctgagtttctaggctaatcttacgaatctgtgaaagtttttgagagatttggcttctgtagctcactcctgcttgatttaggttttttttttttccactcgtatgaagctgttttagaggctgttgttgtttatgattctcagcttgttatgtatagttggatttcgtgagttttggatttgatctgtgcgtttatttagtagtgaggctcatgtatatatatctgtgtatttgttccagagcttagctaagatg

SEQ ID NO: 16676 - DNA, 3003 bp, Unknown; identical to SEQ ID NO: 16675
  misc_feature (1)..( 3003): 2750-1469P.txt file - cDNA_ID_1663391; gDNA_ID_1621111; Annot_ID_171798

SEQ ID NO: 16677 - DNA, 45 bp, Unknown; identical to SEQ ID NO: 27
  misc_feature (1)..( 45): 2750-1469P.txt file - cDNA_ID_1663391; gDNA_ID_1067; Annot_ID_144765

SEQ ID NO: 16678 - DNA, 3000 bp, Unknown
  misc_feature (1)..( 3000): 2750-1469P.txt file - cDNA_ID_1663391; gDNA_ID_2926298; Annot_ID_205578
catttgcagagtgtatgtacttaaggcctctcaaaatttggtaaaggaagtactggagacaacaaaaaagtatatcaaacaatgctaaatgttaggaaacattatgtaaaagctctaattaggaatgtgtccactgatcatcacctgacaatggtcatcagttagagtttgagtggatctaatgatctggtgcaaatctgtatccatcaactcataaacaatatatacatcttcgaacctttctttctctggtagctcaattatatctttaattttgataacctgtgtagcaatatgaacgtaataagccaactatatgagtgttcatcaaagtgaagaagaagagattacattgtcatgatccatgtgggaaaggagcttgatctctcggagagttcttttagcatcaactctgttgtcaaacgcgtttgctatcttctttatagcaacctcttcatttgtctctgagtttgtagcacagctgtaatcataaaaaaggatttgagattaagattgtattcaagaatggtatgtttttttattgaaagtgataaagacttaccagacaataccataagcacctcggccgatgggttcaataggagggatgtattttgaagatagctcgaaaatgttaccgagtacattgtacataacatatctaccatcatatgtcaagatccctccatcttcccttttctccatctcttctttggaagaagaactcggatcaagacaggttttaagattaaaaaaggaagcaagttttaaaagactgtttctcaagtagctgttgttgccgttaaaaaggcaaagcagtgagtaagaggagagaaaatggtggcaccttttgcttttggtgggccaaatgaagacaaacttttttatttgatccgttgaacttcgaaatttgaatgagaattattattacaaggttaaaacttgacttctgcatcattaaagaaaaattcaaaagaaacaaaagagaagtatactatagaaaaagctatctcattgtggatcaataggtccctaggaaccaatagtaagtaaaaagcaaagtggtaaacatacaaaagcgagattattctcaagtctcatttcaatgtcaaaactctctcttgtgtgctaagtaaacagaacctgtgtgaaagtaaaacacctctgaactcattttcactatctcacaaacctgcattatcgatccaattctcccatcttatatcttcttacatattaaggatcagagaaggtgatcaaacctgataattatgtagatgtagctgaagctaagatataaggctcaggaaccacaaaaacatatcactgaatatttcaaattagcttcagcattttatgagtcaaaatactaagaaacaatgcaaattctctcatgaaaaggctctcacattgcttttgcattctccgcaattatgatccaaaccttaaccaaaaacaactaccctataagagtataagaccatgtctgcagaaatcagtagtaacacaagaatttcatgagatattaaagaagaagaaaagtaggccacacaatagaattgaggaatcaagaaaacagatacatacacttgggaaggaccagcacagcagacgtctgttactactaactaactcagacttgtcattgaactatattatatacggctcacttgttttgctgcagtaactggcttatcttcttttctggcttgcgttaataacatgagtagagagaaaacacgacttccgtcgagtagattcctatcaaacaacaccggttctcgaatctttcgacaagccaagcaaaagtaggtgggcatgaaaatttgttccccatgaaacagaggacattcgttgttacctattctaataaccgattcaaaattccgaatcgcagacttaataaatgtggacaattaaccaaaccgtgcattgctaggtctaaaccgcattggtttatgacccaccaatcaaggagcgatgggtgagaaacctaataacactgctgctgtgactttatcatatccttagtccaattgggatcttcgtctgcgtgagacgcgttcacacctgcgacagatgaaatcacggaaataccactgcccaacgtgttcgcaataaaagtcctctgatgcctaatttcgtcaatttactgaagaaaattcaacatcaacgccctttttgataatttccccaaagttagtgggccctccacacgaagcatgtatcctccaattgcatattgccaattatttcctaataatattgaaggattattcttttcccatctatataccaccaaccctaagatccgaacgtccattttaaagccgtgcgtttaatcatgatcgtcaattatattggcaaatttgaccacacgatatccgtcatctaacggcatctacagatctaccagaacgttctcattcatgactctatatatttcgcatttcttctcctcaacgctctcataaaaagtagtactcgtgtcttactcgtgccagccactcgcatttctccagattttattatccttcctcgaaacaaggtatgacggaaactctctctctccctctctgatccgtcgttgctgcttccattttcatcttgactcgatcggatcattgttatgcttggcttgatctgtgcttaatgatgtgtttttcgtagtagatccacgattcgttgctgcgatcggcgttattatcgtcagctctctcgtttctgttctgtggttcgatattgctgagtttctaggctaatcttacgaatctgtgaaagtttttgagagatttggcttctgtagctcactcctgcttgatttaggttttttttttttccactcgtatgaagctgttttagaggctgttgttgtttatgattctcagcttgttatgtatagttggatttcgtgagttttggatttgatctgtgcgtttatttagtagtgaggctcatgtatatatatctgtgtatttgttccagagcttagctaagatg

SEQ ID NO: 16679 - DNA, 3000 bp, Unknown; identical to SEQ ID NO: 7210
  misc_feature (1)..( 3000): 2750-1469P.txt file - cDNA_ID_1664727; gDNA_ID_1621133; Annot_ID_172550

SEQ ID NO: 16680 - DNA, 3000 bp, Unknown; identical to SEQ ID NO: 2744
  misc_feature (1)..( 3000): 2750-1469P.txt file - cDNA_ID_1664939; gDNA_ID_1620585; Annot_ID_161286

SEQ ID NO: 16681 - DNA, 3000 bp, Unknown; identical to SEQ ID NO: 13614
  misc_feature (1)..( 3000): 2750-1469P.txt file - cDNA_ID_1665243; gDNA_ID_2214639; Annot_ID_188236

SEQ ID NO: 16682 - DNA, 989 bp, Unknown; identical to SEQ ID NO: 15
  misc_feature (1)..( 989): 2750-1469P.txt file - cDNA_ID_1665243; gDNA_ID_703; Annot_ID_144503

SEQ ID NO: 16683 - DNA, 1008 bp, Unknown; identical to SEQ ID NO: 119
  misc_feature (1)..( 1008): 2750-1469P.txt file - cDNA_ID_1665314; gDNA_ID_2825; Annot_ID_145966

SEQ ID NO: 16684 - DNA, 2568 bp, Unknown; identical to SEQ ID NO: 174
  misc_feature (1)..( 2568): 2750-1469P.txt file - cDNA_ID_1683704; gDNA_ID_24396; Annot_ID_146434

SEQ ID NO: 16685 - DNA, 717 bp, Unknown
  misc_feature (1)..( 717): 2750-1469P.txt file - cDNA_ID_1683727; gDNA_ID_24410; Annot_ID_146440
aaaaaaaaaaaaaaaaaaaaaaacatttttcaaaatcctcttcttcgtttcttcgtgttagatctgatggtcctcatagatagacgatagacagtcttctttttgcaagtctaaaaaaaaaatttcgtcttggaagaataaacttgtcctgttacaagtaaaccaaaaattactcaatattactattactgacacacatagaatagaaaggtagagagagaaatagagagatggggaaattacgtaagtgattgtgctaattattagaaaaacaaaaatctcctaagaatatcaatcaaaacattagtacttttggtttcttatcatccattgtttcttgggttataaaccaaaatttagactttgtttctgcgtaatcatatgttttatatatttatcatctattaaggattacctgattatagtttctgtaatgtatatgtagatattgtatatgcctataagaacacaaaatcttaggacaatctaattagggattatttcttagtttaaatgaatatataggtagtaggatttttttttaataataataaatatagacagaaagggagagtacaagaaacaccatcatttctcaatgatgaaatggttttggtcttacacagagtcacagtgagagagagagagagagagggtttattaacttaaccatggttccacttctccatatgttgaatgggctagaatttaaccatg

SEQ ID NO: 16686 - DNA, 82 bp, Unknown; identical to SEQ ID NO: 177
  misc_feature (1)..( 82): 2750-1469P.txt file - cDNA_ID_1683740; gDNA_ID_24421; Annot_ID_146444

SEQ ID NO: 16687 - DNA, 129 bp, Unknown; identical to SEQ ID NO: 179
  misc_feature (1)..( 129): 2750-1469P.txt file - cDNA_ID_1683806; gDNA_ID_24689; Annot_ID_146454
  misc_feature (1)..(2): n is a, c, g, or t

SEQ ID NO: 16688 - DNA, 98 bp, Unknown
  misc_feature (1)..( 98): 2750-1469P.txt file - cDNA_ID_1683946; gDNA_ID_25377; Annot_ID_146503
actggtccattgttgactctggaagtgcaagactgttggcgtgggatacatgtcgagacagatttgcgattctagaatctgtgttacctcatagaatg

SEQ ID NO: 16689 - DNA, 122 bp, Unknown; identical to SEQ ID NO: 100
  misc_feature (1)..( 122): 2750-1469P.txt file - cDNA_ID_1684034; gDNA_ID_2570; Annot_ID_145791

SEQ ID NO: 16690 - DNA, 2342 bp, Unknown; identical to SEQ ID NO: 102
  misc_feature (1)..( 2342): 2750-1469P.txt file - cDNA_ID_1684091; gDNA_ID_2597; Annot_ID_145807
  misc_feature (581)..(581): n is a, c, g, or t
  misc_feature (596)..(596): n is a, c, g, or t
  misc_feature (700)..(700): n is a, c, g, or t
  misc_feature (1851)..(1851): n is a, c, g, or t

SEQ ID NO: 16691 - DNA, 1261 bp, Unknown; identical to SEQ ID NO: 187
  misc_feature (1)..( 1261): 2750-1469P.txt file - cDNA_ID_1684123; gDNA_ID_26042; Annot_ID_146532

SEQ ID NO: 16692 - DNA, 3 bp, Unknown
  misc_feature (1)..( 3): 2750-1469P.txt file - cDNA_ID_1684200; gDNA_ID_26300; Annot_ID_146545
acg

SEQ ID NO: 16693 - DNA, 1612 bp, Unknown; identical to SEQ ID NO: 105
  misc_feature (1)..( 1612): 2750-1469P.txt file - cDNA_ID_1684224; gDNA_ID_2637; Annot_ID_145834

SEQ ID NO: 16694 - DNA, 63 bp, Unknown; identical to SEQ ID NO: 107
  misc_feature (1)..( 63): 2750-1469P.txt file - cDNA_ID_1684386; gDNA_ID_2693; Annot_ID_145865

SEQ ID NO: 16695 - DNA, 841 bp, Unknown
  misc_feature (1)..( 841): 2750-1469P.txt file - cDNA_ID_1684431; gDNA_ID_26984; Annot_ID_146581
acatgttatctcatcttagacaatgtataatgtttttattctatttatatatttgatgtttggaaatcatgtgttgcgaatcttattctcattactatataaagaacaccttagagacatataactcaatcgttttcataacttaaaaatctcttacatatacatattttctactgctttcttttgggagataataaaagcctytctcagacaaaagatctgctattgttttgggtaacattttcatatcgaatttattcgtataataaactattaaacgatgttagtttagttttaaacgttaagtttaaaaaattaaatgcatgacgttatggaatgaaatgacgaagttacccttaaatgcaacgtattgtggtaatcagtcatgtgcctatcaaaaacggaaacataaggtcaaatatggtaaacgacaagcgtcaaagtatttactatattaacaaatatttgagagaagaatttttgattataaattaataatcaaaggcatcaaggaaagcatcaatggcggaagaagcttacttgtaatagccacgagtgaagaagaagaagaaagccactggaacaaataaggaagacgatacactcacagagagagagagatacgtgtttctctgtgtgtttctacgctttttggcttttcttcgcggcttccacgaagaagccgaacggcgtgattcgcattgttctccacattgtctcatcttcctccgattttgattccaccattttcagatatattactctcttccggatctgaattgtgttggaaccaattggttctgatttcagatttcgaatttttttaatttgaatccaaatg

SEQ ID NO: 16696 - DNA, 3003 bp, Unknown
  misc_feature (1)..( 3003): 2750-1469P.txt file - cDNA_ID_1684431; gDNA_ID_2926308; Annot_ID_205928
aaaatgagggtaaacatcatttattgatctatcctgcttaagaaaagtctttgatcaccttccgttcttaacatactatacatcaagcataaaacacgagaaagcatatatctaagttttctcatctcttcttacactctatcgacatgataaaatatatgttcttaagagacaagacatttgtttagattatcagaaggaataaaagaattgtgccatattttctccatttgttcatagattcctaagcatgttagactgcttttggtttcaggctgttcagaaagaaagagaagacaaacttgctcagattcttaaggaccgcctcaacctatatatgacgaacaaagatgaatttactagcaatgctgaagctgaagtaacaagactctcaaatgcaggtacggtgttttgtagcatattgttcccctttcatagtttatgctttctctttcaatcaatgccatatctgtggtaaaaaaactcaaacttatcttcttttttgtctatcttcaacagcatacggggtggaaatgttgaacacaatcggatatatatatgtcagacaagcggcaaaagagcttgggaagaaagctatttatctcggtgtgccattcgtagctgaatggtttaggacgaaaggtcacttcatcaaatcccaagtaacagctgcaacaggttagtgacttaggtacaaaggcgacctcaacaacatcatgttcatatcatatgctagaagaagtagtatgggttacataaggaacattttatttcaactactgaaaaagaaaacccaagaacactctcctagctttctagaacttggtctcctctctaggggggtaatatttagtgacttttctttatctgtcgtcctaggtgcatacgctttattccagctgcaagaggaaatgaaaaggcaactaagtgctgaaggcaattataccgagaaggaacttgaagagtacatgaagacccataagaaagtaatgattgattctctgtggaagctcaatgttgctgatatcgaaagcactatctcccgtgtttgtgagcaggtagtccagctacaactgttcactagttgactgaagtagcattttggtcaatttctgttgtgaccactctatgattattttttggcttaggtacttcaagatcccactgccaagagagaggagcttcgtgcaagggccaaggggttaaaaactctgggaaagatcttccaggtaaatcttttttcattcccttcttggagaatgtagcgcatatttattccaaatatagtttactaaaaaggaagcactgattgcaaaacgctttatttttgtggttatatagaagaacaagatagccagtgagagtgatcctttagtaagagccgaacttcacaaactaaacggaaatggtcaagaacatgatcattcatccacatcaccaaaatctgatgaagcatctcgctctaccgttggacctcaggtacatctccttcctctttagccattcatctactagtatgtttcacataaagaaaaaccaagaaacataaccttgtgtaatctaaatatcttcccttacattaccctcatctttggaaacctttttcacacatcgtgagacacagctgcatgtttgtatgtgatagacagatagagattcaggaatgatttagggtatgttgatggtgtgtaattgattgaaacttgtctatgttacgacttatgagagatcacgagatatgattgtcgggaatgatttagccagaagtagaaactgtttcactcgtagtaacttacagatactaaaaattcttggatgccattgtgaataactaatagccacttaaaggactcatgaaatgcaatgtacacggcattcttgtaggaaccgcaaagcccttatgtggaagcaccgaaacttggagaagagcaaatcaactattacttcccaaggcctgcgccgcctccaggagcacagagacactcttaaactggcaatggattgattcacagatgaacgaaaaggttattttttcctttttttgctatataatataagtctttatgcatatttgatatatttgcaggcgttggtattaccattatgtaatttttattattgttagaagaagaaattattggatctttgaaaaaagcacatgttatctcatcttagacaatgtataatgtttttattctatttatatatttgatgtttggaaatcatgtgttgcgaatcttattctcattactatataaagaacaccttagagaaagagacatataactcaatcgttttcataacttaaaaatctcttacatatacatattttctactgctttcttttgggagataataaaagcctttctcagacaaaagatctgctattgttttgggtaacattttcatatcgaatttattcgtataataaactattaaacgatgttagtttagttttaaacgttaagtttaaaaaattaaatgcatgacgttatggaatgaaatgacgaagttacccttaaatgcaacgtattgtggtaatcagtcatgtgcctatcaaaaacggaaacataaggtcaaatatggtaaacgacaagcgtcaaagtatttactatattaacaaatatttgagagaagaatttttgattataaattaataatcaaaggcatcaaggaaagcatcaatggcggaagaagcttacttgtaatagccacgagtgaagaagaagaagaaagccactggaacaaataaggaagacgatacactcacagagagagagagatacgtgtttctctgtgtgtttctacgctttttggcttttcttcgcggcttccacgaagaagccgaacggcgtgattcgcattgttctccacattgtctcatcttcctccgattttgattccaccattttcagatatattactctcttccggatctgaattgtgttggaaccaattggttctgatttcagatttcgaatttttttaatttgaatccaaatg

SEQ ID NO: 16697 - DNA, 121 bp, Unknown; identical to SEQ ID NO: 231
  misc_feature (1)..( 121): 2750-1469P.txt file - cDNA_ID_1684752; gDNA_ID_75764; Annot_ID_146974

SEQ ID NO: 16698 - DNA, 74 bp, Unknown; identical to SEQ ID NO: 138
  misc_feature (1)..( 74): 2750-1469P.txt file - cDNA_ID_1685057; gDNA_ID_3142; Annot_ID_146121

SEQ ID NO: 16699 - DNA, 3003 bp, Unknown
  misc_feature (1)..( 3003): 2750-1469P.txt file - cDNA_ID_1685621; gDNA_ID_2684256; Annot_ID_193122
tggttaaaggttgttaatataaaagacaggagatacaaaccactccatttttccaatctttgttgtttatgtataattttctcatcaaagattgttaattatgaataaggttccattttatacggatcggaacttgcattacaatttaaagatatttctttctgatcgattagataaattgtctgtttttgattatagtcgacgtttcttaaagaagaaacacaattagaatagaaaaggcatcatgaattaaaaaagatatacaatcagttacatgttatgaacgctatattatgaagttacaattgtcacaaaaacttggagcaatcttgagagcttgtaacccttctatggacacgccctcctgcaaaaaaaagaattgagaacgaaagtccagatgtgatacaagatcatgatatcgaggccttcatatatagtcaagcaagatgattacattgggtaagctttggagcccaaaacaaaatataggctacaacaaaacaacccttcatatctccgttcttagatgcaatcatcaggctcctaaagaagtaaggtgatagaaaccaaaatctaaaaaaaaaaaacgaatcaagaatatgcctcagaggtagtgacaattgtgatataattcatcactatgaaaatctgatgaaaacacatcaatagatatacatcaccggcacaaaacaaacatcattaacaatttaaaaggtgcatcagagagattcccatctagacttaatcatcattatacttctcccaaaggagaatctgatgtccctgtctttttatcatcacttgcacacacactaaacttgtaataaaaactagaaaaaataaacctattcacatccaaacttcaaactggatttcataaccaaagaaaaaaagaagattctaaatgcctcagatttgttttgttttcctagagacaaagctctcaaagtatatttaataccatcacaggcatcaaaacaaacatacaattaaacagaaataaccacgacacagacaaaagactgaatctttggaaagccctcgaatcgatgagacaatttacagagatacaagactagggtttcaagagaagtggctcccattggagctttaatgaaacgcgatggctttatataagataagcagaggcggcgaaaattagggcaaaaataaggaactgaaaagatatgactgggctcgtaggtaaatatgaatagcccattagataaatcaaaaaggcccaataaaataaaaaagaccattcgtttggataattaattaaacgaaactgcctagttgattaaaggcccaataaaagaacattctctgttttcttcctttacagtggtttctctcttgtctaagagactctgtcattcttgaatcttgagaagtttatttttaagctgttgtatcgtttgagcatacatttttcctcaaatctcaagtacatatgaagtcatgtacttatgttataaaacttatatctttttgttttgaacttagccgaaaacttgagagccttgaggtaactctcttcctttctcataatattattggttttgggaaacatattgagctgaaacatttacttattgtatagggccataggccctcaagaagacttttatgaaaatggatcgtgatgttaatataaatgagttcttcttaggtgcaaggtacttgatacatgagttctatctatgtaaccttaaattcagtaaactatttgtcccgtttggaaaacacttgaactgtggtccttaatttgttatcctgaaggaatcaaactattgaggtaaggatgatggatcatcatgattcttttggatactactaagctcttgacttttgatagctaaaagtatgtattgacatttcatgaacagggtctgactaaccaagtagcattttctcttgttcaggttatggagtgtcataggagactgaggtggaacttttcggttttaattatcattttttttctatacatttgcgtttcaaccgtcttaacttactatggatacctattgcgtcttcttctgttgtgtacttttcagtttttaggcatttggagcatttggaagaatcattgagaaaatcttttgaaagagttaagattcacaaggtatgtcatgacttgatcacacacacacactgacacatatatgaacatgttaagagttaccaatggaggcagcatttgtcttgcgggaacatttcagaaaaaatcaactcacgtcattagaatgtacaacaacacaggttatgtataagttataacagttgcccttcttttctctctcacattcttaaaccagaccaaacattctcatgcagtttcagagcgggctatcatcacctttggtaataaacggtgttcaagaaaaccatttaatctcatggcttcctattaacaataaccagcaaatgatcatacctgctgactcaagttttcatcctcatccgtgagtgaaaactgttaatgcacttaataattaatatgctttggacttatatgctatattcaattgaaagttttatgatcagcagaaagatgaaaccggtttttgagttctggttaaacattagttttgagtaactgtagcaatgtgcacgctagttttcttgtatatacagtgtacctgtctacgtatgtgtgaacctacatgatattcagcagatttgtatatatctttgtgtcagtgtgtgtattgtataatacaacactagtgaataaaaaagaagagttttaattgtgatgagcatcatctgatgtctccaactcaaaaggcttatttccacaatcaacggtagagatctaaagataatgagaaaatttgcacaatcttctttaatatcgatatcttcttccacgataatcttacagatccagaagaagatcacacatggtttttgtataaattagacaaagctttacttgcagaacagagcagaaacagaacatatattctctgtctttttttgtggcaaaagtaaatg

SEQ ID NO: 16700 - DNA, 742 bp, Unknown; identical to SEQ ID NO: 20
  misc_feature (1)..( 742): 2750-1469P.txt file - cDNA_ID_1685621; gDNA_ID_813; Annot_ID_144531

SEQ ID NO: 16701 - DNA, 3 bp, Unknown
  misc_feature (1)..( 3): 2750-1469P.txt file - cDNA_ID_1685648; gDNA_ID_928; Annot_ID_144661
ggt

SEQ ID NO: 16702 - DNA, 42 bp, Unknown; identical to SEQ ID NO: 262
  misc_feature (1)..( 42): 2750-1469P.txt file - cDNA_ID_1685745; gDNA_ID_93838; Annot_ID_147290

SEQ ID NO: 16703 - DNA, 1223 bp, Unknown
  misc_feature (1)..( 1223): 2750-1469P.txt file - cDNA_ID_1685753; gDNA_ID_93839; Annot_ID_147292
caactcccaactctagtatgcgttgatttagcatataatttttttttctccaaagaagcaaagacacagaaattcacaagttattaatgaatttatactatttacattataacctctataaattaatactcgataaattaataatttttataaattaataaaaattttcgatcatgagttgggaccagtgtaaaaaatgacacaaatcgataaattaataagataaataattattttaaaattcctatgtaaatatatggtctcattaataacataaattaatagttgtaaaaacttcttaaaatatatatatatatatataaaagttatactcactctattcctttttgtttgattgtttagaaaaaaaaattgtttctaaaagattgattttttaagttttccatgtaatatttattggttagtattgacgaattgtaattttcaagaaaaatagttaattattattggtttaaagttataaaaaactgtaaaacactaaaaataatacatttataatcaacatttaatatgttttcttaatatgtgtgttttttctaaacaatcaaacaaaaaagaacagagggagtatgttagaaatattagtaaaatatgaatctgctattatttttatttttattatactaattcttagtaatgttcaattttaataattttactacatcgaaaacacttttttgttattttatagacacaataatttagtcttatttgcaattacttctagaaaaataatgattataaataaaacaaaattaatttaaacataatattttttttaaaattacaaaattagtctaaactctctataaattaataattattaatttattgataaattaatacctctataaattaatagaaatttatggtcccaacattattaatttatagaggttttactatggaataagaagcaaatctaaaaaatttataaattaatatcaatatttatgctattacttcttcattttttaaagtcttgttatttacttaagtaagcctaaatttttaataatgatcttatcttatgtaattgattaaaaaatcgtatagtagactattcaacaaaacgtgaatcatagtgttgttaccaaaacccattagtgtagcgacaactgtcctttcacatccttatacaaattctcttccctccggtcatctcggaaacttgtatcatcgacaaaacataaatactaatg

SEQ ID NO: 16704 - DNA, 3 bp, Unknown
  misc_feature (1)..( 3): 2750-1469P.txt file - cDNA_ID_1685795; gDNA_ID_94265; Annot_ID_147314
tgg

SEQ ID NO: 16705 - DNA, 477 bp, Unknown; identical to SEQ ID NO: 272
  misc_feature (1)..( 477): 2750-1469P.txt file - cDNA_ID_1685961; gDNA_ID_99301; Annot_ID_147365

SEQ ID NO: 16706 - DNA, 1297 bp, Unknown; identical to SEQ ID NO: 274
  misc_feature (1)..( 1297): 2750-1469P.txt file - cDNA_ID_1685987; gDNA_ID_99850; Annot_ID_147376

SEQ ID NO: 16707 - DNA, 1602 bp, Unknown; identical to SEQ ID NO: 275
  misc_feature (1)..( 1602): 2750-1469P.txt file - cDNA_ID_1686020; gDNA_ID_99880; Annot_ID_147392

SEQ ID NO: 16708 - DNA, 640 bp, Unknown; identical to SEQ ID NO: 169
  misc_feature (1)..( 640): 2750-1469P.txt file - cDNA_ID_1686532; gDNA_ID_3616; Annot_ID_146397

SEQ ID NO: 16709 - DNA, 196 bp, Unknown; identical to SEQ ID NO: 10
  misc_feature (1)..( 196): 2750-1469P.txt file - cDNA_ID_1686587; gDNA_ID_546; Annot_ID_144103

SEQ ID NO: 16710 - DNA, 3000 bp, Unknown
  misc_feature (1)..( 3000): 2750-1469P.txt file - cDNA_ID_1686621; gDNA_ID_75762; Annot_ID_146966
cgcttccaatttcaaacccctagtttctcgagaagcatcctcatcgttcgtcactcgctccgccgccgagccacaagaaagaaaaaccttccatggactgtgctatgtcgtcggcgacaacatcgacactgaccaaatcattcccgcggagtttctcactctcgtcccttcgaatccagaggaatacgagaaactcggttcttacgctttagttggtcttccagcttcttacaaggaacgattcgttcagccaggtgagatgaagacgaagtactcaatcatcattggcggtgaaaactttggatgtggatcgtcacgtgaacatgctccggtttgtttaggagcagcgggagctaaagcagtggtggctcagtcttatgctagaatctttttcaggaactctgttgctactggtgaggtttatcctttggattctgaagttagggtttgtgatgagtgtacaactggtgatgttgcgactgttgagttgagggaaggagatagtattttgatcaatcatacgactgggaaagagtataagcttaagccgattggtgatgctggaccagtgattgatgctggtggtatatttgcttatgctaggaaagctggaatgattccatctgctgctgcttgattttgacttcaggtatgattctgtaacttgatgatgatgatgatgaggattggtaataggttaggattgagatcgaatttgtggaatagtctaggaagcttgacattgaattgaacgatgcaaaacatagttttcaatggttctagttagagaaagagaacacagtagttgggattctagttttgtgttgtttaaaatgtgttggtttagtttttgtgtgagattgataatgacttgttattctttctcttcgcttaagacttactttatctttccattggttcaattagatacaaaaactttgtacatctctagattgtagttgttgggagggtaaaagttatgatgttggctgatcttttccatgctcatatccattaagacttgagtgtccgatagtagaacaatacttcactcttattttgtctctaagactccttttttttttcctttttttgttctatttgttttgcaggtgtcaatggaagtgcatgagagtcacttcaaggatcttgatccaataataagaatatgtaatgtttccaaaagcttatgaacctaatctatgttttatgaatatatatgactatcggctttagtcttcagtatcagtttcttgtttacatttggatgtatcagctgctaaaaaaatgcatagtttcccatcccatttgaaacgacgttttctctcatgtcttccactaatataatcttctggtcatgagaacagaacaggagctctgtttttctcacacaatgatcgaacacacttttgtcataaagtatcgagaaatattaacacttcttttaaggcatccgtttctagagtctttgtttcactgtgacctacctaagtatatcaaaacgcacgtttggaattctgaatggcactttcgtaaataggagggtacaaacatttctccttttaaattgttttcatcgtgaactctctcactcactcaacaaagtaaagaaacaatggcgtcttctcttcctacatttccccaagccttaccttgctcgtcaaccaaaacttcttcctccttggctaccttccgatctcctttcttaagattcaatggtgccacttccttaatcccctcctctatctccatcacttcacgtggcacatcctccccgaccatcatcccacgtgctgccgcctcagaatccgactctaacgaagccctagccaacacaaccttccacggcctctgctatgtcttgaaagacaacatagacaccgaccagatcatcccagcaggagccgcttgcaccttcccatcgaaccagcaagagcgtgatgagatcgccgctcacgctctctctggtctaccagacttccacaaaacacggttcattgagccaggagagaacagatcaaagtactcaatcataatcggcggcgaaaactttggttgcggatcgtcacgtgaacatgctccggtctgtcttggagcagctggagctaaagccatagttgctgagtcttacgcaagaatctttttccgtaactcggttgctacaggagaggtgtttccgctcgagtcagaggttagagtctgtgaggagtgtaagacaggagatacggtgacgatcgagctgagtgatagtggtggtttattgactaatcacacgaccggtaaaaactataagctgaagtcgatcggtgatgctggaccggttattgatgctggtggtatttttgcttatgcgaggatgatgggaatgattccatcattagcttaatcctcttccataaccatgatggtgttcttgtatgcataactatttgatgaatatttgtgttttagagttttctattttcttaacttttttatgtttgtttgatttggtattgttgttgttacctaaagaataagaaatcaaaagcaaaatagaccgacatgttccaagatatgtgaatatggtgagtgtttactaaattatgcgaatattgttgttgcaaccttattttcttccaagttgggcatcaatttccctttttgggcttagtcttcttttgtttgtaaatttagtttgttttagtttattgttggcccatttctgtagggtttggcccgttaagtaagtaccatgtaaacccagaaaatttacaatgaaaaccctttagcaaaaaagtaataattccgttggtaacttttctcattgtagtacatggcatattttacttactctactaaccaatttggtttggttattgaaaatttggcggtttaaacaaaccgatataaaataaccgttaagcggtaaaagaaaggacatcgctaaacctaaatttgcgactcctactttataacgccgctcttcttctccattgtttgtatactctgaaaaacatg

SEQ ID NO: 16711 - DNA, 3 bp, Unknown
  misc_feature (1)..( 3): 2750-1469P.txt file - cDNA_ID_1686649; gDNA_ID_75765; Annot_ID_146979
act

SEQ ID NO: 16712 - DNA, 1355 bp, Unknown; identical to SEQ ID NO: 233
  misc_feature (1)..( 1355): 2750-1469P.txt file - cDNA_ID_1686700; gDNA_ID_75772; Annot_ID_146994

SEQ ID NO: 16713 - DNA, 10 bp, Unknown
  misc_feature (1)..( 10): 2750-1469P.txt file - cDNA_ID_1686762; gDNA_ID_76061; Annot_ID_147020
  misc_feature (1)..(1): n is a, c, g, or t
nccattaatg

SEQ ID NO: 16714 - DNA, 130 bp, Unknown; identical to SEQ ID NO: 238
  misc_feature (1)..( 130): 2750-1469P.txt file - cDNA_ID_1686778; gDNA_ID_76066; Annot_ID_147024

SEQ ID NO: 16715 - DNA, 665 bp, Unknown; identical to SEQ ID NO: 240
  misc_feature (1)..( 665): 2750-1469P.txt file - cDNA_ID_1686824; gDNA_ID_76078; Annot_ID_147046

SEQ ID NO: 16716 - DNA, 1534 bp, Unknown; identical to SEQ ID NO: 248
  misc_feature (1)..( 1534): 2750-1469P.txt file - cDNA_ID_1687027; gDNA_ID_77070; Annot_ID_147139

SEQ ID NO: 16717 - DNA, 347 bp, Unknown; identical to SEQ ID NO: 252
  misc_feature (1)..( 347): 2750-1469P.txt file - cDNA_ID_1687073; gDNA_ID_77251; Annot_ID_147160

SEQ ID NO: 16718 - DNA, 119 bp, Unknown
  misc_feature (1)..( 119): 2750-1469P.txt file - cDNA_ID_1687093; gDNA_ID_77269; Annot_ID_147173
tagagatccaaatscggatttgatagctgatatagcagacgacggagaatctttagtgttttacaataatatttctcaaggaggagtaaataatcaacacacgaaggagttcaataatg

SEQ ID NO: 16719 - DNA, 1012 bp, Unknown; identical to SEQ ID NO: 254
  misc_feature (1)..( 1012): 2750-1469P.txt file - cDNA_ID_1687158; gDNA_ID_77498; Annot_ID_147197

SEQ ID NO: 16720 - DNA, 8 bp, Unknown
  misc_feature (1)..( 8): 2750-1469P.txt file - cDNA_ID_1687179; gDNA_ID_77852; Annot_ID_147214
taaacatg

SEQ ID NO: 16721 - DNA, 225 bp, Unknown; identical to SEQ ID NO: 140
  misc_feature (1)..( 225): 2750-1469P.txt file - cDNA_ID_1687366; gDNA_ID_3196; Annot_ID_146151

SEQ ID NO: 16722 - DNA, 2452 bp, Unknown
  misc_feature (1)..( 2452): 2750-1469P.txt file - cDNA_ID_1687382; gDNA_ID_3207; Annot_ID_146154
  misc_feature (5)..(5): n is a, c, g, or t
cagtnaacacaaaacaaatctaatgagtccagcaacgtgaaaagccacgtactgagtaaaagcacaattttcatttctatataaacaagacagtcttgggccaacaaagtaaacaaaacacacaccaaagaaaagaaaaacaaagataatgaggtcgaaaattaagttatcactcatagctaataagacctcaaggagaaccacattcaggaagaggaagggagggataacgaacaaactccatgagctgacaactctctgcggcgtcaaagcatgtgcggtaatctccagtccgtacgagaatccagtggtgtggccgtcaaccgaaggtgttcaagaggcggtttccatgtttatggagaggccggcgacagaacgatccaagctgatgatgagtcaagagacctacttgaaggacaaaattaccaaagaacaaaacaaactggagagtctacgtcgtgaaaaccgagaagctcagcttaggcgatttatgtttgattgtgttgaaggcaagatgagtgagcatcagtatggtgcaagggaccttcaagatttaagtctttatattgatcactatatcaatcagcttaattcaagtgtaatgctccttacaaacaatggtgcgtcttcttcttcctttcctcctccgcttcatacttcagttgcgggtgcgggtgcggctcatcttgctgttgtgggtgcgggtgcggctcctcttgctgtggcgggtgcgggtcctcttgctgttgcgggggctggtgcgtctcatcttgctgttgcgggggctggtgcgggtactcttgctgttgcgggggctggtgcgtctcctcttgctgttgcgggtgcgggtgcggctcctcttgctgttgcgggggctggtgcgtctcctcatgctgttgtgggtgcgggtgcggctcctcttgctgttgtgggtgccggtcttcatatggatcagaatcagtatgagccgattcagccctatatccctactgcttttagtgataatatccaataccaagctcctgtggattttaatcatcagatccaacatggaatctatgataatctcagtttggatccaaatcatcagtattcgtttcaagatgatccattcatggagatgttgatggaatatccttatgaacaagcgggttatgttggagagcatgcacacatccctttcatgaacggaaactactacaactaccaccaaccaccaaccgttggtcatactactaccggtcacatgccttccaacaacgccaccaccaccaacaccaccgatgtgtgatgtgtttcagtagtttgcatttgtgttttgttcatttcaaaagaccaatctctaattatatcttttcttttcagttaattgttgtatgaattgaaggttttacctttaagtcagttctatttttatgtattgggtaatgtatttctgtgccgttgagccgaatacttcaattaagtcatttctgtttggtcacaaatatgtttttactagctttttgttcttaaaatattaagagcgcctaaacacttcattgtattcaattcctaggagcctcactgttcttatgttttttgtttcaacattgtagtagaaaatgtagaagggtcgaaaatcgaatgacaacctctttggagccataatgatctcaccagccttgttggtgcctggaaatgatatttcagcacactcaacatcatcccaaatagaggagggaaacacccaagtttgctttgaccattcatgtttctcgacgtcttcatctagtatccataaatcgaactatggaaccgatcatattaatggtcgctctcaatggaagcaagcttccctttgtattctatgaatactgattcccttccccattgcacaaaacccttaggtgcattgataaaactcaatctctcagatctagctaacagaaaacaatccaaaactgtctctttagttttggttaagaaagcagcatagtagagaaaaccgttgatgcatacactcgcttgatgactcgccctataaggtaaaggggtatctttaatgtgtatccatacttcaccatctccctatgttcataacttgttctccagatgaccactagatatcatacctttttctcttccaggataatgctttgtattgatcatcaataggatcgtatcccacgaaagcagtggtagcaggtaacttaacgaatttctccgtgctagggttacacattaaccacttagagtctgcttgaacagcgagaatgccatgtaaagaagccaaagagtgtgatatttaagccagtaaagctgcatttgggaattgccatctcgaagttgggaagcaaagaagaagacccctatccctcgtcgtgtgaaaacgagaagaagaaggtaagtttctcagaagcgactaattaactgcgattgctccgaggacatagagaagaagaaatcaatg

SEQ ID NO: 16723 - DNA, 3 bp, Unknown
  misc_feature (1)..( 3): 2750-1469P.txt file - cDNA_ID_1687407; gDNA_ID_3219; Annot_ID_146162
gtt

SEQ ID NO: 16724 - DNA, 1407 bp, Unknown; identical to SEQ ID NO: 142
  misc_feature (1)..( 1407): 2750-1469P.txt file - cDNA_ID_1687439; gDNA_ID_3242; Annot_ID_146175

SEQ ID NO: 16725 - DNA, 3 bp, Unknown
  misc_feature (1)..( 3): 2750-1469P.txt file - cDNA_ID_1687504; gDNA_ID_3274; Annot_ID_146204
tat

SEQ ID NO: 16726 - DNA, 1687 bp, Unknown; identical to SEQ ID NO: 149
  misc_feature (1)..( 1687): 2750-1469P.txt file - cDNA_ID_1687639; gDNA_ID_3320; Annot_ID_146239
  misc_feature (466)..(466): n is a, c, g, or t

SEQ ID NO: 16727 - DNA, 36 bp, Unknown; identical to SEQ ID NO: 153
  misc_feature (1)..( 36): 2750-1469P.txt file - cDNA_ID_1687697; gDNA_ID_3347; Annot_ID_146256

SEQ ID NO: 16728 - DNA, 552 bp, Unknown; identical to SEQ ID NO: 154
  misc_feature (1)..( 552): 2750-1469P.txt file - cDNA_ID_1687739; gDNA_ID_3397; Annot_ID_146273

SEQ ID NO: 16729 - DNA, 3 bp, Unknown
  misc_feature (1)..( 3): 2750-1469P.txt file - cDNA_ID_1687846; gDNA_ID_3451; Annot_ID_146312
atc

SEQ ID NO: 16730 - DNA, 85 bp, Unknown; identical to SEQ ID NO: 162
  misc_feature (1)..( 85): 2750-1469P.txt file - cDNA_ID_1687850; gDNA_ID_3452; Annot_ID_146313

SEQ ID NO: 16731 - DNA, 244 bp, Unknown; identical to SEQ ID NO: 202
  misc_feature (1)..( 244): 2750-1469P.txt file - cDNA_ID_1688325; gDNA_ID_28291; Annot_ID_146664

SEQ ID NO: 16732 - DNA, 3 bp, Unknown
  misc_feature (1)..( 3): 2750-1469P.txt file - cDNA_ID_1688361; gDNA_ID_28303; Annot_ID_146672
ctc

SEQ ID NO: 16733 - DNA, 3 bp, Unknown
  misc_feature (1)..( 3): 2750-1469P.txt file - cDNA_ID_1688369; gDNA_ID_28304; Annot_ID_146674
cat

SEQ ID NO: 16734 - DNA, 2557 bp, Unknown; identical to SEQ ID NO: 124
  misc_feature (1)..( 2557): 2750-1469P.txt file - cDNA_ID_1688573; gDNA_ID_2871; Annot_ID_146016
  misc_feature (1874)..(1874): n is a, c, g, or t

SEQ ID NO: 16735 - DNA, 2195 bp, Unknown; identical to SEQ ID NO: 68
  misc_feature (1)..( 2195): 2750-1469P.txt file - cDNA_ID_1688608; gDNA_ID_2099; Annot_ID_145538

SEQ ID NO: 16736 - DNA, 340 bp, Unknown; identical to SEQ ID NO: 73
  misc_feature (1)..( 340): 2750-1469P.txt file - cDNA_ID_1688809; gDNA_ID_2234; Annot_ID_145590

SEQ ID NO: 16737 - DNA, 1781 bp, Unknown; identical to SEQ ID NO: 76
  misc_feature (1)..( 1781): 2750-1469P.txt file - cDNA_ID_1688863; gDNA_ID_2273; Annot_ID_145608

SEQ ID NO: 16738 - DNA, 298 bp, Unknown; identical to SEQ ID NO: 77
  misc_feature (1)..( 298): 2750-1469P.txt file - cDNA_ID_1688872; gDNA_ID_2279; Annot_ID_145611
  misc_feature (191)..(191): n is a, c, g, or t

SEQ ID NO: 16739 - DNA, 3003 bp, Unknown
  misc_feature (1)..( 3003): 2750-1469P.txt file - cDNA_ID_1688917; gDNA_ID_2214466; Annot_ID_182838
cgtggatgtaatgatgtactattggttaaagtaggctcagctttaaggttgcaactagaactaaccacagctctataaaacctaatcaataattcattactttgttttttctataaatggggggattcatgaatggtccagaatgagaattttcaaagggtttttgatcaacaattatgtatagcaggagagtgtattttatacaaaataaatgagagtggttccatggtatagaacaagatggtgtatcccgtcgagcaaatcagctctacatgtcggccacggaggatccaaatccaatatcaaatgagaacttgatgcaagttaactccttcttgcgtccatcaagcatcttcatttttagtgagtatgaaccctatgagaaagaaaaggattagactggtccttccttagatgcagaaacacaaaacgaaagtttggtatgacaaacatataactatagaaaccataaccagcaaatcttgacaacaagaaggttaaacttcttcactttagccgcttaatagacataatacttccacatggaactcataatatgctatcgaaaccaagttaaacctcttctcagtctatttcagttatccaactaaacagattcgattacactaggcaatttgttatgactgcaatagaattacatcaacttcaaatgagcataatgcatcatcatgtcattatatccaaaatgcttcgtattaatcaacaaaacccgcatagataagtagaaaaaacttacaggaggggtatatccgggaagaacttgcgagtgcgctaccaagaaatctccaatggccacaggacaacttgtctcatcacaaagatcatgtgtctcagaatgaatatgccatccaaagtaggaaacttcgatcaccaacttgccgctcgagatctcagtgtcttcatataaaacaaacccaaataaaaaaacccatcataccagtaaacccattacatacatcaaatgcaaaactataaacacaagtaatagcctcataggtaaatttgagtatacctgtgttagcagaaattctgaaagtagctggctcgcctctagctataggataaggagttatatcaactccttgtacttttacttcatactcttcgttattatctgcaaccaaacaatcaaaagttccccacaaatcgaattcattataacgcaacaagaggtcaaaatcaacattggatctttctatctaaatcttatcgcaaaattatagctaactcaatcaaaatactacaaggaaacaattggaaatcatgaatcaagttaggctttttgggaatcgaaagacgaaacataccgcagtagtgaacatcggtggctgcaacaatcgttgaaaccaagagaaaataagagatagcgagagatgagaatcccgtgaacttagacatgattgatgataattagattttctatcgaagaagcaaaagctgcgaattctcagatgatgatgattgaggacgaggaggagaggagagactaaacaagcaagagacaaagacagaaatgcggaatcgggattctcaaatcgcaagaaatgtcggattgatcttatccgttcattaacgtgggtccatgattacttaaaataaacggttcagatttcgtaattaatctgttacggtgtggttaatgacataggattagcagtgaacaaactgttaggtgggatttgtttaacgatttcaattcaagttacccacttggcaccaaaataataattgtatttgccagctcagatttgacgctatttttataatacagcacataattgaacattgtttttggaaaataaaaaacaaatccctaattcaacgaatctacttctcttatccaacacgaaatcaagagttttaaaaatatgaaaaatctaaagaaattattcaggtttcaataatatctaaattagtgcctctaagtatatttttatataattaaaaaagcatattttgttttgggccgcatgaagtcaggcccaaatatttaaaggcttatttgattaatgatatttgaagacatgtccttgaatcggagttttcgaaaattttgaagggagcttttctgacagatggctagattctttcttctctgttgcctcttcgcggcggtgctgacgtcatcattgacggaggccggcgacaataatcaagtctactcgccttgttcagattctactgttgcgatcggcgatggattcactttcggcattgccttcgctgcgaaagattctttcttcagtacaaatcgatccaaatccgttcagtactctccctgcgatcatcgccatctctcgctcaacggaaactctgaggtcgccgtgttcagacctaaagtcgatgagatcacactccttaccatcaatacctctagttcctccagtttccgcccggttcgttctcatctctggtttatcttggtgaattagggtttcgattgcaggtttttgatcagattagaatggattaggtcactcttaaggaaatttagtatagatcggaatcatatgcccagattagttgacttgtctaaatcctggcttagaatgttagctctggaattctaagctaattgtcgagattacttggattggtagattcaattttcccgtaggtaacgaaggtttaggttttaagctctgttcttggacgatctggttcctttctgcatttgtttcagtgagatgaaaggttcaaaacagagacttgccatgttagattcctatagattaagagtttggtttctgacgaagtaggtggaaatcaggttaacttgtaatgtgtatatcattagactttcagtgtagatacctctggaaaaagtgattttagtagtagcttcgtcacagtttctcccgaacattactatacgatttttgtttatcctcggaagtagaggtcatgaatgtgttagcctatcaaattatttgtttgtctgatgatactttgtgattccaggatgcttccaagggatatatg

SEQ ID NO: 16740 - DNA, 305 bp, Unknown; identical to SEQ ID NO: 78
  misc_feature (1)..( 305): 2750-1469P.txt file - cDNA_ID_1688917; gDNA_ID_2301; Annot_ID_145626

SEQ ID NO: 16741 - DNA, 3 bp, Unknown
  misc_feature (1)..( 3): 2750-1469P.txt file - cDNA_ID_1689076; gDNA_ID_23524; Annot_ID_146415
gaa

SEQ ID NO: 16742 - DNA, 1569 bp, Unknown; identical to SEQ ID NO: 86
  misc_feature (1)..( 1569): 2750-1469P.txt file - cDNA_ID_1689086; gDNA_ID_2364; Annot_ID_145671

SEQ ID NO: 16743 - DNA, 233 bp, Unknown; identical to SEQ ID NO: 89
  misc_feature (1)..( 233): 2750-1469P.txt file - cDNA_ID_1689176; gDNA_ID_2399; Annot_ID_145697

SEQ ID NO: 16744 - DNA, 1565 bp, Unknown; identical to SEQ ID NO: 95
  misc_feature (1)..( 1565): 2750-1469P.txt file - cDNA_ID_1689243; gDNA_ID_2423; Annot_ID_145717

SEQ ID NO: 16745 - DNA, 3000 bp, Unknown
  misc_feature (1)..( 3000): 2750-1469P.txt file - cDNA_ID_1689328; gDNA_ID_1592327; Annot_ID_152271
tctcctatatgtgccatgtttaatggtttttttcttttgcctctctactcttctaatgaatgtcttgatgaacggtacagatcatacggtgcccatagatgatcaacgatacaaggcttccttgaatctagtcttaaccatggcttcccttttccactccagtgaagaagacttatcggtcccggatgcaacgttctacatcttccttcgaaattatcacctcctagaccatgctggttccacctatgattaaccgcttttatatcaccggcgaatatcagcagaaacggaggtaatgatcccaaatggtatatcctcttctgcttctgaattgtcatccactcttctaccttctgtgtatacattcctttcctccatttgtttacatccacaaccatcacccctgtgttgaaataacacggacgttttccttcaagaactttgaccaataccgggtctgaccagaaagttcttgtgaaataatgggtgaagtttgcgtggcagtactcgggagcagccaccactttaccttccatctccacatgccacagcttctctatgtcgtctaccacaacgaggtctgagtctaagtagatgatcctgtcaacgctgctagggatgatatccgcgaggtagattcttgcgtagttaagaggctgatcaagggcttgcctgatggatttcgatatcttgctgcggacgaggtttggatcaaactgataaatcttgaagtttaggtaaggaaaggttgatttgatgctggtgaaaaggtcgttttcgaaatgaggaagggacaggaaatgaaaagagaggttttcagggcaagtggaatgttgaaggagagacaaaacggcagccattgtgccacggaggtagtttgtgtcgagtgtcatggcgatatgaatctgatcagcctcacgagtcccgcattgatcaccgtttcgaaaagccggggcttctctgaaaacaggaagagttggagcagaaggcttatgaagaatgactccaacacgaaccgccatagtggtggttgtgaccaagaggaggataaaggacaggaggcctaggagttgtgtataggaaaggctccttgaggccatcctgaacctaattttcaagtaaactcttttattattattttcmcttttttttttaattttttttttaaaaaggtttaaacattacaaattaaaaagattgattagttaatagagccattgttagggaaaggctagaataaaggatttggggagaggcttgttttatgagcagtctaaatgtggggaagagattgaacttcggactgtttctcacacaaatctttgtctccaaaaaaaatccatttcctatgaaataggaacaagacaagtctgttgtccaatgaaatcggagtgaatttttagattttgtttcttcttctttagattcttagaaactggtttatgtttttttttggaaacaaaaattattgtttatttttaggacaaaattggtctgatcaatttgctttgctgtcatttctttttacmcttgawtgsgtcggcgggtttttttttttcctttttggaagtaccaaaattagaatactgtaacaaactcccctaaaatgtattaatgcatgcttttcatgcaagaaaataatgatttttatgtgatcaaatccctgataacatcatacgatctcatcatatatatagtggtactggtaaaatctgtaattccaaaagttaagtaaaatagtaagaaactaacttaagaaagtgtgtgttactccacgtttcaagaaaagaaaaatgtcttatatactccaatcttcatgcatggctactaagacagtcgcgtgtcaatcggtcattctcatgcctaatactaatccatatatataaataatatatgaaccagagagaagatctcttgaaactctttcgattacaaatatttgagttcaaacttattctttcaccaatactagccatttgcagataagacaaatagaaatcgagtcgaatctttcttgcttgagtggtagaagatttctttctctagttccatgtaattggtctaaatcagtgaactcataatttcatgtacacaaaaaaaaagactgtttcataaacagtggatatatggattggactcaccatgtcatacatggtctcgaggtaaattacacttactaagtaatcctttatattttacattttttaccatgttgtatggtaatgtgatagctacctaattcacagggccttaggcccattaggttttcaatattttcatggattatcgggtcgagaaaatgttatgatacccgacccgaaacggggagaaaataaacgagaaaagtaaggaattatctcgaggaaaagaaagcatcgataatctcaaaaagtttttggtttgatttgggaactcgtgcgcggctgtggcagaggccaaacccacccgtgtactccatccgtcggatccaccaaaccaatattctttcatctctctctctctctctctcttcttcttcgtcttcttctctttttattctttcttcaggaacaaattcctctgctttggcattttagggtttctcaaatttttgacgctttctcttaaaagggttgacgaaataaccctttaagggaaaaaacaaaggttgaggaagaccaccaaggtgaaaaaagaaagaagaattcgaacaacagcagcaacaagataaagttacgaatttttcctcttttgtaacctttgtttctcttcttcctcttcctccatttttttccattaaagattctgcctttgggttccaatttcgtctttcctttttcgattttgccgcgtttaacatgacattcgcaaaaccctacacttttctggacgccattgttgaatcccacgaatttcgtttccctagagattgcttgttctagccccagcttgaagctaaagatttttcaaggaaagcacgtttttttgtttgtgcaatcgaatctgtttttctgcgttatg

SEQ ID NO: 16746 - DNA, 1142 bp, Unknown; identical to SEQ ID NO: 615
  misc_feature (1)..( 1142): 2750-1469P.txt file - cDNA_ID_1689439; gDNA_ID_1592352; Annot_ID_152322
  misc_feature (1)..(2): n is a, c, g, or t
  misc_feature (27)..(27): n is a, c, g, or t
  misc_feature (51)..(51): n is a, c, g, or t
  misc_feature (177)..(177): n is a, c, g, or t

SEQ ID NO: 16747 - DNA, 3000 bp, Unknown; identical to SEQ ID NO: 616
  misc_feature (1)..( 3000): 2750-1469P.txt file - cDNA_ID_1689470; gDNA_ID_1592358; Annot_ID_152339

SEQ ID NO: 16748 - DNA, 651 bp, Unknown; identical to SEQ ID NO: 578
  misc_feature (1)..( 651): 2750-1469P.txt file - cDNA_ID_1689767; gDNA_ID_1592093; Annot_ID_151958
  misc_feature (17)..(17): n is a, c, g, or t
  misc_feature (27)..(27): n is a, c, g, or t
  misc_feature (33)..(33): n is a, c, g, or t

SEQ ID NO: 16749 - DNA, 98 bp, Unknown; identical to SEQ ID NO: 579
  misc_feature (1)..( 98): 2750-1469P.txt file - cDNA_ID_1689783; gDNA_ID_1592099; Annot_ID_151966

SEQ ID NO: 16750 - DNA, 44 bp, Unknown; identical to SEQ ID NO: 581
  misc_feature (1)..( 44): 2750-1469P.txt file - cDNA_ID_1689794; gDNA_ID_1592101; Annot_ID_151970

SEQ ID NO: 16751 - DNA, 2157 bp, Unknown; identical to SEQ ID NO: 583
  misc_feature (1)..( 2157): 2750-1469P.txt file - cDNA_ID_1689853; gDNA_ID_1592122; Annot_ID_151995
  misc_feature (1428)..(1428): n is a, c, g, or t
  misc_feature (1570)..(1571): n is a, c, g, or t

SEQ ID NO: 16752 - DNA, 1169 bp, Unknown; identical to SEQ ID NO: 586
  misc_feature (1)..( 1169): 2750-1469P.txt file - cDNA_ID_1689901; gDNA_ID_1592139; Annot_ID_152019

SEQ ID NO: 16753 - DNA, 59 bp, Unknown; identical to SEQ ID NO: 591
  misc_feature (1)..( 59): 2750-1469P.txt file - cDNA_ID_1690007; gDNA_ID_1592169; Annot_ID_152051

SEQ ID NO: 16754 - DNA, 3000 bp, Unknown
  misc_feature (1)..( 3000): 2750-1469P.txt file - cDNA_ID_1690084; gDNA_ID_1592188; Annot_ID_152078
taaaatccagtggcagccattgtaaataagtcacaactacagaatttatttcacaaaataactgcaaaaatgtatatatagatacctttaaattaagtgaacgagttacagaattttagtactcgatcaaaaacaatactaatacatattgaacattgcattaaattttgttttatccctaccaaaataaataaattagtttcattgttacttgaaaaatgcccaacctaacgttaaaacacgtagtagtgattattgtttacaacatttgtccaattattaaagtcaaacaatccataaactgtttacgctaaaacttgtgattttgacggttgcgggattctagatgatcattggtcaccttgtacccaaagaaatcttattatattattttgggaagtacatttggaatgtaaccttaatttttgtaattaattacatgacaatgatattagaaaaatttaattaaaaacaaaatcttttaatgacgttattaaggttaccaaaattcatttaacgacaatattcatttcttaattatagggcttattggatctaaagacgggtcatcaaagattttctaaactgaatcaaaatataccgagtattcaaatatctatctcttaccaaatataaacaaataagttcgtaaaacaatttaatattttatatacgaaatcaattgaatcttaattacataaaaataaaaattagcacaaaaaaaaagtattcaacaattaaatttttatcaaatctctctgttatataagttttgataatatattcgaataaagtgtaatataacttttcaatttgtactctttaactaatttaagctaactaatatatttgttaatcttatacctatcaaaaccgactatcgtttcttatctctatagtatttttgcaagacttttttggtggattttggtaaaagtgcattcgggtcatatggtacattctcctattaaataaatatggtgcactcctatattattaggtaaaatgtttagattataattagagtcatatcataaataaaattaatattattaaataaatggctttttggcaagacagatttggagagatggggttttgaatcaacaataataaaaaggtaaaatataattaattcaccgtttcaatacgggttaaatctttaatttattatttcttaataccactaatattaaacatatcaaatcatcctaatttagaaaaggttatataaaaccaaaaatattatgtggtatgtataatgttattatatataaaattaaactataaaatataaatgtattagagaatgatgcaatttataaaaataataaataattcttaaattttaaaaattactactttaaaaaaaaatcacgggacgggtaaagaaattacagaacgggttttattttggaattgggttatatggtggatgtatttgaatcaatatttataaaattttaaaatattattaatatactgttttaagaaaggttaaaacttcagttttttaacaattgtctcgtggattcgtggtatagcgttacttaataacaattataaactgtaaaatataaatattttataaaaataaaatttgtaagttttaatatatattacctttaaaaaataaatcgtcccgcggtatatcgcgggttaaaatctagtgattatatattatgaataaaataatttagataaagttagagatcaaatcctattacatccagaaaaataccagtctatatatttgtgatttttattgttgtaacaattgtggtgattagtttacgattttaaacatatcaacaacaaaaataattcagaaaagaaaacgcactcaattaatatagtttttttatagaatgaaacttgaacctttttacacgtataaaatgctttttagtgtaacggttaagacttcatcttcagataaatattttaggaccttaatatataatggtaactttaaaattgttctagacgacggtattattaatattatcaaatacttagtacaacgaatcaaattgactggaactataggaatgttcgaaatggaacatgatccaacaaatatcatacgtggtggattaacttgcttcacatataatttgtgctgaagtccaaataataatatacatggattctggaagtattatagttgggtataaagtcttgttgcatttgcatttatttcttgtacgcaatgcggctaagcaactttcattatcttaccataaaaagaacaaaaacaatcgtatcatattctcactctgcacgaaaagtcaagtcacgtaaattgttaaaagattggggatttgaatattgtatcagaaaaatgttatttaatctacaattttaaactatattaaaacacataattaactaagaaatcctttgtaatctcttaaagtcactaaaaatctaatgcttaaaatatttccaatcmcaatgaattttaaagttttttttaccaaatcaattgttctatattactatattttataactttttaaaactctatggttgaataacataatattttgttttaacacaaatcattttaaatggtagattgaatacacttccttagttttgaaaaaatacactaaaagtatgaaatgatgttttttttttaattacaaaacgataactcgaaaacgatggtttaatgaaattatttgatgaaataaagttatcataaacatccttaatctcttcttatacatgtcaactttgaccatgacatgaatggatcgcattcccaatttactaacacaaaaaaaaatgaggaaatacgaaaacagtagtataaaaatagagcaaagccggtgagaaaaaacaagaaacacagaaacagaacataaattaaagaagagtcacattcaagaatctctctcttctcctcctctcattctctcagcggcttcttcttcttcctttttctttcacatcacacaacacaaccactgtgatcttgatttgttaccaatg

SEQ ID NO: 16755 - DNA, 124 bp, Unknown; identical to SEQ ID NO: 323
  misc_feature (1)..( 124): 2750-1469P.txt file - cDNA_ID_1690084; gDNA_ID_1563797; Annot_ID_148312

SEQ ID NO: 16756 - DNA, 3000 bp, Unknown; identical to SEQ ID NO: 7252
  misc_feature (1)..( 3000): 2750-1469P.txt file - cDNA_ID_1690145; gDNA_ID_1621135; Annot_ID_56537

SEQ ID NO: 16757 - DNA, 1297 bp, Unknown; identical to SEQ ID NO: 594
  misc_feature (1)..( 1297): 2750-1469P.txt file - cDNA_ID_1690145; gDNA_ID_1592197; Annot_ID_152094
  misc_feature (512)..(513): n is a, c, g, or t

SEQ ID NO: 16758 - DNA, 3000 bp, Unknown; identical to SEQ ID NO: 7252
  misc_feature (1)..( 3000): 2750-1469P.txt file - cDNA_ID_1690145; gDNA_ID_1621135; Annot_ID_172622

SEQ ID NO: 16759 - DNA, 3000 bp, Unknown; identical to SEQ ID NO: 595
  misc_feature (1)..( 3000): 2750-1469P.txt file - cDNA_ID_1690169; gDNA_ID_1592205; Annot_ID_152105

SEQ ID NO: 16760 - DNA, 391 bp, Unknown; identical to SEQ ID NO: 602
  misc_feature (1)..( 391): 2750-1469P.txt file - cDNA_ID_1690266; gDNA_ID_1592244; Annot_ID_152158

SEQ ID NO: 16761 - DNA, 442 bp, Unknown; identical to SEQ ID NO: 603
  misc_feature (1)..( 442): 2750-1469P.txt file - cDNA_ID_1690312; gDNA_ID_1592255; Annot_ID_152176
  misc_feature (17)..(17): n is a, c, g, or t

SEQ ID NO: 16762 - DNA, 1752 bp, Unknown; identical to SEQ ID NO: 208
  misc_feature (1)..( 1752): 2750-1469P.txt file - cDNA_ID_1690464; gDNA_ID_29526; Annot_ID_146727

SEQ ID NO: 16763 - DNA, 357 bp, Unknown; identical to SEQ ID NO: 131
  misc_feature (1)..( 357): 2750-1469P.txt file - cDNA_ID_1690518; gDNA_ID_2963; Annot_ID_146062

SEQ ID NO: 16764 - DNA, 929 bp, Unknown; identical to SEQ ID NO: 133
  misc_feature (1)..( 929): 2750-1469P.txt file - cDNA_ID_1690682; gDNA_ID_3004; Annot_ID_146092
  misc_feature (115)..(115): n is a, c, g, or t

SEQ ID NO: 16765 - DNA, 975 bp, Unknown
  misc_feature (1)..( 975): 2750-1469P.txt file - cDNA_ID_1690727; gDNA_ID_30110; Annot_ID_146813
tgaaagtttaagcatatttttataacttaawactggagttccataagtttattgatgaatgtgataagtttgtctcaatgtagaagctatgtcctaragattcactcaatgtaacagctcgagatccmctcaatgtagcagctatgttctccarattcattcgtatttgtaaaaaaatgaaaactaraggtggcttgattgttggaactcgacgagtattgttccaggaagcagccgtcttacttcttttcaataacatatgttaaataaatcgacattgtttgttcaatcatagagagaacttattattattattattttttttttattgtagtagtaatcatgttcattcaaattgagcaattatttgctttctatctacgcccaaaaaccaacttctcaaatgcatcgacatgtaagaaaaattgcttttatgttttaaagttgtgtaacatttctcttggaactattgattgtctcaacgttgcaaataaagtaataaaatccyacaagatactaataatatccaaactgggcttataatcctaaaaatgacttccataattaaaacgaatttagtttattaattagtgtaatggaatattttgtcaataaaataaataatcwcgaaggattatataaaggaagaaaaaaaaaggaaggtgggaattttaaaagggaaagacacctgtctctctgacccacccacccattcatttctgtggctactctatcgtcgtcgtctccacaccgtcggtgccctcacggatcaatttctagagagagagagagcgagagagacgattcgtttttctagattctcgtcaaattttttttccctccttcgatctctcctttttccttattcagcatttccccattttttcacgcaagatccgtgattttccagggattgatctgattgggggatcgtgaaattcgtttgtgttttctgctcgattaaccggagaaatg

SEQ ID NO: 16766 - DNA, 22 bp, Unknown
  misc_feature (1)..( 22): 2750-1469P.txt file - cDNA_ID_1690771; gDNA_ID_30665; Annot_ID_146831
tgctctgaatctgtatgtaatg

SEQ ID NO: 16767 - DNA, 417 bp, Unknown; identical to SEQ ID NO: 220
  misc_feature (1)..( 417): 2750-1469P.txt file - cDNA_ID_1690779; gDNA_ID_30666; Annot_ID_146833

SEQ ID NO: 16768 - DNA, 210 bp, Unknown; identical to SEQ ID NO: 222
  misc_feature (1)..( 210): 2750-1469P.txt file - cDNA_ID_1690797; gDNA_ID_30942; Annot_ID_146844

SEQ ID NO: 16769 - DNA, 2534 bp, Unknown; identical to SEQ ID NO: 134
  misc_feature (1)..( 2534): 2750-1469P.txt file - cDNA_ID_1690969; gDNA_ID_3113; Annot_ID_146096

SEQ ID NO: 16770 - DNA, 784 bp, Unknown
  misc_feature (1)..( 784): 2750-1469P.txt file - cDNA_ID_1691109; gDNA_ID_1592492; Annot_ID_152550
gaggatatatcacttagaccgttagacgtcacgtgtaatcgtgtattaatgcttgcaaaatgtggttcaatcaaatacccaattaagggataggagaactaatacaaaaatgtggttcccgtaaacaatgcatgagcaagcacatgactgacatgagagatagaccagcgaataaaggtttagtattgacgcaccatgcaaagcgtaacggtgaactggagctctactggctgagataattcacaaggtgaaggtgagatatattttaggagagccagaaaggtagaaccccgagacgagagagaccaagtgagttttggactagtgtttttcaaagaatgggtctagaactatttattaagtgccaaaaaaaaagacaaataaaagkacgatttttctatataggactactcgattaatyttaacaaaaaggcgaataagaagaaaacatatatgtttgttttttttaaaacaaaaaccgtggaaatcaaaacaccagaaaaatgtggtagtgaagaaaattacaagagagrcagtaaaaaaaaaatgaaccaaaaaggcaaaaattgaatacgtggcttcaatgtagacccagatgatgaacgtcgcatcatcttccttacgggggaaatctcacattttgaaattacagaaaactccaaagaacccaagattgaatattgaatattgaaaattgaaaaaatctctctttgaagaattgaaatctctctttgaagacgaacgaacctcgttgattcctccattcctcttcggctcgtccatg

SEQ ID NO: 16771 - DNA, 62 bp, Unknown; identical to SEQ ID NO: 45
  misc_feature (1)..( 62): 2750-1469P.txt file - cDNA_ID_1691191; gDNA_ID_1665; Annot_ID_145267

SEQ ID NO: 16772 - DNA, 525 bp, Unknown
  misc_feature (1)..( 525): 2750-1469P.txt file - cDNA_ID_1691222; gDNA_ID_1815; Annot_ID_145376
ccccccgtccattaagaattaagaaatttggttaattacaacatttgtttttatgtttaagccttttgttcgtaactgagctaatactggaatcactgatcaatgatgaatttggaaaaaaagatattttgaggaagacagagacagactctcttcgaccatgggacctgaacttgtcctaaagttggtaattactaatttgtgccatcggcagagtccacgagctttttggctggatccgggcgggtccaactttctcgacatttgtttgatctctccgttttgaaattgtttttttttagtccttaaattcaaggttttatactatttttgacccaatctgactaccttaaatgacaactttacccttgcccgcttttcaactttttcttctcccatgtccactttagtcctcgttttgttctttcatagtcttctagatctgtagtttttttccgcgaccgcccaaaaaattctctgatcagacggtcgattggatcggagatttaaggtaaagaaaaaatg

SEQ ID NO: 16773 - DNA, 1131 bp, Unknown
  misc_feature (1)..( 1131): 2750-1469P.txt file - cDNA_ID_1691266; gDNA_ID_1872; Annot_ID_145395
  misc_feature (942)..(942): n is a, c, g, or t
cactgtttaaagaacatttgggctctcatttgacacatgtctagattagggatcattacattctgtgaacaagtaaaaagcttttgattctgctttttttctagagataatcataaagtttgaagatatcagcttcattgtctggttcatgaacttgttgatctttgactgtacataaatgtgctataatgttatcgccaatccataataagatgaagttcttgtgaaacttgcaggatatacaagtgacactaagggaagagatcaaaagcgcttgcgagtaccgtccctttgagaaatgcgattacaacgcgagaatagccaatgagatctgcttccagaagcttgaatatgttctcacgcagcttgaagatctgaaacaaactgctgaccggtatccttcttctgattgatattggtattcataaaaaggttacttgaagagctatactaaaccatcggttgtgatatagtttccagatgagttgtagacttgtaggttatcccattaaagtatgtccggtttttacgaatgagtggcttgttgcaaaagtaagatattatcctacttactatattagattttgcaaaaagattaggtgattttggttagaacattcacttgcaatgaatctgttccaagaatattagatacattacatccactgggagttatcaatttcagcttatggagaaatcgaaccaattttgggccagagagaaacggaccaattttattgcggtttaatgtatcgatcaatacttggaaccaaatgtgctaacgtcaattacgtatatgaatcccttcattcatatgtggtttaataaattaatagcatcaacagctgaaattcccggttagatgtgataaaaccaaagcggttaaaaagggttaatgagaaccaatattgccgggttggcggttacgccgttttgtgctcntctgttttagttacagctcaagagacgcgttgattggagaaggtgatagaaatctcttgggtagagggagaaaattagggtttagagttggagatgagaagaggaacgacgatctaaggagacaaaagagagtagctagatcaggacgaaattccatatttccttcgtttctgtttctctctgagaatg

SEQ ID NO: 16774 - DNA, 274 bp, Unknown
  misc_feature (1)..( 274): 2750-1469P.txt file - cDNA_ID_1691340; gDNA_ID_1925; Annot_ID_145428
aagattagcctttccttgcattaagcacaagttaaaacagtgagcgttaccacatttcatttacaagtgcaaaagaaaatttcaaaaaaatcctttccttttaccggatatatacacatcaccacatttgttaatattcaattggcgatactatattctttcattgcactaaccaaccagtctcctttatcatctctccatctcatcatcctcctccatttctctcccattttttcttctgtgtatctgcgggagagagtgaaatagagagatg

SEQ ID NO: 16775 - DNA, 399 bp, Unknown; identical to SEQ ID NO: 66
  misc_feature (1)..( 399): 2750-1469P.txt file - cDNA_ID_1691556; gDNA_ID_2079; Annot_ID_145510

SEQ ID NO: 16776 - DNA, 960 bp, Unknown; identical to SEQ ID NO: 1
  misc_feature (1)..( 960): 2750-1469P.txt file - cDNA_ID_1691857; gDNA_ID_52; Annot_ID_144096

SEQ ID NO: 16777 - DNA, 3000 bp, Unknown; identical to SEQ ID NO: 8895
  misc_feature (1)..( 3000): 2750-1469P.txt file - cDNA_ID_1692104; gDNA_ID_1971919; Annot_ID_58537

SEQ ID NO: 16778 - DNA, 3000 bp, Unknown; identical to SEQ ID NO: 8895
  misc_feature (1)..( 3000): 2750-1469P.txt file - cDNA_ID_1692104; gDNA_ID_2926147; Annot_ID_197807

SEQ ID NO: 16779 - DNA, 3000 bp, Unknown; identical to SEQ ID NO: 8895
  misc_feature (1)..( 3000): 2750-1469P.txt file - cDNA_ID_1692104; gDNA_ID_2926265; Annot_ID_143303

SEQ ID NO: 16780 - DNA, 3000 bp, Unknown; identical to SEQ ID NO: 8895
  misc_feature (1)..( 3000): 2750-1469P.txt file - cDNA_ID_1692104; gDNA_ID_2926147; Annot_ID_139141

SEQ ID NO: 16781 - DNA, 3000 bp, Unknown; identical to SEQ ID NO: 8895
  misc_feature (1)..( 3000): 2750-1469P.txt file - cDNA_ID_1692104; gDNA_ID_1971919; Annot_ID_177167

SEQ ID NO: 16782 - DNA, 154 bp, Unknown; identical to SEQ ID NO: 406
  misc_feature (1)..( 154): 2750-1469P.txt file - cDNA_ID_1692104; gDNA_ID_1590785; Annot_ID_150066

SEQ ID NO: 16783 - DNA, 3000 bp, Unknown; identical to SEQ ID NO: 8895
  misc_feature (1)..( 3000): 2750-1469P.txt file - cDNA_ID_1692104; gDNA_ID_2926265; Annot_ID_204899

SEQ ID NO: 16784 - DNA, 3 bp, Unknown
  misc_feature (1)..( 3): 2750-1469P.txt file - cDNA_ID_1692403; gDNA_ID_1590901; Annot_ID_150226
caa

SEQ ID NO: 16785 - DNA, 840 bp, Unknown; identical to SEQ ID NO: 422
  misc_feature (1)..( 840): 2750-1469P.txt file - cDNA_ID_1692410; gDNA_ID_1590903; Annot_ID_150230
  misc_feature (11)..(11): n is a, c, g, or t
  misc_feature (565)..(565): n is a, c, g, or t
  misc_feature (607)..(607): n is a, c, g, or t

SEQ ID NO: 16786 - DNA, 2321 bp, Unknown
  misc_feature (1)..( 2321): 2750-1469P.txt file - cDNA_ID_1692457; gDNA_ID_1590913; Annot_ID_150242
  misc_feature (47)..(47): n is a, c, g, or t
  misc_feature (1902)..(1902): n is a, c, g, or t
  misc_feature (1912)..(1912): n is a, c, g, or t
  misc_feature (1967)..(1967): n is a, c, g, or t
aaccataacctggggaatgttggccagttttgggcaagctacaaaanggatatatgcaaattaccaacttcagctaacagactcgagaaaatcgaaaaacaacacccccatgaatgtaaacaaaagaactaatcatttggacaaactcaacacagaagattatgagaaaactcacctgacatcaaccagtctatatcaaccatataattcgataagatcgcagcaacaacgtctccctgtcatttacaaatacaatctttagcaatgatatctgaacaaaacaaatgaaataatatgcttagcatgagactaacctcaatgacatcattaatggaaacacaagaagtattagcccaatcaggcaatgcatcaacactcaaaagccgaaatgttgaaggtagtttctcattaggtggacaaaaacgacgaatggcctctacatcgtcttcagcctaaaacagttccatcacatcaaacaaagcctcaaagaaacaacaaaaaaagcaacattctttggttaagccaaataagttacctttcgagctttcttagcagctcttccattgagcaaaactagcttgaagaaatggtgaccagggatcaattcaataagatcatcattacatactgaaacctcttcactaggtttcactttctttctctctcgtcaccggaagacctaataacaaccggatttgttccgtcctacccaaaagacacaaacttgacatgattcaattcgataagaagccaaagttataatttttaatgttgttatagttattaccactgacaacgaagctgagccagaagtggaaacgataatggtgatgtgtttgcgactgagacgcttatcgacgattgaaacgttgccacggccaatgatgtttggacttcggataaagttatccttggagatgaattgtcttcctttaaatctgctttcaatggaatcaaataagcaacctgcaacagatacataaatcagagcaagacatcgaattttctgtaattggaagaaacggaaattagggttttgttttgaattacctgagagtgagccattaaggaagacaagtgtctgaggttgaattgaaccaaggaagaagaagaagatgcaaaacgctgcgtttcagtgaactaactagcgaaaattttgggatgtttcaatggagaataatgggcaagaaattcatagtaacggtaacggttctcccaccggcggcgacaatcagacaaccgcatcatcatcagccgatgggtctttggcttgtgaagttgtacaatatattaatttaagaaacattgtcatcaaagtctgggtggtgtagtcggttatcacgctagtctcacacactagaggtccccggttcgaacccgggctcagacatttttttttcttcatttttttcaattgacacgtgtccgaaccttgcccaaaaataatagtatgattaacatattttatcttcccattacgttgaaatgttacaatcgaatattcgaatgagtgtgattggaattggatgaacatgcagattgttacgtggacaaaataattgtgatcaagtccaaagattaaacaatgtagtttaactccaaagagtttgtaagataaaggatattgattatattatgttaatcaaatttttaagatgtattattttgttctcctaccgtattattgtcacttttcagttgcgaagtcaaatgtcacaagcaatattgttcattgttaatcctcctacctaccagtcattgtcacgtgtaaattagatagctatggaccggcttgtgttccattctaattgttatacgtataatatagttttttcttgtggtttacttgtcgatttcaagttagttatcgacaaattaccattattcgttatcaagtgtttncttattcgtnacaacacctagttgacgaaaagatctgaatattgccaaatttcaaaaacttattnaagtttgtgttggttatttttttcattgtttaaaatcattggcaccctttttctggtgtaaatagtaataaacatcaacgaagacgataagccataaacaaaggacagctatatatattccacaaacaacaatataaaattcaacaaatttacaaaaaattcctatatctttgtctttaaaattcaatgatgtaaccacgaacactttgtatttttgtatttcaaccttaaactatagtactaacaagttccgtgacattattacataagcacgttagtataaataacaacaacaatattaactcaattagtatcatcgatcatctgtcaaaaagaggagctaataataatatg

SEQ ID NO: 16787 - DNA, 2103 bp, Unknown
  misc_feature (1)..( 2103): 2750-1469P.txt file - cDNA_ID_1692472; gDNA_ID_1590917; Annot_ID_150247
  misc_feature (1102)..(1102): n is a, c, g, or t
cagtattgcgaacgagccaatgaagattttcgtttaagctaatgggatggtaaaaatcacgattgaacgaaaaagagaaaggaaaatggatagtgttgagactccacaaccgtgtctcttacgaatatatctggactgaaaacttattttcgttattatggatcttttttgcctttcatcaaacataacaactttgtaactcaaaacgacgccgtttttagtttgtgttactattcccaagggacagaaaaaattatgctcgagagcacgacgattgatttctaagcattgatgtgaaattggattagctaggtataacgattgatcctgaggatagactcgacatcgatcaaaataaaccccatatcggtgttgtaagcaacaactttggcttctcggtatatgttcatttcgaatttatcggtcataaaagacgagatgtaagagtctatggtacgattaaatccccaagtgttgcatctatgatgagccacaagttctatcttgtaacgcctacacatgagcgaccatgaagaagaatggtgcagagacatgaacatgacacgaaaatgtggagactcgataatagatttccactgcttacaaaccagtttagaagtcgtgatcatttttagtggtaattgtgcaagtataattgtccatagatcatctgtgaagaaacccatattcttattcatatgtgttattgggatttacttaggtgtatttaaatactaaatttcacataaatttatttctcaataatatctagcttttgctgataaatctacgtaacataataaacagtaagagatttgatcaaattatatcttttcatgctattcagtattgtaattttctgaaataatcaattatcctaaaacaagttcataaataaaaagttaatatcctaaacaatatttacgtttaatatattttctctattaatactagatttgatggaaattttatctattttagttattttatataaaaagtttttttggttaataataatgaaaaacgtgattaatgataaaatcataataagagcgaagggcccattataacagcatttatttgggccgttgttggtctcagnttcccgctcttttttatcgatcgaggcgccaaaacacaaagaatcgattatttgttgtcatctttcagattgtcaattcaaagaagacgatcagatctaattgactcgagagagagagagagagagacgtatgtttgggaggctgagaccaccgcgtcgccgccggattgtctggagagatatccggcgaagatcatcaaagacgatcctctctccgtctacggtataataaatacacactctttccattttcatgtgattctgattgtccaatagaaatctctaggttttgaaatccttggtttcttttgatggcattgtagagtcaacactgttgaaacttaagcaagggtcaacaagacaggacactacttcatcagaaacagaaggtgaagagaatttgtcatcaacatcatcgtctcatgtcttgtcttcggatacacaattaggagacactcatgatgcaatggctatagactcgtgtgaaagctcgaaacagataaagagcaagaacccatcagtactatccatgtttagcaagtacaagaatcaagctcaagcacgaaacatgaagacagagactcaggaatgatttgtaaacaaatgtatcccaagttcatgtgtgttgtactttgattatgtacaatttaactacattgttagtaaggagtctatatagatgcctgtatcaaaacatttctcaatcatgtgtttattactttagcctaaacaagctttatgatctttaaccaacggtgttgatagtactggtcatgtaggggttcatccataactgaacgtctaaaccttatattaaaatgggtctaactgatcaatcaaaaacatttggggtcaaaacaatatattggataaatataagggttcataaaaaaacttaacatttcttcttcactgtaaaatgaaataaagcttatccatactcaacttcttcactctctcttaaaccttcaaaaaccctgaagagtgacgaatgaatcatg

SEQ ID NO: 16788 - DNA, 7 bp, Unknown
  misc_feature (1)..( 7): 2750-1469P.txt file - cDNA_ID_1692605; gDNA_ID_1590947; Annot_ID_150304
tcaaatg

SEQ ID NO: 16789 - DNA, 930 bp, Unknown; identical to SEQ ID NO: 431
  misc_feature (1)..( 930): 2750-1469P.txt file - cDNA_ID_1692672; gDNA_ID_1590962; Annot_ID_150335

SEQ ID NO: 16790 - DNA, 755 bp, Unknown; identical to SEQ ID NO: 444
  misc_feature (1)..( 755): 2750-1469P.txt file - cDNA_ID_1692880; gDNA_ID_1591037; Annot_ID_150432

SEQ ID NO: 16791 - DNA, 784 bp, Unknown
  misc_feature (1)..( 784): 2750-1469P.txt file - cDNA_ID_1692929; gDNA_ID_1591050; Annot_ID_150447
  misc_feature (161)..(161): n is a, c, g, or t
tagatataaaatcagttaattcttttttttttctttctcatatatatttatgatttcataacaccaatttgactttaagaagatatctattgaaattttcaaaacaagtttaataggaaaattcaaaatatatagacagcgccatattctagaatattaanactcattatgaatttttgaatgttttgatttatagacctatctatgatgttgaattgagtaaataaaaagtttaagtttaatggtgcgtttgatctcacccatttttttctttattcagtattcaatctttataactctaccttattcgaagagatgaattcatctagctataaacacatcagtgacaagtttaaaaaaaatatctacacgttcgatggtcttctgtatttcacatggtaccatccatgtgaatgtgatgggaaatttcgcagaccctaatgccggccataaattggatttacaaaactaaacaatgtaatacaattttcaaagaaaccggatctaattatcttattgtcacttaataaacaaactatataagagaaggggaggaatatatgtatacacttttttatgactactaggatggtaaccaaagtcatgattccatagtaactccggtttaattgcttcaaaggccaaaactaagctctttattaagtaacatggattagtttcttcataaagataaaactaattatttaaacaaagtcaaagctagctttagatgcgtactagagtgaataatacaaatagtaaacgatattctgatcagaaaatg

SEQ ID NO: 16792 - DNA, 3000 bp, Unknown
  misc_feature (1)..( 3000): 2750-1469P.txt file - cDNA_ID_1693072; gDNA_ID_2936586; Annot_ID_195111
ttgtgtctgcgttcagagagcttaacgagatgagtgatggagtaaaaatggacagtttgaaagaacctatcttcaatctcgtccctgtccttggtgctggaaactcttctgcttcactcgacaacataatcacctgtgaactatttgccctaaggtcgtagctttcctgtttctcaaggaacacaaaggtttacttacttgatcttggggtcatcaaggtcatcaagggccatttgattttgcaatgggtaagccaaattgaacggccctatgttttaggcggacagttccatgccgttttttttgaataccttttccatttgcgaaagaacaacacgtagttgttttgttccaaatggaaacggcacgatgtttgttattcttttcttttctttttttccagttggaggtgcaaagactgattactttttgccaaacccagtccaaatggaatttatttttatcgaaaggcatgatattattggtcaatacattataacaatatgaatattatttaccagaaatatttaacttggatttggttttaccacatactgtatgtaactttcctgtcacaggtcattattattaaacgtattttagaatttaatgcaaagaatgtgacatgttacacgacaatatatatctcagaaaggtgtgttttttgattaaagattattagtctttttcacgaggatataataagaggagagattccaaatgtcaagtgctattttcaaattgttaaacagagattgaagatctttagcataaaatgttaactatgacttgtctattcacaaccaaagtcttacctcaatgtataaaccgacgtctttccaacataacacatttgtattctcatatatttaaataaaagtgaagcttttctttgatctagatcgtggttattttaaaaatataataaaatcaaataactatggttacttaccaaagtaaagtggggttattttttgctgtggtgatgttttatgctttgtataagacacttttgcatctctagtttatttctaagcattttggagtaaagagagaacaaaaaacaaagtataaaaatatccaacaagatgcttttgggggaaacactgcattgtggtctgtggggacaaatttgctggcacaaaaattctgcagaagaaaatgaaaataatttgatatcactataggatggtccaaaaaagtactaacaagtttaaatatttaatttgattcacagcatcctttttagcaccgtaaatttgagtcttatgtagtactgattattaatacaaaactaacaagattatatatcgataaatatgaagcatcctattcctatggttgattatatgaatcttttatgtcacacaccctattacgacaggttttaatgatacccacatcacacgtgtataagttaaatgcaatgataacatcctttactctgaatacagatacatttgtggctaaaaaattgtaaatgcaaatctttggactttggttcagaaatgaaaacaaatgtattttttattcgaaactgtgtcttaaaaagaatccaaagtggaaatgtccaacctggaaattcagacgtaaagcgaacccaaaagaaaagaaaaaatgaaaaatggtaaaaccgtaattaagtgtaaagtcaagggtagttccatatttctcccttgttggtcgagcgagaccagaaaattcgcagagagagagagagagagagatagatctgagagtagtggtggtggcattaataatggcgtaagtggaagaaaggaacctagccgttagatcttctcaatcgctacaaacattcattgttcaccgatcgattctctctctttcttcttccccattgctccttccttcgtacccctctctctgtcttttgaggtttccgggtcgggttggtgagaaaactccagcggcttaacggatcttccactggtagttttctgttcctcacaaggaaatcgaaaatttgataaagcgaaagtgaaaaaggcgtgtgttttctttgtaaaggctccaacttttttgatgaacagcttgtgcttgttgtgaaggttgttactttttgtgtattggaatttgggttttttctttatgttctgaggaggagaaaggaggaagctttcttgaattggattcaaatttgagctcatatggtgagtttctagggttttgtttgtgattcctggaagaatctgattccttttctattagggttggagagaagtaaagcagaaaagcttttttgttttggagcttagtgagtgttgtggataaacaatggaagattactccaagtatactcatagtcctgctcatttagctgttgtgcttcgggatcatgctgctcttaggcgaattgtttcggatcttcctcggttagctaaggctggtgaagttactactgaggctgagtctatggagtctgagtctcgtgctgattctgtttcagctgtcattgatcgccgtgatgttcctggtcgtgaaactccattgcatctcgctgttcgtcttagagatcctgtctctgctgagattttgatgtctgctggtgccgattggagtctacagaacgagaatggttggagtgcgttacaagaagcggtttgcacaagagaagaggccatcgccatgataattgctcggcattaccagcctcttgcttgggctaaatggtgtaggagacttcctcggatcattgcgtcagcatctcggatccgtgatttttacatggagatcacttttcattttgagagctcggtcattccgtttattggccgcattgctccttccgatacttacaggatatggaaacgtggttcaaatctccgtgctgatatgactcttgctggttttgatgggtttaaaatccaacggtcagatcaaacatttctctttctaggggatggttactcgtctgaagatggtaaaatgtccctatctccgggctcgttgattgttctttcgcataaggaaaaagaaatg

SEQ ID NO: 16793 - DNA, 1770 bp, Unknown; identical to SEQ ID NO: 453
  misc_feature (1)..( 1770): 2750-1469P.txt file - cDNA_ID_1693072; gDNA_ID_1591090; Annot_ID_150501

SEQ ID NO: 16794 - DNA, 677 bp, Unknown; identical to SEQ ID NO: 454
  misc_feature (1)..( 677): 2750-1469P.txt file - cDNA_ID_1693098; gDNA_ID_1591092; Annot_ID_150508

SEQ ID NO: 16795 - DNA, 3003 bp, Unknown
  misc_feature (1)..( 3003): 2750-1469P.txt file - cDNA_ID_1693098; gDNA_ID_2926257; Annot_ID_143130
attcactttctttagaggtttttgggtagcatgttcatgggtcagcatgctgtctccattatctttttgatgtatatttaggtttcattgtgggaattcaaagaaatgttgttacctggtaattagaatcacaacaaaagtaaatatggtgaattatcaatttggaatcacgttttcaaatatcaaacctacaagatttttcttataaaaataacatctgcaagatttgcattctaactagagagagaactagtgtcatgtaggtatatatatatataacaaaatatagtgacataaacaacactcgcacttttttttcgtcaaggtatacatattacataaaaacaaaaacgtattttttttttatccagacaaatcatacccccaaggtaactaaaatattgttgggtaattaaaatagatatttccgtttgctataaatgagaaagcacttacaacatacatacattctctctttctctctctctctctctctcatcccggcccagttatgtggtcggagagaatgatgaaggtgtgtgatgagcaagatggagaagcagggcacgtgcattactagctcatatatacactctcaccacaaatgcgtgtatatatgcggaattttgtgatatagatgtgtgtgtgtgttgagtgtgatgatatggatgagttagttcttcatgtgcccatcttcaccatcatgaccactccaccttggtgacgatgacgacgagggttcaagtgttacgcacgtgggaatatacttatatcgataaacacacacgtgcgtgtttgtgtgtacgagctagcctagatcgcgtattttgaggaagtagataccctctgcaaaagtacctatttacgtacgtacgcaaaggaagattagtcttgcgaaatagtatcaggttagtctaattaacaaagctatatgtgattatatatatgatcacgcatcttgatcagcgtcgcttatatattatatataatttaatgttcataaaccatatgtgtcataatgaacatagtttcggttagcgagtattagacaggagatccaactatacaataatacaagtctttttcttttaaatgaaaatttacttatggtgctaattctattgtcattaaccgatgtttcatttgagtaactgtcaatctgtcatatcatttcaagcaaagggtaaatactaaaacccttttggttgccccttttttagttattaatgaggttaatagagataatcaaacgatatgataaatgtataagattaccgagtaaagatgagtaatttaatcgattagtggagcatgcgttcatttttttaagattatacttgctcttgctggttaccaccttgttcgctcttttacgggcttaaataacatacacatattatacgtatacactatcaagcgtgcgagatagaccaagttacatgttaatcttaattgttgaatcacacatttcaggttcgtaaggtcataccgctccttatcaaatggtattcagttttatctctctgatctccctcttcttttaattgtctaataaattaaaatttgaattagaacacattaattggcaattacaaactattattctattcaagtgttttttttcaaacagttttacaattataaatatgttatcggaacgtatgcatatataataaggatatttcagtcgaactaattattcttttatgttaaatagttgattataaatattcagataacttctctgaaatgtataatttgtatttaatctgaaaaatacagtgtgtaaattaccgttttcgatacatatattgtttagctcaatgtcaaaatgacattcatgtcgtgattatttactttccaacaaaaagaagagcttagcttattagttatcattatattttagattttttttttgtagatgacgatagctccttttagatcactattagtaatcgcaattaattcaatttggagagaacaacacagcaagaggcatgaagaaactccaattccaccagagcgttgcttcaaagttcgaagtctcaacaaacatgtttggaaacacatctcctctatacataagcaatgagacaacagatatgttagatgtatgcaagttttgtttgcttcaagataaacacaaaagcagaatagttttgattggaaagttgtttatctgaaaacgattaatcgagcgatgctcttatgttgtcagtgggcttagaatatatctccctaggccatatactgggcttcactaatggcaacaatattaaatagtcagttgcctcaatatcaacgagtgttaggcgggcccttaaatgatttgaacatttgatagattttaacaaatgttatttgggagaccacaattggagtttttttttcttttcaaatttgatttcaattctgtagcaacatggaaattaattagtatgaaatcttcgatggttgaaaaaaatactaatttgtaaattatatggaaaagaatccaaaaaaatatgatttgacccatacgtcggtgtttgttgagtaaaaatcttcttttttttccgtgtttaaggtaacaaaacgcgtcgtcacagatttggaccgtattaaaaacaattgacaaccgtgtatcctcccttaatttatcaataatgcaacattttgatatattcgtctacttcatcaataagaaaagtgtaacacgggaaataattaaatagtctaaattctcttctgttttttttggtttgttcttagaggaaatctttatcttggaatctttaatctatctagaattaaaagtttatgctcgtaggattgtctacttttaaaagtcaacatattcgatacagatattttgtatatttatataaagtcgaagaccctgaaacttatcttcacggcataataagaccaagaagaaaaagaaaacattaatttcaaccaaagcaaaacagagagaaaaaaatagagagagtgaatcaatttcggtggagaaagagaagaatg

SEQ ID NO: 16796 - DNA, 3003 bp, Unknown; identical to SEQ ID NO: 16795
  misc_feature (1)..( 3003): 2750-1469P.txt file - cDNA_ID_1693098; gDNA_ID_2926257; Annot_ID_204587

SEQ ID NO: 16797 - DNA, 2146 bp, Unknown; identical to SEQ ID NO: 457
  misc_feature (1)..( 2146): 2750-1469P.txt file - cDNA_ID_1693205; gDNA_ID_1591117; Annot_ID_150547

SEQ ID NO: 16798 - DNA, 95 bp, Unknown
  misc_feature (1)..( 95): 2750-1469P.txt file - cDNA_ID_1693298; gDNA_ID_1591147; Annot_ID_150587
caaaaaaaaatggagtgaaaaagatgaaatccctaaattgaatcgcaaatcgcaatttgaaaaaaaaaagatctctctctgaagaatccgtcatg

SEQ ID NO: 16799 - DNA, 41 bp, Unknown; identical to SEQ ID NO: 459
  misc_feature (1)..( 41): 2750-1469P.txt file - cDNA_ID_1693332; gDNA_ID_1591156; Annot_ID_150599
  misc_feature (5)..(5): n is a, c, g, or t
  misc_feature (15)..(15): n is a, c, g, or t
  misc_feature (23)..(23): n is a, c, g, or t

SEQ ID NO: 16800 - DNA, 692 bp, Unknown; identical to SEQ ID NO: 464
  misc_feature (1)..( 692): 2750-1469P.txt file - cDNA_ID_1693546; gDNA_ID_1591237; Annot_ID_150704

SEQ ID NO: 16801 - DNA, 294 bp, Unknown
  misc_feature (1)..( 294): 2750-1469P.txt file - cDNA_ID_1693717; gDNA_ID_1591284; Annot_ID_150780
  misc_feature (2)..(2): n is a, c, g, or t
cncaaataaatgagaaaaagcaaatcagtaattaaccttaaaaaaatgcctaataaagcgtcattaaagaataacccattatcgcctgtcactcacttttaatcatcaaaacacgccacgtgccaaactctccactgaatcaaagtcgccaaacgcttcagtcgctatttcatgatcgacacgaaggctctcttttggcgattgcaaccaccacctaagaagaacggctacgtaatttgactgtacgacttgcgaaaaaagtcgaaaccttttaacgaaccagacctaaaaatg

SEQ ID NO: 16802 - DNA, 219 bp, Unknown
  misc_feature (1)..( 219): 2750-1469P.txt file - cDNA_ID_1693833; gDNA_ID_1591311; Annot_ID_150825
cagcttggtgttcccgtcagctgacactcgagctggtggactgtggtagctcatgggtgaagaggtgtctcgaccaaaaggtgtaaggtcgagcgggtagcaacgaacggttgcatcgccgaaagggtggatcagggcgagcagttacgaatggaaagatgcaactcttccgaaggatgcaaggaacgaatgtgaccttatggaaggatgcaatgaatg

SEQ ID NO: 16803 - DNA, 56 bp, Unknown; identical to SEQ ID NO: 480
  misc_feature (1)..( 56): 2750-1469P.txt file - cDNA_ID_1693928; gDNA_ID_1591354; Annot_ID_150867

SEQ ID NO: 16804 - DNA, 471 bp, Unknown
  misc_feature (1)..( 471): 2750-1469P.txt file - cDNA_ID_1693932; gDNA_ID_1591355; Annot_ID_150869
ttccttataataaatgagcggmygtttttgtatatagttgtatcctacatgtaaaacaaattggataatttttaaagaaatgattaactgtatctcgtaaatattttactagatggaatttatatacataatcaaatttcaaagaacaaagaaaaatcgtaataaattaaacttctctttggataacatttcagcgaaaaaagaagaagcaagttaaggtttgcttcttgagaatatattgttgaagtgttttttatttgaaaattcccacaatttattaagaaaaaaattaacgatttgcacccgaacatatctagtcctcataatcaattcctccgagttttattagtagattaccgtgtctcaatttttgcatttttttcccccaaaaaaaatagacatggaccagtttttaggacaagcttatttggaggaaaagttataatttcgactgatattgggttgaacatg

SEQ ID NO: 16805 - DNA, 3 bp, Unknown
  misc_feature (1)..( 3): 2750-1469P.txt file - cDNA_ID_1693975; gDNA_ID_1564383; Annot_ID_149362
gtt

SEQ ID NO: 16806 - DNA, 322 bp, Unknown; identical to SEQ ID NO: 482
  misc_feature (1)..( 322): 2750-1469P.txt file - cDNA_ID_1694019; gDNA_ID_1591381; Annot_ID_150901

SEQ ID NO: 16807 - DNA, 712 bp, Unknown; identical to SEQ ID NO: 483
  misc_feature (1)..( 712): 2750-1469P.txt file - cDNA_ID_1694031; gDNA_ID_1591383; Annot_ID_150906

SEQ ID NO: 16808 - DNA, 172 bp, Unknown; identical to SEQ ID NO: 488
  misc_feature (1)..( 172): 2750-1469P.txt file - cDNA_ID_1694109; gDNA_ID_1591404; Annot_ID_150939

SEQ ID NO: 16809 - DNA, 1839 bp, Unknown; identical to SEQ ID NO: 489
  misc_feature (1)..( 1839): 2750-1469P.txt file - cDNA_ID_1694121; gDNA_ID_1591406; Annot_ID_150943

SEQ ID NO: 16810 - DNA, 1735 bp, Unknown; identical to SEQ ID NO: 491
  misc_feature (1)..( 1735): 2750-1469P.txt file - cDNA_ID_1694223; gDNA_ID_1591434; Annot_ID_150981

SEQ ID NO: 16811 - DNA, 747 bp, Unknown; identical to SEQ ID NO: 494
  misc_feature (1)..( 747): 2750-1469P.txt file - cDNA_ID_1694307; gDNA_ID_1591445; Annot_ID_151005
  misc_feature (563)..(563): n is a, c, g, or t

SEQ ID NO: 16812 - DNA, 1950 bp, Unknown; identical to SEQ ID NO: 495
  misc_feature (1)..( 1950): 2750-1469P.txt file - cDNA_ID_1694325; gDNA_ID_1591458; Annot_ID_151013

SEQ ID NO: 16813 - DNA, 3003 bp, Unknown
  misc_feature (1)..( 3003): 2750-1469P.txt file - cDNA_ID_1694329; gDNA_ID_1591458; Annot_ID_151014
  misc_feature (605)..(606): n is a, c, g, or t
atagtccttttcaaagacattgcgtaaatcatctgagaagcctgcaggttgacacatacaggcaataatctttcttcaaaaacaaagggaaaaagaaggcaaaactgtcgaaaataaaataataatcaaagaaagttaccagtaaacaagggctcattgaaattttgatccttccttgactggttattcattctccaaaactttaatttggatgaaggcatcttctttctcttacgtagagtatcactaggatccttaagcctttcacttatgttcctgttcaaactatttgatcagtacggaacagctaatgaaataatcaaagccacatgaagcaacggaaaagttattacttgttggttaatactgtgacaccatcaaagttcttcctcttccttgcccttctttgtggttggggaggagatggctgaagcaccagttgaggtgatggatgcacttaacataaagaaaaaagtgttttaaatagataataagagagagaatgtagtggttaagcttcaaattatcagactatgttgctagctcaccaaaatctgcacgttcttcctcagaaccagcagaagaacctggagatcctgagcgannaaacgcagaatgccttccagaatttaacatttcttcatcaatactagggatagtgggttcttctcattcaaagtttcatccaatgactcagtgcgttcaactctgacatcctgttgttgtgcagcaaatgatggatgggacgtggggcttagatcatgtgcagcgtcacgcattctctcaatctcgggaacagttccaggagaagtggcatcgtttctctcggaattgggaatgcgctcttctgtcaagttactttgtctaggatcctggacttcagtgaattcctctgtgacgttacgaggactataggttccagtatcgaaagcaatattggagtctcttggctcattgtctggtcctgtctcatgagccgtttcaacatcaatttctccggtatgcctacgcacaggttctgttgattggctgctcaaagcataaaaatatgtaacaacattattaaagaagatcaactaaacagataaggaagattaagagcaaggtgtagtaaaggaaatcaaaactctatgaagagcctcactcgacatccatcgggatagattctgagatgatgtcctgtaagaaaggcatacaaactttcattcaataacaagtgctcggagacatgggaaacaagaagtcagaatcaacttcaatgtcataagaagcaagcagtaatctcacctcgtcgaatgttacagcaacataaggatcaatgccagtaggaatttgatctgaaaaataagcatcaacatcataaacacctcaaaatcatggtatgctgcatctagaaccaaggaaaaaaaacacagacaaaaggtacctgtgagagtgatatcttcctcactccgagtatgattatcgaattccctagaattcacaagaaaagaatgttaaagatgagtcaggctttagaacagataaaaactcaaataaaagcaagaaagaagaatacatgtcgagagtgtcatcttccaagtcgaactcgtccagatttagtgcttgaggcaaagtaacagactcaggcggggcctgtctggcatcctcaggcaagttaacttgagtagaaacgaaagccttagctacccaagtattaaggagattccagtcattgtaaagataatccactttctttgaatatattcgcactaccccaactagaaggtgacttgacgttctcaatgccaatggtacttcaggaaacattatattatctgcaaagccaattgcaaaattctcgaaaagtcagaaactttattaaagcagagaatttcaattactacaatgggttatatataaacaacaaaatcggaatttgatgaatgcccatgtaaaaattcgtattgcctttttgaaatttcgaattggatacaatcaaaggggattcaaaaaaaaaagaagcgaactttggatcaaaaagcgaaaattgaagagaggaaagacgaaccaacagtgtcggggatgttgatggaggtgtactgagacttcttgaggcgttggtgcacatgagcggcgcaccacaccgtccccaatggaccctttcgagccaaaagcgtatgtgaataaaacattttaattccttcgaacaaggagccctaaagaagcagagatggagatactaagttgatttgagagagaaggattatcgawtcgaaggtgttacattatttagagaaaccaatcaattttgaataggaaactgcagagcgaaagagagagagacgaagcggtagggttttgtgtgcttttggagagaggaagaagtgtttttttagtggagcgggaaaaaactttttgtggcgctaatgttgaaatcataggcaaatagacgcaatgacttaaatacccttttcttattggatccgagttttttgaaatttgccaaacaaaacaacttgggccactaaacccaatggccaacttttcggattaatgggcctaaggggtacatttggaaattcgcgtatatgagagtctagggttttcttcatatttaggtttctctatttctttcagacgctgggttcttgcttttgctgtttgttctcttgagtggaagaaagttgcagccactaaatcagatccgacaatggtaaagttttcttcgcctctcagttttattattctcaggaggattattgaagctaaatattatttgtttgattatctgttctcacgactaggattttagtaaagtttgcatgattgagctgaaagtaatcaatctcttattgtgggtttcttgtttggttactgataatctagtagataagagtcttcctcgtaattgacccattggtttaagtttcatcttgaaatgtatgaagtgttcatcatgcagtaacattttggtcgaagtcttgttgtgtgttctgttttgttttgtattgattgaaaatg

SEQ ID NO: 16814 - DNA, 3000 bp, Unknown; identical to SEQ ID NO: 14479
  misc_feature (1)..( 3000): 2750-1469P.txt file - cDNA_ID_1694329; gDNA_ID_2684121; Annot_ID_190971

SEQ ID NO: 16815 - DNA, 2247 bp, Unknown
  misc_feature (1)..( 2247): 2750-1469P.txt file - cDNA_ID_1694338; gDNA_ID_1591461; Annot_ID_151016
aacttatcgattgtttttttttttgctacaacacatttggataatgagattggtaaaaatggatagggtacattttcaaatggaaccgaagttgcagtgaagagactgtcgaaaacatcagaacaaggtgacacagaattcaagaacgaggttgtagttgttgcaaatcttcggcacaaaaatctggttaggattcttggattttctatagaacgagaagaaaggatattggtctacgggtatgtagaaaataaaagccttgataacttcctatttggttagttgcatttgatgaattatttcaagtattcgttaaccagtcctgaaacatggttagagctaactactattcatggatgttcacagatcctgcaaagaaaggtcagttgtactggacacagcgataccatatcattgttgggattgctagagggatcctatatcttcatcaagattcacggctcacaatcatacaccgtgacctcaaagcgagtaacattctcctggatgctgatatgaatcctaaaattgctgattttggaatggcaaggatctttggaatggatcaaacccagcagaacacaagcagaatagttggtacctagtaagtcttccacttgactactctctcacatgttgaacattttattttgataacatattaaagtttttgatgtggatatccagcggttacatgtctcctgaatatgcgatgcgtggccagttctcaatgaaatctgatgtctatagtttcggagtgttagttcttgagattataagcggtaggaagaacaacagctttaacgagacagatgacgcacaggacttggtgacacatgtaagtttaaaggaaaggagttatatatatgtacctctcctcatcctacaataagcaatagttgcaataactgtttgactgattgattctaggcttggaggctttggagaaacggaacagcgttagacctcgtggatccattcattgcagatagttgccggaagagtgaagtggttcgatgcatccatatcggtcttttatgtgttcaagaagatcctgtaaaacgtccagccatgtcaaccatttccgtgatgctcactagtaatacaatggctttaccagcgcctcagcaaccagggttttttgttaggagtagacctggaacaaaccggcttgattcagatcaatcaacgaccaacaagtctgttacagtatctattgacgattcatcgatgtctgatttagatcctcgttgaatatggtgttattatatcttacgattgaaatcaagtttaattaagcctatatttacatatttctaaacttgatgaaccatgttgatcctttagtttagatttggtttgttaaaaccacatgtaatttggtttgattttttttccaagaataatcaatttagtctcagctatcagcatcaccaccgattgaaaaattcattacctaaatgagaaggagatgacacttagaatgttggcattagagtttggttcatttcaacaaaagaatcgctttagccatacctccaatgattttgtgccatttgattttgaaaacagagggaaaacagagtacagtgggatggtgatttgcatgatttgtaaagtggtgaaataaatgatatgtgaaccatctaacacgtcaaagtttttttctttctttcgttgtaaagtaaactagttgaatttctaagttttgacgcctatcaatctatttccgagaaagatataaaataaaaatattggagttgaatattatgtaataggttgatgattattctgcttggcgccgagactttgggttaataagacagtaccgttaaacttccttaacagacaagtaacaaacgaacagttattaagtaaaaacagtaattacacaaccgtagtttgattcagaatcagaaccaatcaacacgctcagtggcaggttaacttgtaaagattatctttgaatttttattttagggctcttccttgtttaactttacaactgtgtattagatttttaaagtcattttttgaaacaaggaactttacttagatcagtcccaatctctcttttcctcacaatttacgacatttaaaagaaaaaaatcgcttacattgactactgacttagtcgtaacaaaccatcgtatacttcacgttactcagtactagtcagagagagtataatggaagctccacgatgtgaaactcaaatcaaggaactcgagaaaaaacaaaaccatg

SEQ ID NO: 16816 - DNA, 74 bp, Unknown
  misc_feature (1)..( 74): 2750-1469P.txt file - cDNA_ID_1694368; gDNA_ID_1591467; Annot_ID_151033
ccmacgttatgcdctagaaagagattgrctcacttaaatgatcaatccattttcccgacgatttgacagtaatg

SEQ ID NO: 16817 - DNA, 1558 bp, Unknown; identical to SEQ ID NO: 500
  misc_feature (1)..( 1558): 2750-1469P.txt file - cDNA_ID_1694410; gDNA_ID_1591485; Annot_ID_151046
  misc_feature (1261)..(1261): n is a, c, g, or t
  misc_feature (1284)..(1284): n is a, c, g, or t

SEQ ID NO: 16818 - DNA, 2832 bp, Unknown; identical to SEQ ID NO: 502
  misc_feature (1)..( 2832): 2750-1469P.txt file - cDNA_ID_1694416; gDNA_ID_1591490; Annot_ID_151052
  misc_feature (8)..(8): n is a, c, g, or t
  misc_feature (353)..(354): n is a, c, g, or t
  misc_feature (1176)..(1176): n is a, c, g, or t
  misc_feature (1192)..(1192): n is a, c, g, or t

SEQ ID NO: 16819 - DNA, 25 bp, Unknown
  misc_feature (1)..( 25): 2750-1469P.txt file - cDNA_ID_1694566; gDNA_ID_1591526; Annot_ID_151114
cagcaacagccaacagaagaaaatg

SEQ ID NO: 16820 - DNA, 948 bp, Unknown; identical to SEQ ID NO: 512
  misc_feature (1)..( 948): 2750-1469P.txt file - cDNA_ID_1694638; gDNA_ID_1591549; Annot_ID_151148

SEQ ID NO: 16821 - DNA, 858 bp, Unknown; identical to SEQ ID NO: 517
  misc_feature (1)..( 858): 2750-1469P.txt file - cDNA_ID_1694796; gDNA_ID_1591582; Annot_ID_151212

SEQ ID NO: 16822 - DNA, 3 bp, Unknown
  misc_feature (1)..( 3): 2750-1469P.txt file - cDNA_ID_1694803; gDNA_ID_1591585; Annot_ID_151218
gga

SEQ ID NO: 16823 - DNA, 336 bp, Unknown; identical to SEQ ID NO: 519
  misc_feature (1)..( 336): 2750-1469P.txt file - cDNA_ID_1694818; gDNA_ID_1591589; Annot_ID_151227

SEQ ID NO: 16824 - DNA, 16 bp, Unknown
  misc_feature (1)..( 16): 2750-1469P.txt file - cDNA_ID_1694927; gDNA_ID_1591617; Annot_ID_151270
kggtaaggctgaaatg

SEQ ID NO: 16825 - DNA, 2128 bp, Unknown; identical to SEQ ID NO: 524
  misc_feature (1)..( 2128): 2750-1469P.txt file - cDNA_ID_1695023; gDNA_ID_1591639; Annot_ID_151305

SEQ ID NO: 16826 - DNA, 2088 bp, Unknown; identical to SEQ ID NO: 525
  misc_feature (1)..( 2088): 2750-1469P.txt file - cDNA_ID_1695097; gDNA_ID_1591653; Annot_ID_151332

SEQ ID NO: 16827 - DNA, 121 bp, Unknown; identical to SEQ ID NO: 526
  misc_feature (1)..( 121): 2750-1469P.txt file - cDNA_ID_1695124; gDNA_ID_1591660; Annot_ID_151346

SEQ ID NO: 16828 - DNA, 1028 bp, Unknown; identical to SEQ ID NO: 531
  misc_feature (1)..( 1028): 2750-1469P.txt file - cDNA_ID_1695180; gDNA_ID_1591679; Annot_ID_151381
  misc_feature (4)..(4): n is a, c, g, or t
  misc_feature (22)..(22): n is a, c, g, or t
  misc_feature (25)..(25): n is a, c, g, or t

SEQ ID NO: 16829 - DNA, 17 bp, Unknown
  misc_feature (1)..( 17): 2750-1469P.txt file - cDNA_ID_1695405; gDNA_ID_1591755; Annot_ID_151471
attattatcagaaaatg

SEQ ID NO: 16830 - DNA, 498 bp, Unknown; identical to SEQ ID NO: 539
  misc_feature (1)..( 498): 2750-1469P.txt file - cDNA_ID_1695417; gDNA_ID_1591762; Annot_ID_151476
  misc_feature (32)..(32): n is a, c, g, or t

SEQ ID NO: 16831 - DNA, 18 bp, Unknown
  misc_feature (1)..( 18): 2750-1469P.txt file - cDNA_ID_1695476; gDNA_ID_1591793; Annot_ID_151514
gtcatcaagaaagaaatg

SEQ ID NO: 16832 - DNA, 76 bp, Unknown; identical to SEQ ID NO: 546
  misc_feature (1)..( 76): 2750-1469P.txt file - cDNA_ID_1695594; gDNA_ID_1591833; Annot_ID_151567

SEQ ID NO: 16833 - DNA, 173 bp, Unknown; identical to SEQ ID NO: 550
  misc_feature (1)..( 173): 2750-1469P.txt file - cDNA_ID_1695743; gDNA_ID_1591866; Annot_ID_151626

SEQ ID NO: 16834 - DNA, 159 bp, Unknown
  misc_feature (1)..( 159): 2750-1469P.txt file - cDNA_ID_1695799; gDNA_ID_1591884; Annot_ID_151649
taccgagtaagtaaagtactagatgcagtcttcttcatcaatggaggtttttgattcgccccaagctctcgcgattcctgatgttcttcagtaatttcttgcaatccttataaacaaagagcgtggagaatcgtttcagaggaaagaaaactaaaaatg

SEQ ID NO: 16835 - DNA, 3000 bp, Unknown; identical to SEQ ID NO: 557
  misc_feature (1)..( 3000): 2750-1469P.txt file - cDNA_ID_1695956; gDNA_ID_1591939; Annot_ID_151733

SEQ ID NO: 16836 - DNA, 3 bp, Unknown
  misc_feature (1)..( 3): 2750-1469P.txt file - cDNA_ID_1696080; gDNA_ID_1591976; Annot_ID_151782
car

SEQ ID NO: 16837 - DNA, 2585 bp, Unknown
  misc_feature (1)..( 2585): 2750-1469P.txt file - cDNA_ID_1696143; gDNA_ID_1591990; Annot_ID_151805
  misc_feature (50)..(50): n is a, c, g, or t
gatttgtcattyttattkgctaggtcgtcaagggtgtagtggaaagtctnaaaattattacccgtaaggcgagtatgagagttgccgagtatgcctttctttatgccaagactcacggaaggaagaaagtttctgcaattcacaaagccaacattatgcagaaaactgatggtcttttcctgcaggtcagctcattttggaactcagaatacattagcacttctcaattaggggaacatagcaatttttctagtctctcactggcttctttttcttaacctttgttctgagacaagtttttatttgcttcctgctttgcagtgttgtgatgaagttgctgcgaagtatcctgagatatattacgagaaggttgttattgacaattgctgtatgatggtaagctataacatgatatccaccctatcttttgttccaaattatgtaaaggtcaatctcattgttaattaagttagtatttgggataatcttgttgattttgaaggttagatttcccagcaacccatacttgggtctgcttttcgctaattttacttatggaacaatgtgggattgataatccttaattctgacagcttgtgaaaaacccagcactttttgatgtcttggtgatgccaaatctctatggagatattatcagcgatttgtgtgctggacttgttgggggactaggactgactcctaggtaacatttgtttcttcgtctcacagattattgtctagtatgaaaatgaggcaatcatcttatgctcttattatgttttgttccagtatgaatattggggaggatggtattgcccttgctgaagctgttcacggctctgcacctgatattgctggaatggttagtcatcattcttagatgttatcatcgttctaaattcgtttgatgcatagagttgttgttaacttgttaaattattagagtaaataggatttagacactgcattacagattttgacaaatttaagtgaacttgcctacttttaccctaaaactaagtatgatagaagctgttcctgagagaagattctccattactctcttctatgccatttcttggttgaacattcagaagctttcattgtagaatggattattgtctagtttatattgtagaatggttcttactggatgatcgtgcttgtagtacttgaatgatgttaataactggccaacctagcattgagggttaaggagtctaataaataaatcatgttttcaaatacagtgggtttagatattatcttgccactattcaatatcagaacttgattcgatttttagcttatgatccacatgtttgttattctttgctggtgttgtgtagaacctggcgaacccaacagctttgctactgagtggagtgatgatgttgcggcacctgaagctcaacaaacaagcagagcaaatccacagtgccatcatcaacacaatagccgagggaaagtatagaactgctgatctcggaggttcctcaactacaacagatttcacaaaagccatctgtgatcatctctaaacacccgtgaaaaaccataattctttccttacttacttattggatcttcctcttggattttcactccaaaatttttctacatattgatcctcttcctatgaggagaaacaaagccgccataggctttagacattgacttgtgttttccttagatttgaagttcttgcagagctgtattacttcttctgcctttaagatccataacaaaagaaggatacagatattggaagaatccatcaaaaggttcacatttacagtttgtggattttgcctgaattgtttggcgttatgtcttattctctgtgaattttcaacaataataatatcgtcccttttgtccttacctaaattgtttgcctattctctgtgaatgaatacatataactctcaaaccctgaaaagtgaaaactttcaatgctgaaacaaaccaacgtggatgattcaggacttttcaatgccaccgacaaattcaatctttttcctattcattttgtaagttgcaatgctgtcacatttggttttctcattgtttttaactctctcttaaagaaacaacttaattagaatttttatgttcttacaacaagatccaatagacttttggacatgtgttgacacttttctcaagtgggttggtgggataggaacttaatatagctgcattagacaacaaaactactctatttcatcaatgattttgttactcataaattttgtttcagttaacttttctctacaaatgaagttgaatgaaatgaactatactaaaatttggttgaatatagaaattccaatggcaaatttatgcatgattttgagctaatatataaatatacatcattttgcccaaaaaaggataaatatgctttaaaaataatatatataaaataataggaagaagaagaatctatctttggtatacctactttggtttcagagcttataaacacaaacacttcactcacacaaaacacttgctcctccatttaccagatctgaacctcttccctttcctcgaaaatccttctcacatcatcatccatg

SEQ ID NO: 16838 - DNA, 284 bp, Unknown; identical to SEQ ID NO: 571
  misc_feature (1)..( 284): 2750-1469P.txt file - cDNA_ID_1696306; gDNA_ID_1592018; Annot_ID_151852

SEQ ID NO: 16839 - DNA, 1747 bp, Unknown; identical to SEQ ID NO: 572
  misc_feature (1)..( 1747): 2750-1469P.txt file - cDNA_ID_1696402; gDNA_ID_1592038; Annot_ID_151886

SEQ ID NO: 16840 - DNA, 204 bp, Unknown; identical to SEQ ID NO: 573
  misc_feature (1)..( 204): 2750-1469P.txt file - cDNA_ID_1696416; gDNA_ID_1592044; Annot_ID_151891

SEQ ID NO: 16841 - DNA, 285 bp, Unknown; identical to SEQ ID NO: 574
  misc_feature (1)..( 285): 2750-1469P.txt file - cDNA_ID_1696434; gDNA_ID_1592049; Annot_ID_151899

SEQ ID NO: 16842 - DNA, 3000 bp, Unknown; identical to SEQ ID NO: 9346
  misc_feature (1)..( 3000): 2750-1469P.txt file - cDNA_ID_1696434; gDNA_ID_1972097; Annot_ID_178622

SEQ ID NO: 16843 - DNA, 44 bp, Unknown; identical to SEQ ID NO: 575
  misc_feature (1)..( 44): 2750-1469P.txt file - cDNA_ID_1696439; gDNA_ID_1592050; Annot_ID_151901

SEQ ID NO: 16844 - DNA, 1775 bp, Unknown; identical to SEQ ID NO: 577
  misc_feature (1)..( 1775): 2750-1469P.txt file - cDNA_ID_1696594; gDNA_ID_1592089; Annot_ID_151948

SEQ ID NO: 16845 - DNA, 810 bp, Unknown; identical to SEQ ID NO: 463
  misc_feature (1)..( 810): 2750-1469P.txt file - cDNA_ID_1709992; gDNA_ID_1591235; Annot_ID_150700

SEQ ID NO: 16846 - DNA, 1618 bp, Unknown; identical to SEQ ID NO: 224
  misc_feature (1)..( 1618): 2750-1469P.txt file - cDNA_ID_1710110; gDNA_ID_30980; Annot_ID_146890

SEQ ID NO: 16847 - DNA, 3000 bp, Unknown; identical to SEQ ID NO: 6558
  misc_feature (1)..( 3000): 2750-1469P.txt file - cDNA_ID_1710920; gDNA_ID_1621097; Annot_ID_55735

SEQ ID NO: 16848 - DNA, 3000 bp, Unknown; identical to SEQ ID NO: 6558
  misc_feature (1)..( 3000): 2750-1469P.txt file - cDNA_ID_1710920; gDNA_ID_2926165; Annot_ID_139877

SEQ ID NO: 16849 - DNA, 129 bp, Unknown; identical to SEQ ID NO: 201
  misc_feature (1)..( 129): 2750-1469P.txt file - cDNA_ID_1710974; gDNA_ID_28160; Annot_ID_146657

SEQ ID NO: 16850 - DNA, 351 bp, Unknown; identical to SEQ ID NO: 434
  misc_feature (1)..( 351): 2750-1469P.txt file - cDNA_ID_1711067; gDNA_ID_1590986; Annot_ID_150363
  misc_feature (73)..(73): n is a, c, g, or t

SEQ ID NO: 16851 - DNA, 3003 bp, Unknown
  misc_feature (1)..( 3003): 2750-1469P.txt file - cDNA_ID_1711228; gDNA_ID_2214487; Annot_ID_133393
ccggaggaatgatcagatgggttttgaagataagaaacaaagattgagtttttgtgggttatgttgcttgaggtgggtgagagattatggcagcttaaccgccgaaacgagagagagagggaaaatttggagattacaaaaaggtttttcgttgtaaaaagagaaaagagagactcggagacattgctaacaccgcaagccattccctttttcaatgtcatcattttaactaaaagtgctaagagaaaattacgaaaaagggcttggagcaaaaagaaaggtacccataacctacccatatggagcgaatcatgatccaaattagtcatttgttacttacataatttcccgaaaataaactttagtttttataagaatttgttagtgctaaacataaattatttaaaaagaactataaacatttttagtcatgtgtataacccctacttgtaatactatatttgtatgcttaagtcatctaatgagaacttactctgcttaatcttctactactagctactaaaacaaaaaacttctactacttgtaatattatatcatatacattttgcacaaatatggagtataaaactagaagttaaagtttggatcattgaatgagcatttgaagacttctattataaaatagaaatgcgttacagtttagatagcgttaaagtttgaatcattgaatgagaatttggtcgtttgcgaggaaatagacttgttgagttggctacatatttattggagaacaaaactcccataaatgaggcatcaatacatacgtaacacttgtactcaaactctatagctgtgatttgtttttgtttttgacaccaactatatatgaatgatgatggtacaattcaaagattttcataatgaatctagtaaagcggaagtgtatgtattgccgtaatggtgtgcctctcgcatccttgatctatacaatcaagtttgatgttacaagagttgcataatatcttccatctacacacgctgcgtagtgtgtgcgcgtgtgggtgaatgtattcatacatctatatcttacactacttgaggacttgcacacatgcatgtggatgtgtgacttactccatcctcgtttaggcatatatacacaataataaatcatgcacaagcattttagatctgtgcttctagagttttggatctggctcccattaaccaaagcaatttatcaactcgaattcttttgtcgtttttcttgatactaacatataaatacattttatttataaactacagttcagacatatggatcgaagatccacagtactactccagtactccatacaagctaatacacagtattagaagtaatcaattcttatggtccttggtaggtatagtattattaaataagtgatgcgattagatcaatgcatgacttttagctggtcgtctatttatggatgctacctaaacataaatttaatcacatgtcatttattatttattattactcctaaattgttctgtccattaaatattttataagttgttacttgctactcctatcaaccattaatggtaatctttgacgcagattctatgagctatactattgcattgttttccatcatatattatcaatcacaagtaactcttcacaaaaaatggcggtcaataaagtgacacttacaaaactcaatggtttaaataaaaactacaacattgctgaaaaatatacataaattttaaacacgaaattggttaacaaaacaaaattggcggtcatctcatgtttttttttatatcatagtaaatctcgaaatgtgctttgattaaagatcagaccatcgaatggtgcactagcattctcatataatttgacatataaaatagtataagtaacaatatactaatatagtagtagtatattaatcatttgcataaatataaaacaagaattggtccaatgacccatcgatggcatcaatgccttgttcttggatgaaacgtggcatatacagtacggtgtcggattaagacatgataccataattagatatcgtatttttcgaaaacgtcaatatgttgttagttgattttatgagaggcaggtttttccaataagataatctttcttttatttaatcagaatccaactcattgactttgcaattgctgataatttattcacgatagaagagtattgatctgaagcaattacatagtgataaatctagtagtcattctaaattattaagatataaaatcaccaaactggaaattgcttcttctttttcttgttaacatcaaattggaaatagctataagagaagagtatagctaggaggacccatcacccatccatgatcaggctttaaatataatttcgatcccttcatgctgatggaccacactcttcccatggttttggataatattctagttatagtccatatcacattttacaccaaaaaacaattcttaagatttcaaaaaccattttacatttgagcccatgattattatatgtaaacaaaggttcagaatcatgcaagttaagatcaagtaatatcaccaagctctacgtttattcaacacaacattggaccttaagaaatctttatgatcttgtaaggtgaattatggattcatactaattaactaaaagagagtttgtatacgcgctaagttatcaaatttagagaacacaaacaacaaatgaacaaacacatttgtttggaaatctctaggcccaaaccaaacccattgaaagcccataagctcaacatcactgatctatttcttagtattgggctaatatagtcatatgtcaccaaagtccaaacaaagaaaaatcttcaagccgacaacccgatttccataaccggatagaccggattgtgggtaaggagtttatgcgggttgacccgatttcacaagcgtatctgtcttgtttaatttcgttactcgtcgtcgtcccttaactcgagaaaaattagggttacggattccgattagcaagcatg

SEQ ID NO: 16852 - DNA, 3003 bp, Unknown; identical to SEQ ID NO: 16851
  misc_feature (1)..( 3003): 2750-1469P.txt file - cDNA_ID_1711228; gDNA_ID_2214487; Annot_ID_183550

SEQ ID NO: 16853 - DNA, 3003 bp, Unknown
  misc_feature (1)..( 3003): 2750-1469P.txt file - cDNA_ID_1711638; gDNA_ID_2936569; Annot_ID_194718
tattttctcacgtagtagagatttgtgttttgtttactaatctagtcaaaacacattaattttgactaataaactaacttcaataattccaccaccactagacttttacgctccttttatatgatatgctcgaatttcaagtctcgtgaacttttacgatttcaagaaagatttgtatacaaaaatgggcttcatctagaaagaaagagttgggtaatggtattactcaaatcagagaatattacacgactacacgtaatcttgaaaatgacatgtgaattgattccttggaatgacgacatgttatgttaatatgtaccattcgatcagatttttcttcttctttcactttttcgttttctcaatcataaaaacgattaatgcaatcattaaaaatatactggcatgttaactaacaaagaaatgaatgcttagcccgttcgagaaaaagaatgatcctaaaagacaccaatacaaaattaggcatggttggtcacaagaattgttgttggatatcacatatccatccatattagtaaaaaccaatctatacatctgtggtttttttaaagaattgacaagtttttgtttctgttttttggtaatgaaatcgaacaaattcaaagaattgtgaagttaataactcccaaaacacttactgcttctgtacatgttcatccttctggatgtccccatgagaagtattgttcatgttggccgtatcttgattaagcagattagagaatccatttccaatcgatttccaccagctcgaccgctctgaggtagtttgatcccactggtcattactggtgcttgaggacagttcgatagatgtggctgactcggtctgcagctcagagaatctcacagctcctagtagcttttctggaagctctgcttcggtctgactctcaatgaggaacgcaagatcaactgtcaatgtagtaacgtagccaaatgcgagatgaacaatggcactagcgaccattgaagaaccaatatcgacatcaatctccacaaagttttcccctgaaacatatttgcaagagagtgcacgtccaatcacacagatcgcttgctctccaacagcttttctaacaatccaagggcctttgacaatgtttgcaatcagtttaagcctcgatttcttgaacccatcatctcctttcaaaaaccgatccatcagggagccttcaaggataggctctgtggtaacaaagtaagccacagcactgtaattgtctttgtgaggaagctggagattgaatgcccagacaaaaggcttagttccatctttttgaaactcctcatcgataactttcctgattcggctgcttggataactcaggatctcagaaagctttttaggacctttaatccaatcaaaacccagaggctttagaaggaaatcaccagcaggtatcttaactttgtcagagaaatactttggtcctctaaccataaatgtgtcaggagatggcgtcgtccaaccatttttgcagttgtcgtctggcttaagacatggaacagctccctctaatttcactctcttaatccattctggctcagtttcctcaccaacagagccagccatatcttgcgaaaacctgcaacacagagcttaaatccttgagtaaaactgagtgtggaaaacaatctcatggattctacttagtgaatatagcaaacaagaatatgccatcaagaagaccaaaacatgtgatcagaaaacagaaccatgtatgtctgaggctctatctattcctcatctaatttcccataggattcatactatgccacaagaactttttaaaagaaaagagtgaaacaaaaattgctcaaagaaacaaaaactaggagctggtaactccggttcaagtcatagctacaccggaaactagaataaagttagtaaattgactcaaattctgagtaatgacatcaaaattcagcatacacgattctgagattttctacaaacctaagccctagattatctgaaataacatgcataccattcaatagacaaagcacagagacagagcccagataattgaattttacattcatctacaacacataagaagaaacggaaaaaaaaacgtttttttttatcaacagagcaatcaaaacccagaaacgattaacaagtttcagaggttcaagaggaatcagctacaataataaaaaggaaaaaatcaaagttgagagatacaaataacaaaagactaattcaatcgcaggacaaggagcaaacaataaaccttttgcagccgaagaagagaagaattgtccaaaaaccctaattcaaaaacgaagacttgtcaagggaaaagaaacaaagaagataatccgattttgctaatcttcttttgttgtttggatttagcgttgaaacggatgctgcgaacagatcctaaattcttccgtggcgtaacgctttagttcatatctaattaattaaacttccaactggaaataaggtccaagtccaactagtaattattattaatagaattcaaaataaaaataatattattagtttggatttaacaaaaatttatgattattatgacaaaaaaaatatatgattatttactatgaatattataaaataaaactatataccatatgattttttccctaatcaagtatgagattatataattcaaactataagatttttttcccttaatttttacacctaatcaagtaaaaaggaaaaaaattagaaaaagaaaaagaaaagtaatgttagtttttactttttcctatttttttttgtcaaaaatcgtcaaaataaccaaaaaacattaaaaaaaaatccaaattaaaataaataaaagaacttttgttttgggctttccacatcgtaaactataatcggcgtctctccggactcacacctcatcgaaatttggccatctcatctggcttcttcccctccggcgttggataaccatcattacttctcgcgccggcttcgagtggaacaatatg

SEQ ID NO: 16854 - DNA, 403 bp, Unknown; identical to SEQ ID NO: 620
  misc_feature (1)..( 403): 2750-1469P.txt file - cDNA_ID_1711751; gDNA_ID_1592442; Annot_ID_152473

SEQ ID NO: 16855 - DNA, 3000 bp, Unknown; identical to SEQ ID NO: 1944
  misc_feature (1)..( 3000): 2750-1469P.txt file - cDNA_ID_1712019; gDNA_ID_1620472; Annot_ID_158034

SEQ ID NO: 16856 - DNA, 3003 bp, Unknown
  misc_feature (1)..( 3003): 2750-1469P.txt file - cDNA_ID_1712051; gDNA_ID_1620362; Annot_ID_154679
cagtcaacggacaaaacgttgactatttttattgacgccgtggtggatctctgtctttaaccggtatttaaccgcgaaccaggttggtaggccgggttgggttttaagagaattcatgcacttacgaaatttattaatttacctagttaaataaactaaatttggatgtcttttgaatgaaacataatcccaacatatggcagataatgaattcatgaatctttgaatgaaacataattccaatatgtatatgtatgtatgtctatataaatgtacacccaagaccaccacaaatcattctcaataagtattaaaatattacaaatacaaaaggtaagttaaattacaaatatttagaatatgctcctcttatactagattttcgtttttgttttaacaataactttgaaactcgattttagtaggttttgctttttcctgagacttaaatactatagtttgagaaggagttatagaatcctctacaaaaataacaaatgacaaccaaaatggtttcatctcatcgactactcacgttgatggtgtttgctctcctcctcatacctatgatttctggtaacatgtttatttgttatatatattatattttttttcaatatttgttcattttttatcttaaaaataaaactctaaaatattaaattggacatttttgcttttaaattttttgttgatgaatttgtttatgaaccgaataggacaatcatcaaaatgtacaaaaggatgtacgagcacaccagaatgcaatataaaatgcatgaagaaaggcggagggcattgtcaagcatatataggcagaagtcacggccgattggctattgaaaattattgttgctgcaataattattcaaattctcccatctccagtccggtcatgaattgattgatctcttattctatatgtactctcgattataagaatcaaaaacgtatgttcaaataataataactgatattatctcatccccccccctctcatcatgttgtttgatgtacatgtataagaaaactacatcgatcggctcgacttatagttttgtttattgtgtcatcaggacatcgattttgtcttacctctctaatcttcgcaaccaaaaaaactacttctttcaatgttcacttccaaagatgattttgtaaatacgaaaacttatgcatgaaactgtaaatacaaaatcaatcgccaagcataatataagatcatgtatttactctttttatatcaaggtacatatatatttctgagattcctacgttttcatggaatatagaaataaattgactatatatatatacaataagataatattttggggtgttttctttatatgtagagaggatgtgcgagtgggggggagggaagaaggaagagttccttcgacggcggaggagttcacaagacaaggtgttgctagccagacaatgatgataagagattgtagaaggtttatgacggagctgcagcggctgcaaacgtctctggtgattctgagatggaggtggagaaagtaaaccgaacttgtttaaaggaaacgaatatctagtttgttttgcacaagtacaaacgtcccatgtctttgaatcaaaattactgctagaaagaaaaaaaaaaaaatcgacaacatctccaaagttttatttcaaggacccgaaacgacaatgcctaacttccatggattggtggacaaggctaacgaaagaagaaaatattgattagtggagaaattggttgtcgttcccaaaaaaagttagtaactcttacgatatgagaagaaaattagtacctcttacattttttttaacaaagataaatgttgtgattagttctgtttgaaaggactaaacccttacatgaaaagtttaacatgttctacatagtttggatttgtcacttaaaataatattggtgcttaaactcttacttttgtgataatatttttctcgagattgtagtaaaagatgaagaaaggatatcttgtgtaatctggatacaacacaatctggatatcttattgtcaatctctatgtattgtgagaagttgatactaacaagatgatttgtgcaagtagatacaaatcttgcatgtgtaagttgatactcgacgataccttgaaactgattgactgtttgttgatcggatcataaccaaaaatttggataggcaacaacactgaactatagactttaccggctatctcgacaaaatgatcatcatgacgagatcaacatggatcataatcaaagtatacgtcgtcgtaccgttcaactgccaccgtatcctggagcttagcttcgagggtcgaaataaagtgctctatttctgtcttcttgagcttttaactcttccaattaccgaacaatttccgacgaatctccgacgtccgactccatcacgacaatgtttaaagagccaatagtagaaccctagaggttaaagcagcaaagaagacgatgtcagtcaacgggacaaaacgtacgttgactatttttattgtcattaaccggatttaaccgcgaaccagattggtagaccggttgggtttttaagagaattcatgaacttacgaatttatttatttacctattaaaataaactaaatttgaatgaaatataatcccaatgacagataagaataaataatgaaacattttgactaaaattattatctgacccaaataagactataaaaaagaagaaaaaatccttgaataatatggaagatttattatttacatatatatatatatatgtatatacgtatgtctatataaatgtacatccaagaccaccacaaatcattctcaataagtactgaaatattacaaatacaaaaggtaagtcaaaaataatataaaatatttagaatatgttactagatttttgtttttgttataacaataactttgaaattcgcttttaataggttttgagaagcaggtatagaatcatcttgaaagaataacaaataacaaccaaaatg

SEQ ID NO: 16857 - DNA, 3003 bp, Unknown
  misc_feature (1)..( 3003): 2750-1469P.txt file - cDNA_ID_1712122; gDNA_ID_1620526; Annot_ID_159579
cacttttgacttcacattcacaaagctatggatctttgcaaaagtagagcaacaaccaccattactctctcatgtctcatcttctttgtttcttcattctacacaatctccaccgctaaatctgtcacgaatccgctctatcaactccttctgttcatcggcttcttcctcgctgcagccttgtcgcttgttttactggtggcagcagcacgagccaccatggttgcgtggataacggtcctcgtcttactggccttttcgggtacacgtcgccgtgttttagcgcggagggggaagacgatcacggcggacgtggcgatgagcttgttcagggttctgattagagaagcaaatcctcgtggttagtctcatgaagattgtttgttgttagagagtatttacatatcacttttgtatataacaaaaatatatgtatttttgtgaatgatttttccccttttgtgtatttatttattcgaattttaattttaatatatacataatgtatgtgtgctttaaatgtttattcaatacttctatagttacaattttctatagaattaatctttagatgttaaaaaaatgttttaatctttctaatacgaaaaatatttattgagttatttcatatcataatcggggattctgatcgcaattttgatattaaaaatggttaaggaaataaaaccaaaaatgatcttaatttcctgccactgcatatttcactataaataaatgggatcagaaagtttacagttttcttctctactatactacaaaattagtttagctttctaaaataaaataaggaagaaaaccttaagtaaaaccaattacatgtctaaaatatacttacaaaagatcctcaattataaattttaaaaaggttgttgtaatatctcatatccatttagatgacgtcacatacaatttgctacctcttgtcactcatttaaacatacaatacgttgtactacgttgcgacactttcactagactggtgagatatttagaacaaatacgtcagcccgataagaaatatgttttatattcttttacacaaatctaagaatggatttgttaacttgagatatcttatggtttttgtttatgatttatatcataaacacgcttaagttacatcttcacgaagatacaaatctgaacaatgtagatgatgatatgatgcctcttttctcacgtcatggattgattctgcgattaaacgtaaggtacaacatcttcatgtttgttgtccttcagatggtatttgtaatatccccatgtttttctagctgcaagactcgggtatccttaaatctcgttgatgtgaccatggatgatgccgagttcgtttctttaccttatgctgttatgcatttgtaacgtatttggtctcccagtgaggccacctttgcaagacttgtctcttgctatcctgtattggaagagttaaatattgttgaatgttggaatcttccggaagtcattccggctgaatttttttgtcactgatcaagagactcaaaataaagctatgcgattctacggttgtacaagtacatataaagataaatatggagttgtgactgatgctcctcttttacgcgatttgtttattgatgatgaccaagctggaagttatttaataaacaatttgagttccactgccaagttaaatgtttatctcgcctttggtttggacagttttgatgaagcaacaagggtttcatcgaggagaagtagcatccacaattttctgctcgggatttcaaatgtcggggaaatgatcatatatctaaacactttaaagctatatatgtcatgtcaattccagtataagacatgtacgttctctatcatgattcatgaaagtttatgacctacattacttttctttttggttcgagatcatctatcaatactcaaaattagaaccgcttcctcggtttggttacatgtcccacatgtatgctgatatttatgtacctaattggaaatggttaaaaacatttcttgggagttgcccaaacttgaaaatccctcatcttggtaatgatctgctaaactctagctagtgtgaatcaactagtgttcatgtgttgttgtagcaaagcttctctgatgatgaaatgcaaagaagaagctacagaactaaagaagaacaatggaagcattataggtgtgtatagtactaatgaatctctttgcttttgaccacaaagcaacctacttggttcatgttacacaatcaaatttggttccaaatgtcacatataaataataattaagcataaaaattccctatttatagccaatatttgcttctgaatattactcaaattaaacctaaaactcagaagaatgttttgagaaacaaaagcaagaaattttgaaccatgtgatatgtttcaccaatcaatcatataaacttcttctggtttatctttttattatcctatcattaccactccatactcataactctctctgtctctctatctccctctccacatcaagaagaagtctctgctagttccaaaacagaacaagtgaatccctcaagtttcttattacaaaacccaaaaaccaaagtgaaccagtgttgttgtttgtactcacagatccattctccactgattcatttcttgctctgcttcttctctcttagttttgttaagaatcttctcttatccattgtgttttttctattttataaatacatatataattttagttgggggagagcttgcctggtgtcgccttcttctctctctaagacttgtgcttaatttacggacatgtgaagatacttcgcttttgcctcatcgaagggcatgttagctatttacttatctcttctcttctcttctttgtcttgtgagctctcaaatcttcatagatacaaatcaagaaagtgatcaaacaaaaaaaggacaagtctttttggtatttcagatcgagaaaaaatgtggttgcaaggtttgaagtaatcttgcaatg

SEQ ID NO: 16858 - DNA, 288 bp, Unknown; identical to SEQ ID NO: 84
  misc_feature (1)..( 288): 2750-1469P.txt file - cDNA_ID_1714593; gDNA_ID_2353; Annot_ID_145664

SEQ ID NO: 16859 - DNA, 3000 bp, Unknown; identical to SEQ ID NO: 4421
  misc_feature (1)..( 3000): 2750-1469P.txt file - cDNA_ID_1715104; gDNA_ID_1620705; Annot_ID_48855

SEQ ID NO: 16860 - DNA, 3000 bp, Unknown; identical to SEQ ID NO: 4421
  misc_feature (1)..( 3000): 2750-1469P.txt file - cDNA_ID_1715104; gDNA_ID_1620705; Annot_ID_165237

SEQ ID NO: 16861 - DNA, 3000 bp, Unknown; identical to SEQ ID NO: 4421
  misc_feature (1)..( 3000): 2750-1469P.txt file - cDNA_ID_1715104; gDNA_ID_2926196; Annot_ID_141266

SEQ ID NO: 16862 - DNA, 3000 bp, Unknown; identical to SEQ ID NO: 4421
  misc_feature (1)..( 3000): 2750-1469P.txt file - cDNA_ID_1715104; gDNA_ID_2926196; Annot_ID_201446

SEQ ID NO: 16863 - DNA, 3000 bp, Unknown; identical to SEQ ID NO: 7153
  misc_feature (1)..( 3000): 2750-1469P.txt file - cDNA_ID_1715200; gDNA_ID_1621129; Annot_ID_172422

SEQ ID NO: 16864 - DNA, 3000 bp, Unknown; identical to SEQ ID NO: 960
  misc_feature (1)..( 3000): 2750-1469P.txt file - cDNA_ID_1715364; gDNA_ID_1620342; Annot_ID_153999

SEQ ID NO: 16865 - DNA, 3003 bp, Unknown
  misc_feature (1)..( 3003): 2750-1469P.txt file - cDNA_ID_1715608; gDNA_ID_2213642; Annot_ID_132285
actaagaatgtgactgaacaagtaagactacttgcaatggatgaagacgagaacctcactgagccatacgatataattcctccatatgatcaagcaaaagcccttggcaagacaaacattgacagtgatcggattgcttctggattaccatgtggtagtgaaggattccttctgatgtttgctcggtggataaaacttgctagggatctctacaatgaaagaaaagagtaagtttatcatcggatttggattttagcgatgcttctcaaaattttcatctctttgtttccagtaaagttttgtgagtagcactgatagttaattttaattgcagccgatttgacatcacacagattccggatgtttacgattcatgcaagtaagttgtttttagtgtatctctagatttacacctagctttagttactcgtttttgaataagccgtaatatgttattctcaccaggtacgacctgttacataattcccatctcgatctaaaaggattagatgaactcttcaaagtagcacaggtaaacaaactgaaattcctccttccctttcctgaaactttaatcatagtttgcactgaaacaatgaactttcttgttacatctctaaaatgtatggttgactgtgctcgcttatagctaagttatgtgttatgtggttgcagttacttgcagatggtgtaatcccaaatgagtatggcatcaatccgcaacaaaagcttaaaatcggttcaaaggtgacaatctaagataagagtagttattttcctctctaacaattgtttttccaggggatctcacaacttatcatttctataatttttttccaataaaacaaaagattgctcggcgcttaatggggaaaatcttgatagacttgaggaatactcgagaagaagcactgagcgttgccgagttgaaagaaagccaagaacaagtcttgtcattatccgcctcgcaaagggaagatagaaatagtcaaccgaagctatttatcaatagcgatgaattgagacgacctggcacaggtgataaagatgaagatgatgataaagaaaccaaataccgattagatccaaagtaatagtctttactttctctctcactcttatatagatagttatttcggctactaattggtggttttcatttcgcttttaggtatgcaaatgtgaagacacctgaacgtcatgtgaggactcgactttacttcacatctgtaagtttcctctttgctccattgcttgtttaagtctgtctatgagtgaaactataatgtttatgcctggtatgatttggaacaggaatcgcatattcattcgctcatgaacgtccttcgatactgtaaccttgatgaatctctcctaggagaagaaagcctcatttgccaaaacgccttagaacgtctctgtaaaaccaaggaactcgattacatgagttacattgtcctaaggctctttgagaacaccgaggtttaacattacattccctttgactctcacacatgcttcaatatatgtatatgctctctcagtgtctgactctagacgtaaaaaacggatgcaggtatcacttgaagacccgaaaagattccgcattgaacttacatttagccgtggagctgatttgtctcccttaagggtaagagcaaaggatgtctttaactaattagaggaacatattataaacttttggtaatattgaaacatgatgcagaataatgacgacgaggcagagacattgctaagggaacacacacttccgataatgggaccagagaggcttcaagaagtaggttcttgtttaagcttggagacaatggagaaaatggttcgtccatttgctatgccggcggaagatttccctccggcgtccactccggttggtttctcgggttacttctcaaaaagtgctgcggtgctggagcgactcgtaaacctcttccacaactataagaactcttcttctaatggaaggagctaagcagagaccaattgttttttccacttatatatattttgctcatgcttttttctatgtgcagtttttaatcatcttcttgtttttctactgatgttttaattttctatgtgaaattgtgaaagggactagtgcagttgggtttgaataaagatatgattacatggaacataaatgagtcacccgtgacgttgtctagtgtttacaataggactcatctattataactcaagaaatgatgatgagtcttattgtaaacactgtgttttcatatcatgctgttacgttaaagttgttgcggatttgttggaatttatatataatctgcaaaagaataggctgatgatatcggataaacaaataccgaatctaaaacaatctaataatcggtggatttttcgttttgggaaaatctcaagacattaaattgataattgaaatacaaattattattattagtaagaatagtactaattgattggaaattgtaataaacgacttaatatacaaactgaaaaataacaaatgatcatgaaaaacattttaaaaaatgaccaaatgaaggagatacatagatagttttatcaaattttaaaaaatgttggtaatgcaattagggaacatttgtccgtgaaggaattaattagtctctgtttaaaaaactacgaaaaatgcgttttgtaactgttgttgagaagagaagagagagttagcaaacaaacacatatatatttacattattattgcccaacaaatctctctctcttgcccgcttcgtgcccgtctcttctctcttcttcgtattctctctccacagacatgaattccctttttgactaacctcctttttcccctaataagtgaatcttacttcttcttctcgccaagatcaaatttctgggattcttcttcttctctctaattcccttgcgtttgtttcctctgatcaagttccgtcctttttcctttttttgttcttgagttctcgtttgagctgctttttgggggagatg

SEQ ID NO: 16866 - DNA, 3003 bp, Unknown; identical to SEQ ID NO: 16865
  misc_feature (1)..( 3003): 2750-1469P.txt file - cDNA_ID_1715608; gDNA_ID_2213642; Annot_ID_181286

SEQ ID NO: 16867 - DNA, 3003 bp, Unknown; identical to SEQ ID NO: 16865
  misc_feature (1)..( 3003): 2750-1469P.txt file - cDNA_ID_1715608; gDNA_ID_1972053; Annot_ID_178371

SEQ ID NO: 16868 - DNA, 3003 bp, Unknown
  misc_feature (1)..( 3003): 2750-1469P.txt file - cDNA_ID_1715684; gDNA_ID_1620806; Annot_ID_168861
aattagataaggccaaagatctcatcaatcacgagcatctctgatacgattgatgtatcaagaagaatgtgaatgagagaaagcaaaagaagacacgtgcaagtgaggaggcacgtgagaagaaacttgcttgaagaagaagatatttttaggatctaaaaatatcttgaacaaactcagttcgagtataaataatggctctgaatgtttagagaggtttatgttgtttgttgttgaatggtatgagagacttaagagcagagctagtgatgtgctagtctctctcgtatggtgtattgagagctgagctagtgatgtgctagtctctctcgtgtttggtgtgttagtgagtactggtttggttaaggaataaaggtatcgatattgaaaacttaacaatctcgaaacacttgtaaattgaagaaacctctcaaagtctacaaaaatgctactgagagtgaaatcaatatcagaagaaacaacaaccattttccactgattaaaagataagtttttaatataccttttgaacagacaagactgatctatcgtgctcttcattttcaaggtgagattttgtagaaaacgaaaggcataacacgttagaaacagatcgatcatatccaattaaaattgcaagattcttagataaatggtacaagaaatctaaaagaaacctgcactcgctagacatctagattcagatgcaaaacaaagcgcaaaagtaagagcaaacgtagttatcggaggatccaagtctcttcaagatgataggaaaaatgcaacgcaactcacaatagctgcaaaatggacgagatgcactattattgagcaccacctcatatgatttttcccaagggtttattgtgcttcttggcatgagcaatgaaagggctccgaccacacactctatatgcaaactagcctggtagtctttacacgtgtagaaccatatctctggattggtttctttttcacaaatatcacaccaatatttaccactagccttttcgccatagcatagtgagagaggatggtcgtcaactctatgctttaccacttgtggaaaagttgcgcatttgaagcatatggcaaatctgcaatcatcttcaatgcatcctagcacatcatagaaaccatttttgcagccattgcaaatcttaatccctccatctggtaaagtgtgatataagggatgatcgggatgactcggatgaagaaatggctcagcaattgaaccgcaccgaacatcgaatgtgatgtttccttgatggtatctgaaaccattggaccatctatcacaagcataacacctaaagggttcagcttcgtttataacaagagtaagacgttcattgtgtagcacatgccatttcattctacgaaatccagcgcagttttggtggagaatgaagtcacaatccatacagccgtaaaaggactggagacagatgggatgggtgcatgcactgcaccacttgttgtcgtcacaaagaacaccattaacatggagtcgtaggtaatgctctttgtggctgaaatgttgtattgtgttttcatctattaccacatatggttgtatatcttctgtttcttcgggtactccttcaagctctttcccattccacacatcttttctagtagcacatttagaatgaacgacatagccatgacacctctgacaagaaaagcctccacaagtccaatccaccttctggtgacaaactccacatacagacttgacaacaccaagaacagatgttcgagaaacacggtgatcatgccgattaatgtttataacgcgtggaaggtcaagacagtcttgatgaatcataaaaccacattgaaaacatacataagggcttcgatctcccttcagcccacaagcattacatgtgaaagaatcgagccttgggagaagggtgagttggtggtcatgagctttcaaattcagaagagattgttgtggtggatttaaaacacatcgcatatccaaggtgaagttacacgaagaacagtgataaaacaatctatcaccaatatatcttccgcaaagacgacattttctgtcagaatagtccggtaatttacctcttacgagcttaagagggtgtaaggagtggtaaaaatggtttacctctaacgggagatttgactctgatgggcgccatgcgcaatcaacatggaatgctaaatcacattcttgacatttgtaagaaaactcataagaaagtttcccacatttatccccacagtcgatataattcggcttcttgtaaaggttgagcttgtggtgatgcgtctcggaaatgtcaataacttgtggtggtggatacttggcacaatacatatgcacgttgaagttacagatctcacaattatagaatagactcttgatagagatgccacataagttacagttacgtgtatgacctggtttacgtagaagctgaagagcgtgacttgggtgagatggatgctcgatatattcggaggacctatcgccacagctcttgtggacgaaaaaatcgcaggttttgcaatagtagccatcactgatagcttcaaaacgtctacaacaatcacctttcctcatatcattccaaggcaacatatgatgcttgtggatcaacggcagtgacactccctcagaatccatggtcaaaaattggatctgaaatctcaaaactcaaaaatcttctctcggtaatctcaacgatcgatgctcttataaaattaatcggaataaatataaatggaagaagaggtctctcgtcactaatgagaggaaaaggccattgggctagaggttaaccaagcccaaaccgaaacataatctaaacaaacctaagttcagttatctataatatcggtttagtttagattatgtttcggtttgagcaatttcatttcggttagagtcagtttaattcggtttgtttttcaaaaccatttcttcaaacaattccttcaatttttttgtatggataaaattggaaaatg

SEQ ID NO: 16869 - DNA, 3003 bp, Unknown; identical to SEQ ID NO: 16868
  misc_feature (1)..( 3003): 2750-1469P.txt file - cDNA_ID_1715684; gDNA_ID_2926172; Annot_ID_199575

SEQ ID NO: 16870 - DNA, 3000 bp, Unknown
  misc_feature (1)..( 3000): 2750-1469P.txt file - cDNA_ID_1715780; gDNA_ID_2926226; Annot_ID_203488
gccagattggttccaatgggaaataaacagattgagggagaagattatggagagactttctctcctgtggtaaagatgggaacagtgagattgtttcttgacattgctgttaaaaaagggtggattatacatcaaatggacgtccacaatgccttcttacatggtgatttagaagaagaggtatatatgaagttgcctcctggttttgagtctgttgataagaataaagtttgccgattgcgcaaatctctgtatggccttaagcaggcacctcgatgctggtttgcaaagctctcttcagctcttcttgagtatgggtttcagcaattacgcagtgactactcattattcacttatgcacaaggtactactcgtctaaatattctggtttatgttgacgatttagttatcgctggaagtagcctgaaagctacagaatcatttaaagcctatctctcttcatgcttccatatgaaagatctaggagaacttaaatattttctgggaatagaggtggctagaaatgcatctggcatatatctttgtcagagaaaatatgcactagacatcattactgaaacagatcaactaggagcaaagccagcacactttcctttggaagcaaatcacaagctagcactctccgagtctgttctattacatgatccgaaaccatatcgtcgtttgttaggacgtcttatttacttgggagttacacgtcctgatctcgcgttctcggttcatgttcttgctcaatttatgcagaatccacgattggatcattggctcgcaactttacgactcgtacggtatttaaaatctgatccaggacaaggtatcttgttgcgagccgatgggaattttcaagtcactggctggtgtaatgcagactgggacaactgcccgataacacgttgctcagtcacaggctatttgtgcagctaggagactctccgatcagttggaaaacgaaaaagcagaaaacggttagtctttcatcagctgaagcagaatatcgggcacttgctaaacttgttcaagagcttatttggatcaagatgatgcttaaaactcttggggttgttcatacttaaccaatgttagtgcaatgtgatagtaaatctgcaatctacatcgccacaaatccggtcttctacgaacatacgaaacatatcgagattgatctacattttgtcagagacgaagttctaaaacgagagattcagctttgtcatgtggattctttttcacagcttgcagacatcttaacaaaacctattgggaaagatggttttcgttacttcaagtccaagctgggaacactaaatctgtattctccagcttgagggagggtattggcgaatggtttatgccggttcggcttggttcacacttggtttatctctctgagaatatactctattagatgctgataattgtatagttacggatagcttttagatcttctcaactataggaattttcctagattcacgacgtctgttgtatagtcgatctatatatgttgtatgcttctcttgatgatcaataacacatatacattgtcgaactctgtattcctttaaacatattaaaaaaaataagaaagaaaaaaaacattcaaatgcaaatcgaaagagtgttaaaaatcaaatttctcatacttcataaatatataaattttgatttttctcatgtgtgaattcccatattcaaattaatgttatcatcttcatacatgacatgagatgataaggtagaatgagctacctcgcagctactcagatgatagaaggcattaaaacatgtacatattcatttgttacctaaagcaaatgaaaatatctgaaagcaccagagtgttttgcaccaatctgactgactcgataaatctatgttcaatgcatacaagaaaagttatttgaaagcactagactgatttatctgattaagttcaaagcatgtaatctataagacaatcttaagttacaataataaaagtttttgcctatatcaatataagatgttgatataaaatttcacattgacaaaaattttgagataatatttattccgggacagtatccaatatatacataacactgttgcactacctaaacattacaacaaagaagaaaaaccaaaatcaagggacaagaattcatagaattgcgcttcactactataccctagttacatatataaatctattcatagatgcaattatattattaaggaaagataatttggcaaagtagaacgttaaagcgacctaacaagatgagactgttacaggtcactttacaaattgttggcaatttctgactcatcttcttcatgacttgtccctctactcgctactccattaatgtgcaactatattttgtgtaatttaaactgtattcatgtatcgattattcatgacattttcaatagccaatcatcaatataaatttttaacaaacttcagattattggggttggtgattttgatattgctagtatttttgagctaaatactagcaaaaaaaacaatcgttttgtacatatccaattttttttctttttccaaaaactaaattacataggataaatttctctcaaaaatatcatagtgaatctttcgagcactataccaccatcatgtactccgatttcaattattttgacaatctatggaccggtttagatgcaaaccaataaagaaaagtttcgaatatagaatttccctaaacaaaatagactttaggagaatgtgagtggaaaaaaaaaaatagactttagatttggttttggttttggtttagattcggtttgttttctcggttacaatttttccccccgtccctaatttgatttgtgcgaagaaaaccaaacgtgctgaaacgttgtcgttcggatactatcagcgattgctaaaattgttaagaacgagaaaaaaccaaaacgacgtcgtttcttatatcgttgccagagagagtttgacggcggagagatatg

SEQ ID NO: 16871 - DNA, 3000 bp, Unknown; identical to SEQ ID NO: 16870
  misc_feature (1)..( 3000): 2750-1469P.txt file - cDNA_ID_1715780; gDNA_ID_2926275; Annot_ID_205304

SEQ ID NO: 16872 - DNA, 3000 bp, Unknown; identical to SEQ ID NO: 833
  misc_feature (1)..( 3000): 2750-1469P.txt file - cDNA_ID_1715938; gDNA_ID_1620327; Annot_ID_153517

SEQ ID NO: 16873 - DNA, 3003 bp, Unknown
  misc_feature (1)..( 3003): 2750-1469P.txt file - cDNA_ID_1806994; gDNA_ID_2214478; Annot_ID_133178
atccaccaatcaagcaagagcatcaaaacagcgtgagaagaaacaataaaacaagacaattattcgagatctattgattcaatggacgagaatgacgaatctaaggctgatctctaacggggaaggagaaagatcgtacctttgcctgagaattgaaaaaggtgggatggatcagattctgctactctgggattgtgttcttcgctctctggagttagaaatttctctttctctttaaacggctctcgttttagaaaataataattgtgttaaacgcctaaaacgtaacggaagtttctgaaaagccctaacatttagtatctttcaattacacccatttcatagaaaatgtagaaaacacacagttttattacatgcttgtcctgcggaccggtcctgacatatgaagttacatttgttgttgtaggtgtttcatcttgatatatgagattctcaagtggataaaatttgaaaccaaacaaggctttataccgaatttttttagataacaaaataaaaagtgaagagattatgtcgggtcagttgggtctatagtactcgagtattgccacataatagtttccatttcgtttgttgattttccaatcgcttggtcaaaactttagcatgttagttcattatccatagattctaggggttggtttgttttcatctaattaagaccgtaactcaaataaaatgatagttcactttgataatattttgtgaaattgtaataacctggattagtagaaatatcctggattagtagaaatataaacgagtaattgactatcacaataaagcttaacaagccgagtgagtaacaagtatgagcaagtaaagtatcatttcttgacatgtaattttcatttttcgtaactttctctacaacccaattattgaccgcaactaaaaataatattatgttgagacatacaacaagaacatatggaagagaaaaaaaaaaaaaaaaaaagtcgatatggatttcgttgacgacaaatccacattgtattatttggacaagagacatgacctttaccttctcctcacgcaaccggcatttgttgaagtctcccattgtccctcctttgggccctacctttaatgccaaactaacccattgtatttggtattctacataaaagttgtacactaatgtacgatacgattcaactacattaaccgtatgttaaattatatagtattcacttgttgataaataaattatgtttgaacacaacaaaacttagtttctatatccgctgctgttttgttatagtcgtcattcgtacgagtaattctttatgttccgcactaatcacgcttcttttgtaccacttagtatgtgattttctcattcgtggtctttgaattgtattagaggcaatttagtcttttgtgagattaggaggtgtgtacggaaaagtgtgtgagacaaatgaagttaatgtggaggagatctatagtgggacaaagcaattgaaagtcgctttagaagcaactaaatgccctcttgacttctccattctccttgcgatttacgcatttacctaattgcatcttttacttgtttagcttgttaagttcttctacaacattaccacttttgctctcttaagttattgcaacttgacaatttgttataccctttatcaaaaaaaatacctggcaacttgtttgagctcctgaattaatcacatctcttaaaagacgttttgcgagtataacatgagcttttctttttatagattcattcaccaatcaaatataaaaactataacacaattaaaatgccatgtagctaggtatattagcaagtcgtagaacagaaatggaaagacttgatgaaagcacgtcaattcaatttcatctcctataaataaattgttgtaggaagccaaccgttttggaatttcttttctttcgttttacgtaagactatatagattcaataacgtgttggtttagaaacccatacttataatggttgacaaaaagaagaaagaaaaaaatataaacatatacgctaaaagtgtttaccaaataacagggttatgtaatttattatctggattaggaaaagatgattggaccatgcgatggagtagaggaatctgcagggcatttgtcactttcatggaccccatgaaatcacatctcttttaattgaataatcgaaatccagttgcatacgcatctttgtctacgattggtcgtagcacatatacgacatatgccataactacaaactaacttaatcttctaataatattgttaacgatcgttaatactaaaaattactaatatattagtcgtgttatctatgtgttatgaggtgtgttaattgttgatgcataatgaatgaacatgatctctaatttgtttacctcacactatgtgattcaagggtggaagtcgttggttagcaaacattagtgtctcaggacaagatagctcaggacaagatgtccgagcggttcagaatcagtaatgtttttttccggagactctactcgttgagtttttgcttgtactccctggtgtttgtgttgtgatgtagttttgttgttttacttagtttttgatcttttatgtaatttgtatttcgctgtaacttcggtaaaaaacttgtgaaaatagtataagtacttaacattgatacaaaaaaaaaaaaaaaaaaaaaactcatgaggtcttgttatatatatggtgatcacatctttaaagaaaatgttatagtatttgttttagtttaaacaattttttatgtgccaaaaacattattaaaaagagagcaataccctactctaaaatagtaaagctaccaaattcaattcattacgacatggctcaaaagaaaaagtatttcgaatattatacgatatcaaccccattatcattgctataaaataagccaaactttacctctccattttcaataatctctcatcttctttcgtctctctttctacggttcaaacattaaaaagatagatg

SEQ ID NO: 16874 - DNA, 3003 bp, Unknown; identical to SEQ ID NO: 16873
  misc_feature (1)..( 3003): 2750-1469P.txt file - cDNA_ID_1806994; gDNA_ID_2214478; Annot_ID_183212

SEQ ID NO: 16875 - DNA, 3003 bp, Unknown
  misc_feature (1)..( 3003): 2750-1469P.txt file - cDNA_ID_1806998; gDNA_ID_1620698; Annot_ID_48720
tccaataattctatcagagattatcatataaattatactattacttattagtacaatgaaaattaagagtatttattatattcaacaactccttctttacgaattacgacccagtagaatttgtcaataattatattttttatatatatatttcacttatgaactttgagagttatcgtcattcaaagttataatttcatttggttttagtttcatatctctttcatgttaacttcttttgtctgcactaaaacatatatatattttttttattgtccgcgtggtctttgatatatatagtaatcattttcaaagccgtcaaatttttcacttttgattttgaatatagaggaacctgttgacccaaaaaaacagattatgaaggaacttaggaaatttcatacaagttgatcttaaaaattaagcaagaaaaaagaataaattaatgcagtcattccttaagcctacaatataaatgttcacactcccttgttctatctccaacacaacacaacacaacacaaaaaatccaacccaagaaccacagtgagatctttctcagaagacaaaaatgggaacagcgtcgtctaagtctaacatcaacctctcgcaggtcctcaacactgaggagccgtacagctccgtgatgctggccgtcgctgctctcttggccgttgtatgctacttatggattcaggggaagtccaagtccaaaaaggaacctccactgcctccgggaccttggccacttcctatcgtcggaaacctcccgttcctaaactctgacgtcctccacacgcaattccaagccctaaccctaaaatatggccctctcatgaagatccacctcggttccaaacttgcgatcgtcgtctcttcccctgacatggctcgcgaggttctcaaaacccacgacatcactttcgccaaccacgatctccctgaagtcggaaagatcaacacttacggtggtgaagacatcctctggtctccttacggtacccattggaggagacttcgtaagctctgcgtcatgaagatgttcactaccccaagtctcgaagcttcctactccactcgccgggaagaaacccgacaaaccattgtccacatgtcggaaatggctcgtgaaggatcaccagtcaacctcggagagcaaatatttctttccattttcaacgtcgtgacaagaatgatgtggggcgccactgttgaaggagacgagagaacgagcttaggaaacgagctcaaaaccctaatatctgatatctccgacatagaagggattcaaaactactcagatttctttccgttgttctcaagattcgatttccaaggattggttaagcagatgaaaggccatgtgaagaagcttgatctcttgttcgatagagttatggagagtcacgtcaaaatggtgggaaagaagagcgaagaagaagaagatttcttgcaatacttacttagagttaaagatgatgatgagaaagctcctctgtccatgactcatgtcaagtctctcctcatggatatggttcttggtggtgtcgacacatcggttaacgcatccgaattcgccatggcagagattgtgagcagaccggaagtgttaaacaagatccgactagaacttgaccaagttgttggcaaagacaacatcgttgaggaatcacatttacctaagcttccttacctacaagcggttatgaaagagactcttaggcttcaccctacgcttcctcttcttgttcctcacagaaacagcgaaacctcggtggttgcgggatacactgtgcctaaagactccaagattttcatcaacgtttgggcgattcatagagatcctaagaattgggatgaaccaaacgagttcaaacctgagaggtttttggagaattcgcttgatttcaatggaggtgattttaagtatttgccttttgggtcaggaaggaggatttgtgcggcgataaacatggctgagagacttgttctgttcaacattgcttcacttcttcactcttttgattggaaagctcctcaaggacagaagtttgaggttgaagagaagtttggtcttgttcttaagttgaagtctccacttgtggctattcctgttccaaggttgtccgatccaaaactctacacagcttaagtaagaaggatgttgaattgagttttcttgtttaaagtttacttttctttatctgtgtctggagttttgatgctttgtataaaagatgtgtcaagttacatttttgataacatttaatataacaaagttttacttacaataataacgcctaatagtcgatgccaaagctataaaactatattgtagttatatttttggcaagtcgattaaaattcttgggtcaacaaattacaaattagtatgaaggttacaaattaaaattgtaattatttaaattaattaatgtataattatatcacaaatacttcacgtcacactaaatgagtccttcttagcggcaaaatatgcgttattgggctaggcccatttataaacgacgccgtttacacagtctagaaactcaacatcgtcgtttctctcccggcgactttatcgccgtctttttcttctttaaactctctggctaatttcgttttgctttgagcttgtgagctacttctgattccggccatcacgcagcttcaggttagtttttgatttaaatcaaacaacagtacatgggttcagtgtgttgtgtctcgaatggaattggtttctgtgtttagattagggtttagggctctttcatctaaggaaacgaaacctaggttatacgaatctctttgttgggtctctctcaataccaataccaatcaacgaaaggattaattttgttcatcatcttcaacgtctaaggctataatttgtgttagttcaaattgattcagaataaagtttggatttttacttcacctagtcctgaatttgttgttctctgtgtagaaagtttctgtttttaaatcaaagaaatg

SEQ ID NO: 16876 - DNA, 3003 bp, Unknown; identical to SEQ ID NO: 16875
  misc_feature (1)..( 3003): 2750-1469P.txt file - cDNA_ID_1806998; gDNA_ID_1620698; Annot_ID_164956

SEQ ID NO: 16877 - DNA, 3003 bp, Unknown; identical to SEQ ID NO: 16875
  misc_feature (1)..( 3003): 2750-1469P.txt file - cDNA_ID_1806998; gDNA_ID_2926180; Annot_ID_140540

SEQ ID NO: 16878 - DNA, 3003 bp, Unknown; identical to SEQ ID NO: 16875
  misc_feature (1)..( 3003): 2750-1469P.txt file - cDNA_ID_1806998; gDNA_ID_2926180; Annot_ID_200206

SEQ ID NO: 16879 - DNA, 3000 bp, Unknown; identical to SEQ ID NO: 5730
  misc_feature (1)..( 3000): 2750-1469P.txt file - cDNA_ID_1807002; gDNA_ID_1620813; Annot_ID_50619

SEQ ID NO: 16880 - DNA, 3000 bp, Unknown; identical to SEQ ID NO: 5730
  misc_feature (1)..( 3000): 2750-1469P.txt file - cDNA_ID_1807002; gDNA_ID_1620813; Annot_ID_169139

SEQ ID NO: 16881 - DNA, 3003 bp, Unknown
  misc_feature (1)..( 3003): 2750-1469P.txt file - cDNA_ID_1807006; gDNA_ID_1620647; Annot_ID_47632
gtacacactgcagatttttgagaagaaaatgatacagagcttgagagaggtctaactataatctgtgtatatagggtttatatatatatctaagtcccctcctttttcctttgacaaggatgagactttccatcatatatatctcaagattatggcgtataagtcagagaacccattagagccaccagaaaacaacaatcactagtagcaagagggagaatcccatcgcctgcaacatcaccagattttcaatttttcatcattctctccaaaaacgtatacagtaatatgagatagagaaaaagagttattacagtgattgcggaagcagcaaggccggctctttctctaggatccttgcggtagtagttcccgaaatataaaagtgttgcatagtaccataagaaagggaacacaaaacccaagagaaagctgcaaaacaagaagatagcttgtaaatctaaactgaatatagagaagctgcgttgacttcaactcaaaaaaaacttaatactctctactcacgagaaccatccgattccacaaccaaagcatggaagaggcttgtcatacactccattttccacctcgtctacgtcttttacaagcgtatatcttcctttcccacacaccatagcatctatcatacaaagccaatgtgtattagcttatggaaaaggtgcaaaaatcaaagtgcaggagttccacacatgaacaaatcttttaaagagaaggcttgtggagaatagtggtagtagtacctttaactgcagagtaatatttagcaactggtctcacgagaccggcatgcttatcagctacggatttaaccagctctgcacttccatcaccacgctctttaacagctgcaaataacagataagatttaatccaaagaggactctacttggacatcatgagaaggtacagagttaacttaatgttatctcatctcaagaccatgcccccttgttcctaaaacaaaaatttatgatctttgactgttggtgaacaatcacttccagctagtcaacaacttagttgtgagatttagatgatcctctattctagtaacaagaactaacaaagcacatatcttttgaggactaatatgaatcgaaagagataaaaagggaggaagatgattactttctcccatacgttcttcagcagatgatgaaaatgctaagctcttgcttataagtttgtgtcgtgacccacaagatcttcaaattgcctgcaacaaaacattaacaatatgaatgaatttcagaaaggaaaacatagaaaacagagacgatttcagctaaaaccgtagcagcaatcaaaccaacaagaaattgaaatcagcgtaacagaagcatgaaaaagtctgaatcagattatcttctctatttggaaaaagaacatatatgagacaataggacttcaaattcatcggaagaatgaaatccacacgaaccggagactgctccgggaagtaaaaggaaaccgatggagatgaataacttaccagattataatttctagagcacaaattcgagaagagatttgatttcaagggcagagggaatataaatatcggatcaagaaatctggaagcgagagagtcgtcgtgcttcgtcttcttcttgtgctgcttgtttcaacttcgtcagcgtgataaatgcgtagagagcggaagatgcaagaaaaatgaaagtctattttttcttttgcctaaagcaagtttgtctcttttctagtactattttgcttaattaaatacttttaatgtcttaacaactatacgagtatttaattcttccactaatcttttgtccttttcatgatttatattatgtaatcaataatgatgtttttactcacataattttgtagtgaaattagctctaagaaattacaatttttctatttcttttttttttttggaaaaatgaatggacttttcttaaacaacactttttcaaaatgaaataaacattattttggtattatattttttatatatatttttttttgtaattcagaaagcttcgacactgttagatttagaccattctagatacgttaccagttaccacttaccagtagccacataacagtactagttcatatatagcataaatagttaccagattttgatgttttcaaattaaatatgcgactaaaactctaaaatcattcaaagttattattatttatgagtttagttttcttcttttcctttcgtacaagttagatatcatgtataattaaccaactgtccatcataatctcatatattctggatcaaatcgtccgtttaatatagttgaatatgtctctataattattttaaaatgttacttgtgttatttaagtaatacagaattatgtaatagataaaaaattgtttgaccaaaaaaaaaaagagattaaaaacaatgttaacttttcgtccaagtagacaccacataccaagttaccaacaacacttcacatttgatcattttagttgatctcttccatccatgtggtattaatctaaaatatccaatgattatgacatcttattttattttggcaacgatcgagtattaccattaattaaaatcaacatgctattaaataatccaaataggcaaaaacttcacaatcaaaagagaagaagaccattcgtcgaagaaaattactcacaagagtataaaactatatatatgatcagcctattcttaatgtgaacattgagaagtggggaggttaaaatgcaatgattttgatccaaagttattgttgacaaagacaattaaagaaggaaaattcaaaggagagatgagtcaaggacaagtcaacgaccatttcgtcttcgtcttcttctttatactcattagctacacgacgtcgacggttcgtcattcttcctctaagctttatctttctgatctctgaccttgtgtctctgtgcatgtgtgtttatctgctactgtgttttgtcggtttgatctccaaaaaccagacatg

SEQ ID NO: 16882 - DNA, 3003 bp, Unknown; identical to SEQ ID NO: 16881
  misc_feature (1)..( 3003): 2750-1469P.txt file - cDNA_ID_1807006; gDNA_ID_1620647; Annot_ID_163287

SEQ ID NO: 16883 - DNA, 3003 bp, Unknown; identical to SEQ ID NO: 16881
  misc_feature (1)..( 3003): 2750-1469P.txt file - cDNA_ID_1807006; gDNA_ID_2926188; Annot_ID_140893

SEQ ID NO: 16884 - DNA, 3003 bp, Unknown; identical to SEQ ID NO: 16881
  misc_feature (1)..( 3003): 2750-1469P.txt file - cDNA_ID_1807006; gDNA_ID_2926188; Annot_ID_200803

SEQ ID NO: 16885 - DNA, 3003 bp, Unknown
  misc_feature (1)..( 3003): 2750-1469P.txt file - cDNA_ID_1807018; gDNA_ID_2214517; Annot_ID_133972
ccaagaccgtcattgaccatgtccgtattgtgtataatgcaagctgcatgaattaagaaacaattttcagcaacgaggaaaaaaagacttgattttgttttcataaacttggaaacttacaatgatagctccaactggatcaatccaataatcaatgtaattggccaggattactgcaatgagtccaatgatgtttgtgatgacgtcgaagaaatgatcttgagcataagctttaacgatctcgttagtgaaggatctgcagtaaagaaccagaagcagtttgaccaatgtaacagaaagcatgatcccaactacccaactctcttgctcttttgttaggttgaactccttgtgctgtatgaaagagatttcgtgaataatgtatgactttcaaagctctagaccaaagctaggtgatcaagattcagacatacgctggataacattgtgcgaagagattccaagataatctgcaatccaagtgttgccatcactgatgcaaagactaggattccctgaaaggatttgaaccaaaaatcacatattgagaaatcggaaaaactttattgacttgtcgaaggtgttaatagttgcacagagatatcaatagcagaaaacaagcttgcttaggccgattcaataacataacatataatagaaatatactaatggaagacagatcatgtgcattagtctttaaaaggatgatacaaaccagtggttgcatgcgtttcttgccaatgggatactgatacgggttgggtgtctgcatggagaaggcggtaaaccagaggatgaagccagaaagaagatcaagaagagagtccaatgtagaggcaatgatagctaaagagccactagtgacagaagcatagactttagcagcaaaaagaagcatgtttgcaatgtttgatattctaatcgccaatgtctcgcttttagccaaattatcctgctcttcctatgtacacaaaacacaaagaaattcagaaaagtatcaatcaacaagaacaaatgcatcatggtttcaacaaatgtgacaagtagtagcctcatttaggctaacctttgacattccaggaacaaagccacgttctgcaagttcatccatttcagtaaagccctcaagcatctctacttgctgctggtaataatctgccacattgtcttccggacctgaaaacaccaagacacatagcttcacaaaatcatatttgatctcttcacaaaatcatatttgatcacaaaatcatatttgttgacattacttccacatccaaaagaaagattagagacaaaaatcaaggatcgggattaatgaactctagactaatcaataccaagattcaactaaatctcaacttcataacaagagtaaaaatatatctttgaagaatcaaaaatgctaaagatagcaaacaaaagaggccgaattcaaatgttatcagctgctgctaaagattgaaactgaagaagacgataagaaaatggaaatgcggagaggaggagcaaattgtttacccaaacaaccaagacagttgtgtagtttactcggagatttcttctccttgtgttccggtgaaacctggaaatcatcgaaatttaactgccaggaacggtcaccgttaccgtgaaactcgagcagcgagatcccttcgtcggaatctggactagctggctcaaccatttttccggcggcggagagagactttgtatttttttttttttttttttgagagagagagagagtggtaaggaaatgggaaatttgaagagacggcgagggtaaaatcggtaattaagaaagattgaggctagctactacgactgttgtggtagtaagacattcctccacagagatacttggaccagcctttagaagagacgtctctgctaattatccacgtggcgttctctcaatggatttgggatctcgcacgtgattggaggagtcatcatacacacgtgtacagttgagattcaactgcaattaaacgaccccgtgacatgacatggttatgagtcacatatgtgccctctcaaactctattatgtagtataaaaactgtattagatacaaccgacccaagatatagaagaacctttgaaaaatggtagaagccagttcagctaaagctttcttcttcacaattatcgtaaaatattagacatgtagagcaggcttgttgttctcttattgtcaagcgtaagtaaatgattattgtttagtttcgtgaccaattggtttgttttttggttagccattgttcgatttgctttggtttggtcaaagattgtatgctttcaagtcaaaccaaagctgactaaattttattctgtaataatttactttggaatggcaaaaccaaagaaaggtcatagacacaagagaagaagcaaatatgtttcttacgccaaaagacacgtttgtatggtaagacaaaagacacgtttgtatgtttcttacgccaataccattacgttaaaaataaactagtaacttaaatttacgctcactttctatttgggttttacatgatgattttggtcaaaggcctatttacaatgttgcaagcccatattatcttttaagtatctttttgtgcaaccaaaagaatcagtgatcttatgctcattttcatttttttctaatgaaatttttcgtcacttatggcttatgcgtccgatggacgattatggtaaaaggcccatttattcaatccaaagcttactgggttagatgatgattgtggtaaaaaggcccattatagacccaactaagtatcttagggtttcagtttccactataaaacttgttgcggcgtaagttagggttttgagaatcagcggcttcacctctccaggttcgtgtctcgattttgcaaactatctctcgaaatcgtcctacatttctttcttcagattcattactgagcttcgctttctgggtttctatctaaaaatttcacagatttcgtgtgtgaagaatcatttcaagccatg

SEQ ID NO: 16886 - DNA, 3003 bp, Unknown; identical to SEQ ID NO: 16885
  misc_feature (1)..( 3003): 2750-1469P.txt file - cDNA_ID_1807018; gDNA_ID_2214517; Annot_ID_184476

SEQ ID NO: 16887 - DNA, 3003 bp, Unknown
  misc_feature (1)..( 3003): 2750-1469P.txt file - cDNA_ID_1807028; gDNA_ID_2214528; Annot_ID_134211
tatggctacaaatctcgactcagctttccatatttcacagcttgcgcaccctttgttgaaagcctctggctcagggagcattgtgctcatgtcctctattgccggagtcgtgcatgtcggtgttggatccatctatggagcaacaaaaggtactgtatatactctttaaaacaatatttctttacattatgatttatatgcaagtgtatataaaagcattttttttcaggagccatgaatcagttggctagaaacttagcttgcgaatgggcaagcgacaacataaggactaacgctatttgtccatggttaatcacaactcctttgattagtgatgtaaggacaatttccttagaacaacggcgaaaaaaaaataaaaaataacttttgattctaactttttaacttatttgaaaatccctcagcttctcagtgttgaggagatgaaaaaagaagcagaggaaaggacacccatggggcgtgtgggagaggcaaatgaagtctcaccgcttgtggcatttctttgtcttcctgcagcttcttatattactggtcaagtcatttgtgttgatggaggtctcactgttaatggcttctcctatcagccacatgcttgagctaggtctgtgttgtgtgtattgtccaatgaaaacagtaaaccaaacaataacatcggaaaatgaatgatttgaatatttaggttaagccttaaaactaaattcattttggtatgttgacatattgtaaaacgtaatgaacaagaaaccttaacagaagatgtttcttttaagagtacacgagccttgcagaaacagaacacaagttgaactcaaatgagaagatgggcttcgacactcatcaacttacaatgctcagttgatcaagcacaaagacagaatcatgcaatgatgactcaaaaggacagatggcttcactgttgaagattttgactatatgtcattttttgcttgggacacttcgatattttagtcatgttttctaacatacgactacatagtttctcaacatgccacgtacaaacaagacaacaaactcattaattcatacttatctggattctgatccacatttactgtatacataatttgtggcatttctggtcactgctagtaacaagcaagaaaaatggataaaagatggagtctacaaggaatgactgctcttgtaaccggtgcagccagcggtatcgggtttgtttttttctgttctctatatcatcttttgaatcattgttctgcttatgtttcaaggaatttaatctatgtctgtggaatgttttagttatgccatagtagaggagttagctggttttggagctagaatccatgtatgcgacatatccgaaactctgcttaatcaaagcttaagagaatgggaaaagaaagggtttcaagtgagtggttcagtctgtgatgtaacctctcgtcccgagagagaaaaactgatgcaaaccgtctcttcgcttttcgatggcaaactaaacattcttgtaagtaaatgatctttatatagaaacaactaagcatttcttttagcaaaattttctaaagagaaatcttctttttgttcaacataggtaaacaatgtgggcgtacttcgcgcaaagccaacaacagaatatgtggcagacgatttcacttttcatatctcaacaaacttggaagctgcttaccatttttgccaactttcacatcctctcttaaagacttcaggctatggaagcatcgtgttcctttcctctgtttctggggttgtgtcaataactgactgtggatcactttatggtctaacaaaaggtaaccacaattactacaaatctgactaatcaacaaagagtttttcacttccttattttttagtggtttgttgacttcttttgtaggagctctaaatcagctagctagaaatttggcatgtgaatgggcaaaagacggcataagagccaatgcggttgcacctaatgttgtcaagactgctcagtctcaattcgtaagaaataaattttaattttttttttacgttttggtgttgttgttgtgaatttaacaacctcaattcctcttattatctctaaatttttgtttcttaaaagtttcttcaagacgtcagtaaaaaggagggattgtttagtagaactccacttggtcggtctggagagccgaatgaagtagcatcactagtggtcttcttgtgtcttcctgcagcttcttatatcacaggtcaaaccatttgtattgatggaggcctcacggtttacggtttctcctctcaaccacaggcttgaaaatggtcttgtcgtttcttgtctgtttaaatattctctccctaataaaatctctcatcacgctatgagtttatgtcccttgtacaaaaacacacaatgtcaaattgttgctctttagtcttgtaagagaaatgagggacttatctatatgaaggatcaattaaactagtactattttatttgtttggttaaactatccttctctaattattgcaacttatgtgtctatatatggattaatgtcataagtactagatggaatcaaagataacactaaatagcgttagtcatagaatcatactcacaagaatgagtcctctaagttcaatggaccactccgaagtccatcatgagaacaagaccaatcaataaaaatgtccttttgttatctaaattagcaagtgtaccaaattttgttcaccattctaacttataatttcagttttcttttgtgagtgaagttattgaaaaagaaaaataagaaagtattggtcaaagattttgacaacaacaagttattttcttgaggaaccaccaacttagatattttagtcatgttctctgttataagtcctactgctactacataatgtttccaccacacataaaaaacaaactcaataattcacacttatctgatccacattcattgtatataatcttatggcatttctggtcatttagtctcaagcaaaatg

SEQ ID NO: 16888 - DNA, 3003 bp, Unknown
  misc_feature (1)..( 3003): 2750-1469P.txt file - cDNA_ID_1807032; gDNA_ID_2214544; Annot_ID_134554
cgttccgccaaacccgtcccgtaaaaaaaaaccgcagtacaccgctaatttaaatatataatgaaaataaatgttttacgggcttgcaattgtattttagtttgtcaaacaatattttgttttaaatagttgtcgaaatctagttcaaattttggagaaataagtttagtgaattgataagaaatgtatttaggtgtgttttgcttattttaagggattgcaattgtattttggtctgtcaaatattttttgttttaaatagttaccgaaatctagttcaaattttggagaaatttgcatgatatatgagattgaaatatatttggaatgttttttatttgttaattaatttattgcaaaaaaaaaatcaataattaaaagccaatagcagccattgtaaataagttccaactccaggatttatttcacaaaatggaagcaaaaatgtatatatagattttgaacgggtcagcttcatcgttgctgatttttttatgggccgatcactattttagtggaccgtctttgcattgggctgattatctcttaatgggctgtcttcgtcttgaaacgagtcaaaaggaagggtgttaattccatctccaacatttcattcatctatcttacacacacacaaaaaaaaaactgtgatttgttcaattttttatattttaataggataaagatctatttaggagtttggaggttagttcctattgcatacttcatcttcggtaaaactaaaccgcctagaggtatcgatctctggcttgaagagagagttctcgaggaacattaatagtgtgtagaatggtttatgtaaactgagaatcaattgtgactacccttggttaaaccggaaccttcttctataaaaagaggttttcattgtaacaaacacttaaaagaataacagaataaacacaatcttaaatcatcgtttgtatcataaacgtcattaatctcaactaggtcgtctctataaatttgcatctatctgtcctatcgtatttcatatctcaaattagttttttcttggatttataattattttcaatatttaactataaatctatattattggattattattattattattagattttgtttgttattgttcaagaacatgatgatctgagcacgagtttagatatagaagctcttagaaaaaaataagctgagctgagctaacttatgaaatatccgaactcattatgagctgactaatatattgaagctaactcacagaaaaagctatcaagaaattttaatatgaaaaaactaaaaaaataaatgaaagtaatatttttttctgaacacaaaaatgaaagtatttactatatatatactcttgaccaaaaagagaaatgatatttttactcacgacattacgtcgattagagaaagtgtggcgtaaatcacgtgagatcaaaataggaaactcagcaagaaacctattattcacttatattgatatgacctgcagtgaggttacttatttgatttaaaaaaaaaactgatttatttggtgtgcataatgttttttgttgttcactgcgggccggtcgatgttttttaactaagaaaattaaattttaagttcttgctaaaacaattttgaattttatattttatttattttgttacagtatttaatattatataaatgtattttgagtggtaattttaggattttacatgcgctataccattccaaattaatatcgacccaaacttatctcacagtataaccccattatgtgaaattaaatatcactttattatttttcattccaattatacttttatttaaaacacatattcatgagtcacccatagtatgtttgcttatattgtgaccataatattcctttcgttgtgatccatgttgccaaaacagacatcaattaatgaaattgtgtgtatttcgtccatgtttactcaaaaaaggtcaatatctttaatgtgatcagcaatgtgacttacgaattccccgaattccaccaaaacacctgattgcatcacttttttaatgtttctgaagcttacaaatatcatgggcaaaactccagcaaagccataaatggttggagaagaaaatctagttacatctaagggatggtccgataggtacacaaatgcctctatcatagaacttatttcatctctttcactacttttaaataaacatctaagaacaccttctacgtcgaaaacctacaatgtggcttaaattattgtacgtaggcaatatatcttctgaatttgcattctccgaccaatctatcatctgctggaaatgaataacaagctccactgaaatctcattgaaattagaaaatactctatccactttcatcattgagctgccgcaaccttgactaaaagcaaagaaatcgttttccaaatctcgagcttaccatatattcgatacattcatgagataaagcttcattgaagccaacatccttcaagcctaatcaataaaggccacacaagttgtagttttgtcctccattgataaaacaaattttatgataataggaataaggtacaaaaatatattttttgatgcaatacatgttgccaaaacgtatatcaaccaacgaaatcttatgtactttgtccattaatcagtatgattcacaacttccttaaattccaccaaaatttcggactttggcctattcaaacccattaatgactgtttaaaagctttggcctaaagattaatgttaagatgttgtcatctttggtttccattgatttaatcatttctttctttattatgcacacttggccaagtgttatcattttgagcaaaaccaactataccggttttctcctaaccggaataaaccgaagtaaaccggatatcacatcatccgttcactctctttagctcttaaggcgaaaaaagcttatcttcttcatcatctctttcctcaatcggagtgagcgcaaaaaatcaaaaattcgccgagagcacaaaccctaatg

SEQ ID NO: 16889 - DNA, 3003 bp, Unknown
  misc_feature (1)..( 3003): 2750-1469P.txt file - cDNA_ID_1807035; gDNA_ID_2214563; Annot_ID_134903
agcaacccatgccatagaggcgcaaaaacatgacggtaaaccccagatcgcggaagcccaagttgaggccaatgaccctgttgtagagccccagcaagactggggtggccgtggtggttgtaggtggggatgttgcggtgggtggtggcgtggacggtgcagatactgttgcaggagtcaagccgaggccagcgaggttgtggaaactgttgagcccaacgatgttgagcctcagcagggtggccgtggtggtggcggtggtggtggcggaggccgtggtggttgtaggtggggatgttgcggtgggtggtggcgtggacggtgcagatactgttgcaggagtcaagccgaggccagcgaggttgtggaaactgttgagcccaacgatgttgagcctcagcagggtggccgtggtggtggcggtggtggtggcggaggccgtggtggttgtaggtggggatgttgcggtgggtggtggcgtggacggtgcagatactgttgcaggagtcaagccgaggccagcgaggttgtggaaactgttgagcccaacgatgttgagcctcagcagggtggccgtggtggtggcggtggtggtggcggtggccgtggtggttgtaggtggggatgttgcggtgggtggtggcgtggacggtgcagatactgttgcaggagtcaagccgaggcaaacgaggttgtggaaactgttgaggcccaacaagctaagccatgaattgcgtgtaatacaaactctctatgtttgtatgcatgcatagctaattaccattacgtacgtatgtcaaaataaagcaaaaatagtacctaagaaggtacctagaggtcaataaaagaaaacgtaggttcatataatatgtattttgttatgtagtgtttcttttctcgtggatgttataaataataacaactgttttttaatttattttttgacaaatttcgagtcataaccaattcatattatacgggtaacacaattgagttaagtcaaattccgataggaaaaacggaataaaatggacttaatcatttgagtaaagaaagatccccaaataataacaactgttttaataccatggattataatattttgttcacagtttaaattatgaagaggcatgcatgtagctaagctagctagctcaataaaagccataggttaatataaaatggaaccaaacagaattattatcctaaaagttaagaataaagaataactgattctactataaaatcgtaaacattaaaggtgctgctgtaaaatcatgtattcgaggggaatatctcgtctaattatgtatgaatcaagtatatttgtattaatcaattttagtttctacattagttacttgtatgggtgtttttaaatggatagttttaaatatataaaaaaacattttctgtattcctaaaaagtttgatgttctagagttttcacatatattcaaaaataatcattgtttaattattggttaatcatttttaaaaattaaatattttttaacaattttgaactaattgtagtataaaatagttaatcattatgtcttaaaatctaagatttattaatattaattaataaaaataaagtaaaaacctaaaaaatcaatctttatgtaacaaactacaaacacgtaaacatcaatattttatgaaaaaagagagtaaaaatatgagtgtatttaaatgagaactgtgtcttcttagagacatttaaaactcctatttttgggatatttttaactttactattatttttcgtgaaagatatttgtgaaaaattgttgaatgaggatggtcaaatagatatacccagttatccacttacattattttcatgtttctttttatttgtattttcattttttttgtggtttcatttcttaccttccaaaacttccgaaattattcgaaattacgccactactctcggtcaacctcacgacgatgtcgttccttttgtacttggcccaaaccgaatggatccagtccactggcagttccaagccacatgttcaatatgcctacccggctactccgaattctggatctatttctgttgtcggataaccccaaaagcctttccacaaaaatttagtagttttcctaaaatttagacgttaacccagtaatataggattccacacgtggtggcatcgatcgacaactataaagtaatcaccgtttttactccaaacgatgcctgcgaatgctatgttgcttagaacttggaagagtggtcaattgtttcgtagttgggtcatacttcattagtctaccgattctgtctccactcatcgtactatccctcaattaatcaattaaattaacaattacgagctaatccatcatataaacatgctccttttattaatataaagtataaacatgttctttgtttaagataatataagataattttaactctataaagtagataacttcggtccgtggatcgatatcctatccattggtcaatcgaagggcttcattcagctcacatgacaaaacctgattggttacaccacatgttgtgccaactttaagaaggcccgtataagcatcggctatatagaggtcacaagtggatttgtcaaaggcaaggccgaacggacgaacggtcgtttttggaatggatagaagctaacattatcatttcgaacggtgggtttgaacttttaagtccaagaataggactttgtgaccactggtggacacgtgtaaacacgataggttatgatcagatctattatatatggtctctaaagatcatataatttttttttaacattttcgttatagaaatatccctataaatatatatgccattatcttcgatcacgcgacaaagttgactggtatcttgtccccaagttttgctgcccaactataaatacatgtgctgtgctcatcatacacttcactaacaaaatcatcttccctcaataaaccaaataagctaagtgttttgtgtaacgaaaacaaaaaatg

SEQ ID NO: 16890 - DNA, 3000 bp, Unknown; identical to SEQ ID NO: 12860
  misc_feature (1)..( 3000): 2750-1469P.txt file - cDNA_ID_1807045; gDNA_ID_2214576; Annot_ID_135185

SEQ ID NO: 16891 - DNA, 3000 bp, Unknown; identical to SEQ ID NO: 5122
  misc_feature (1)..( 3000): 2750-1469P.txt file - cDNA_ID_1807073; gDNA_ID_1620764; Annot_ID_50077

SEQ ID NO: 16892 - DNA, 2490 bp, Unknown; identical to SEQ ID NO: 11304
  misc_feature (1)..( 2490): 2750-1469P.txt file - cDNA_ID_1807075; gDNA_ID_2214489; Annot_ID_133410

SEQ ID NO: 16893 - DNA, 2490 bp, Unknown; identical to SEQ ID NO: 11304
  misc_feature (1)..( 2490): 2750-1469P.txt file - cDNA_ID_1807075; gDNA_ID_2214489; Annot_ID_183580

SEQ ID NO: 16894 - DNA, 3000 bp, Unknown; identical to SEQ ID NO: 11585
  misc_feature (1)..( 3000): 2750-1469P.txt file - cDNA_ID_1807078; gDNA_ID_2214504; Annot_ID_133726

SEQ ID NO: 16895 - DNA, 3000 bp, Unknown; identical to SEQ ID NO: 11585
  misc_feature (1)..( 3000): 2750-1469P.txt file - cDNA_ID_1807078; gDNA_ID_2214504; Annot_ID_184070

SEQ ID NO: 16896 - DNA, 3000 bp, Unknown; identical to SEQ ID NO: 12314
  misc_feature (1)..( 3000): 2750-1469P.txt file - cDNA_ID_1807082; gDNA_ID_2214543; Annot_ID_134505

SEQ ID NO: 16897 - DNA, 3000 bp, Unknown; identical to SEQ ID NO: 12314
  misc_feature (1)..( 3000): 2750-1469P.txt file - cDNA_ID_1807082; gDNA_ID_2214543; Annot_ID_185289

SEQ ID NO: 16898 - DNA, 3000 bp, Unknown; identical to SEQ ID NO: 11222
  misc_feature (1)..( 3000): 2750-1469P.txt file - cDNA_ID_1807086; gDNA_ID_2214484; Annot_ID_133336

SEQ ID NO: 16899 - DNA, 3000 bp, Unknown; identical to SEQ ID NO: 11222
  misc_feature (1)..( 3000): 2750-1469P.txt file - cDNA_ID_1807086; gDNA_ID_2214484; Annot_ID_183462

SEQ ID NO: 16900 - DNA, 3003 bp, Unknown
  misc_feature (1)..( 3003): 2750-1469P.txt file - cDNA_ID_1807094; gDNA_ID_1620756; Annot_ID_49901
atgttctcaggcgtaacatgtgaactgtgttttgcagagttttggctccaaaaccgctccaaatgtcctgcggctacctctcctgggtccttgattatgtttctgcagctgtgaataggcagagagggtagaagaaccgtggccggatctttgccgctggatttggtcaatgacatccaatacttcatgaaatgactgaaggtgactccatctgctacaacatgtgtagctgagttgcctatacagattccagctccagggaagatggtgacttgcattgccattattggtcgcatctgaattccttccggagagacgtgaggaggaggtaacttgggcaagacgccatgcaacacactgatatctttaggggaatcagacttcagttggtcgaagtcggtttcagtagactctgctacggtgaaaacaagagagtcttcgccagcgttgtagtgtaaatatggagggtcgggacgaggcgggataatcagtttaccggcgtaagggaagaaatgttggagagtgatggagagggaatgtttgaggttgggtacaaagtcttggaggaaagattcagttgagttttggtaagagaagaagaagagagaatcggcgagtgggagagagagccagggggcatcgaagaaggtgagaggaagagtggtggatgcaacggtgccctttgggggagagatgtgacaggtctcgatgatgttataaggttgaagttgagccgccatggtgtgattaagttttgaggaaatgagttcatatttgtctttttataaaaggaaaatgaaaccaccgggcaagtgaagaagttgattctgttacgtactttggtcaaaaaaacgctctcatgtgccccaacctccacaaccaccattttttttggttttcaaaacatttgttggtcctttatgtttgcttatttatcaatggaactcacaaatcacaattagtattttcgaattttataatctttgaaaaccaaaaacattacttttaagtacacaattgaaattcatagctaaatagttaacattactgctgcaactctatattaattgtagagttatggaaaaacaaaagtacaaactaaaataaagttcgttaaactagaattttaccccggaaaatccactatttttatgatatctcctttaccggagttacacaaatacactaaccatatgtctatagtaatctttgtcacatatcaactcaacccactaaaatataattctatcctctctggtttgtgtcgtatcatttatcaaccctagttagatcaataatctcataattccccaatgcgagggcatcattaggattgtttatcagtaccatcacatcatctttttcttgctcttgagtaacgtcacaatcttcttgacgttgttgttgttgttgttgttgttgttgttgttgagtaacttcgcgagattattctccatctagcatcatcgtctcaaggtcatcattagcaaaaccggttaattcagcctcttctggctgctcacgatcttcatgtccctctagcatcgtctcaaggctatcagcaaaaccggttaaatcagcatcttctggctgctcatgatcttcttgtccctctagcatcgtctcaaggctatcagcaaaaccggttaaatcagcctcttctttctgctcacggtcttcttgtccctctagcatcatctcaagctgatcagcaaaaccggttaaagcatcctcttcttacactacttggttccgtaagatgttgttggtgttctccgccacctgagtctgatgagcctgatggttaacgagtccaaactcgttgacgttcgcctctttcttgtatcggatccgacacaagacaaccttttggaggtcatcactctagtgaagagaatactccatcttctgtcaatcggtcttgacaagctttccatgcactctcctgtggtacgtgaaagactgctcgtaacccatcacccttttgcatgtgtccgtccttgatctcttttttcccatcgttgcttctccaagtgccgccttcgcttcctcctcttgcggctaccttccggtgtacgcttaatatcttgccacctcgttcagtaagcggaacaaagtagtaccactcgttgttattgaacaaaggattgtttacgtgaggaagaagccaagggtagtcttggtggatgtccatagttgttatgaaactgctctgatttctctccaccttgtttcgaagataaagcctcaccaaccctagatccgtcggacaaaaccgtgatccaaccggaagaatcttcatatcgatcgtatagattcgaagaagaactagctaaggtacctatataattgctaaggttaaaagtgctctttcgtctcttgtgtaatactgctctgtgaagcagggttttcttgaattcctcgcaggtcaagcggctgaactctctatatgatcatgaatatatagacaacgtgatgggcccaaccggattttcttttgtcagcgattaactattttttggaaagaataagacggttgtaattacatctatttggttatttgaaataataattagataggattcgaatctataatacacttttgttttgtttatcacagattctaacgatagataaagatatattacatgaccatgatttatccacatcaaaatagcatagtgccgtaaaccggctaatcgttttgggcctaatttgggcaattaagcccgttaagaaggataagagcctattgtgtatcaatatcttcggttcgaccaaattaaaccgcaattttaatttcgtgtctggtttggtttcggctaaataattcagaagtggtttagtctgagaagactggaactgtgttttcttttaccttgagctgttaaataaaaagggagagcggtcaaaatcagtggacgacgaagacttcttatcatttaatatctctccatcatcatcttcttcttcagcatcaaatccaaattcggatcaaacatg

SEQ ID NO: 16901 - DNA, 3003 bp, Unknown; identical to SEQ ID NO: 16900
  misc_feature (1)..( 3003): 2750-1469P.txt file - cDNA_ID_1807094; gDNA_ID_1620756; Annot_ID_166984

SEQ ID NO: 16902 - DNA, 3003 bp, Unknown
  misc_feature (1)..( 3003): 2750-1469P.txt file - cDNA_ID_1807104; gDNA_ID_1620790; Annot_ID_50454
cactcggggataaacctgctcccgctgctttagccctctgatatgcacgtaggcctggctcaatcttcttgactgcaccccacataccctgtctcaccccaagctttgcaatctcccacggtattcccatatcttcatggtgaaatagtagtacctcacatgatgtcatctcaccatcgcctctttttgattcaactacaccatggtaatatccatttgagaaactaaacaacacttaaataacagagacaacttgcttagtagtacctgcacggatacaccagcttgaatagtacaagtcgactcgccttggcttgttttgtctaggtacagacgggtattgtactccctgatgcaaatacaaaggagcatacttactataaacacatgaataaaaagagtgaatttaaaagacaatattcacaagaagaacacatgtttaatagctcgcactagaagaataagttggatatttgcttggttactagcagcgaaagaatggaataccttagtaatgcagtaaaagactcggccagcatcccatatacgacggcctataatatactccctgtcgctacaaaagaaggggaactgcaacagtagcggaagatatgagtaaagagaagggagaagaagcaaacagaacgaagaaaaaagagaaacaagtagcgacctttcgcacccattgcacaaccatagtgcccgtgtccttgcaacgctcgagagtagaagaatacaaaagcatatcatcccacttggaacggaactcatcatcccaaaagaagtccctgaccatctcgggagtggcatcctcaaacacagttctgctacggtactggggaggcccattctggcatcatacaaaaaatgattcaacttggaggaacatgttaaactaaacttaaaggaaggagggaggggggtacctcaggatctcgcctccaagcttgatatgagaaggttggggttgatcggtccatcatttgaatccaacaaggaccgccatctttgacctcaaccaacttccatagatgcctaaaatcatcgtccgttacaaacccagttttctctttggaagaaaggctgcgacccaaagagaagcagagttatttatttagcagaagagtaagaaagaaagagagacaagtggggaaacgggttacatcaatgaaatcatctcaaccttacctggggttaacgtggtgagaagaagttttgaggatggaagtgggaagctgaagattgaggaatttaggtgaattggacaagagtttagaatcgagataagcccacttgggcctccaaacccaaccaaccaaaacaccggcagccacagcaatccagagtggcgcaacaaaaactataaggtcagagaagccgaggctgtgaaactcggtaaagaccaaggaactcaatcccatcatctcgccccctccctccgatggttgggtcttgggagatattgaagcgctgggaggagtcgaggagaccaagagattgaagaagaaggagaataaaaacgagagagaagaggataaggattagaatttgggattactgtaggcccaatttcggcgttcgatgcaatcttcgcctctcgtttctatacacacctctctctcaattttatacacgactaccattacccatttctttaataagtggataaaaaaaagaccaaagtgtttattactgcctgtctccactcgtttcgattctgtggtcgccgcatccctccctcccccttctttttttcttttctgttttgctattatatttgctgctaccatttaaaatttttaagattaaagtctttataaaaaaaaaccttttattaattaaaaaagatcttttgcaaaactaagcatatttcataacttaaaaatatagcattagaatagattttgtatataattggtcatataatcgtggttacatagattctttttctaaaaactctttaattgaaagtataaaaagattagcaaataaaataaaaaaactttaactttttacatatgtaaattaaaattaaaagtatctaaattaaaaaataaatataatcttgtatggtgttagaaataaaataaaaattagaaacaatgatagctatatgccatactttccaaaataaatttagaaccaaattcttaccatgatgaattctttgattttcaacccatataacaatataagatatatatatatatatatatacatgaatatagtggaagatgatgagagaattactatatataagatgtaattaaaaatagacagtgcagatttattttaaaacaaaaaaaaaaaccaaaaaaacaatgtaaatttcatagtctaaaattaaaatttagaactaagcttttacaatgatatttttaaactcatactacgacaacaataaaaaaaaaacttaaaactaaacaaaaaaataatatttgagatttgagatatgtggaaggggatgagaaaataaatgaacgagaaaatgagtattttttattttattttagaaatgtttcattttttttgacacaagttaatttttttatagaaaatgtttaaaaaaatatttaagatttgagatatgtggaaggggacgaaagaataaataaactttacatgtgatacaatgttatgagttactgattttaaaaattatactttatttaacaggatgatttcaattggaaaatttaaaagttttttttttaactaaatgttttaaaagttttatgggggaaaaaagaagaaaacagaaatggaatggattaaaatccaaaaaagaaaatatcgacccaggattggtgaattctttaattaggcatttcgagcggaagagacttttcggggccggcccctttttaagttcgtccagtccattccagctttttgtcctttcacatctaaaagcgggagagccaacaaaacaaccttcttcctcgcgaaaacagagagaaagaggaagaagaagaagaagtctctgagaaattttcgaacatg

SEQ ID NO: 16903 - DNA, 3003 bp, Unknown
  misc_feature (1)..( 3003): 2750-1469P.txt file - cDNA_ID_1807107; gDNA_ID_2214527; Annot_ID_134194
tacacttcaagatacgttgaagatgttatgttctacgctaacaccaatcttagttacacaacagatagtcgcgtaaatcaaacaagtaactaacaaaataaacttatttcccaaattattttcaccatttattaaaaagaaaaacggtttttgaaatgtattgttgaaatttacagcggagaaaaatggagttcctgtgggtgaaccggtaagatttttctttccacatgtagcttaaatttattaatttaaattgtgtaatagagacgagtaaatataattgatgtaagaaatgttttcattttcagacgagtgctgattggctctttatatgtccagaagggtttcaagatgttctattatacataaaatcgaagtttcaaaatccagtaatcctcgtcactgagaatggtaggtcaaagtaaaagataagttgggtttataggcgaaatgtataccatcaattgcaaccagttaatgatctctacttgctacattgctaaaaaaaagccaaaataatatatgtaattttagaaataaaaagatattaaaaaaaacatacaattataattttaggaattgataaacttttaatttgtaggtaaatcggatatattggtcaaacaatttgattgcaagtgttttattactttggccctacttattctgatatttacatactttgggggggcattttacctccttaattaggaatgcctagcgagaatgacaaatcattgtccgtgaacatagcactcaatgacgaggcaaagatcaaatatcaccaactccatctcactgctcttctagaagcagtcaggtaattatattaatttcatatacaaagaatttcaaatatccagacttctgtcatagttttacaaaaaaattaataatgttgatgactgatgtgtttttctttcatggaacattgaaacagtcaaggagcagatgtgagaggatattatatatggtcattaatggatgattttgagtgggaatttggttacaaatatagatacggattggtctacgttgattttcaagatggacttaaacgacacctcaagagttctgctctttggtaccatcattttctatccaactcatcctcctatcaaatggactagcaaggaatatctaaaattaatatcttcactttatacaactttcttatgtattcctaagaataaaatgaaacatgcaactttagcagtactgtttatcccagactgggacacgaatatatgtatcaagatttttttgtgtggccatcaaaacatattgggccgtggttctaggcttcaagcactcggttttcagatccgaaccgggttgaatgttgggtcttcagatgacgacccggagaggaatttacttggactcacccacttcatatctatgtactaatgaaaataaaaatatccaacaggccattacggatgatcatcacacaattattgcatgcaccaacccattatcaatatttttgttttttgtttgcaaaacacaattatcaaatcggcaagtagatgttagtcttaatcactggaataatgacgaaactattcgagtgattaactgattatatatatacttttctgtcagtgactatatttagtataaccaaagaaagtatttaaatagtgttgcaatttctttataaccgatctgaagtttgagctgttatgtgattttttatctttttttttgtttttattctttccgctttcgtaaaagctttttataaaccattgatagactgatagtgaaagaaattagtcgacgaaaaaaaaaaaggaaaaaaaatcgacgacaaagttgaccaattagatgccacgtcatcaagactaattgtaatttgtcaagtggtccccgcttcgtagagcccaaagacgaaatcttattcacgtgcttgtaaattaccaatatgcccttcttaagttccggtgaacgattcaaagtcaacgacgacccccatgggtcgatctaaaaaagagttgactggaggataaacaataaaaatatacaacattaggctatatatttgttgaacattaaaaaaagttataaaatttgttgaacaagaaaaggttataaatttagaatctacacacaacaaaacgaggacttgaagacctcgttgtttcctaaagactgaaatctgttgttcctaatgatatgaacatcattaggcgcaaagtatctaatttgaattgtgcgtgcatgttttttctttttaattattgacttattgtgcatgcatgttaatttacgattctaatttctaaagcattagcctctttcgtaacttagtggaactttaagttacaaaaaaaattatgaaaatccattcgattaattaggtgtagttggatttgggtcaccatggaactcatttatattattgacctgtccttttctcacttgatctattgtttatttagagaatatggtaactgttacaagatgtttggtaaattatagcctaaccaagctaacataaacgtaaataatatcgaataactcaattttgaaggtgaaaatggattattgattattatttatatactatggactatggagattggagacagacaatattcacggtaagaataatcgacaatggacaaatttaatatcaaattaaaaataaaaaaatatattaaaatatgctagtgtgctgaaaattttgaagttgaccggtcttcttgatattttttgtaacaaacaaaaaaactagctgcaataggactcaatcaatacgattgaaaaaataataaaaatcccataaaaaaataattgtaatcctagtttgacttctcaattctctgcatctctcaatcacgcatttatatatcatatcattcaagcctttttatcttagtgtctctctataaccagagaaattatttcaagatctacttctcatcatcgttcttttcttatctcttcttgtccaacttcttctgaatcaagacaagagaaaagcaaccaaagatg

SEQ ID NO: 16904 - DNA, 3003 bp, Unknown; identical to SEQ ID NO: 16903
  misc_feature (1)..( 3003): 2750-1469P.txt file - cDNA_ID_1807107; gDNA_ID_2214527; Annot_ID_184804

SEQ ID NO: 16905 - DNA, 3003 bp, Unknown
  misc_feature (1)..( 3003): 2750-1469P.txt file - cDNA_ID_1807111; gDNA_ID_2214501; Annot_ID_133670
tacaagattacaaaactgcaagaaaagaattagaagttcaaacatacacacctccagaagtgggataagagactacaaaaaaattaacgaaggaaacactgctggagatggatacctccagtggaagatagttgggccgatctggcttgccaacatcaaggcatggaaagtacgcagaagaaataggctctgtgtaggtttgcttgaaatagtcatacacagtaatctctctaataggtacctcacgttcaccatctttaatcttcattgaaaacctggaaaacggtgaagaaagtcaagcaaaggctgaaaaagaggacaaaatatatattgatagtacaatcatggggaacctacagttgctgattgcacggtttcgaacttagacctataattttaaattccatgttacggtgtgttgccttaaccctcatatgtttaagcattttcgcagcctgccaagtttcaatgaaaacttcacaagctcaaaacaaaagcagccagtcatgttctcagttattgcatttaaaagccagaactaccttaatccagtcgatttgccgtggtgtctcaacactctgattggctttcaggaattcaataactggaccaggttctaagatcattgttgttgacacatctgcaaaccatcacaaaacgaaaacagttttgcttattaataaaactatccacaattaagacaagtttatgaaagctggagatgagaaaggtatactgaaaaataccaatgttaagcgagagtcctccatgagttggacgaaagctcgaatgtaaacctcgaatacctataacacctcctccaactttcatggggtgcccatcgctatggaaaaatgcctgtctgaccaaaaggcatcccctgcattatcaacagttttctatagtaagcatcgagcatggtcacaaaatgcaaatagttgtacattgattaaatttcaccaacaaagtgaaaatatgataataaaaattggtccattagaacgtagagtatctattttaataaaaatataaactgcacaaaagcaaacagatagaaagatttacctttcagctgcttgctgcctcagtacaatgtcaagcactctaagtgcatcctgagcactcttatctggtgtataagctcctctctgagtgccaagaacagtcttcaacggtatttctgcagcataatgtatctgaaccttgtaacttcttggcaagaaagaacgttttgatcgcttgcaagtaccggaagaactaccaccatcagagacaccacaatcactataaacttaacaagactgcgttagttagaagatcaacaagatctatcttgacaccttgaaacgattaaatatcaatccagataagagggacataccgttttgaaaatgacccttccacgatgactagaaagtcaaattcgttctgtggtagaggaccaacagtatataaagtcttctctccatcatatgccaaccttttaccatcaagatcagaagagtaagtcttgaatagttggtccataagctttctgcttattcctgtcccatcaacagcatcaccgttttctgtggtgatactaacctgcaaaaaaggtaccgatatgtcaaacatctcacacacgcacagacactgatgaaagaatgcagaaaagtgactaatgaatcttacagtgtactggtaaaatactacatccggctgtctcacagaaacattaaagtgattggtgcacaattctattgggttgcctgtggttccaaccccacgtctagttgtgatgtcataatctcgatggctgggctgttctggttctatacttatgggtgacagtggcagagatgaagatgtctccatccttccaggggaaaataatctgcaagagagaaaagtggaggttggttacagtgtgcaaaaaccagtccaaaacacaatgctcaggagactaagaaagaaaagaaaaacaccaaattaagaagacaactccaaaaggtaaaaagctaaaaactttaccaccattgtcgttctaagattttaatttctgggcatatcctgctaaatcgcgagaaatggtataaatttcagatgaggaacaaacttaatctggaaaaaaaatggcacctttaactgttggtcgccttcaaaattgagaaacattacacaaacaaaaactcattcgagtgtgtcatacagtagcataacaagactttcaagagagaaacaacgcagccaaaaccatacaactatcaacagacaaatcctagcttcatgcaaattctccgaaagagagacaaaaacaaaacctagctccgaatcaacaacaattacaacagcgatatctagtgaaaacagcgcacctttgaaagaattaagaagaggatttctagggttccggtgaatcaaagagaggaatttatttagctcatttctcttctccgtcacagtctctttgggtttcccagacaagcaaaagaatggagggaacgtttccagtgatgggaaaattaaaatatatttcacttttcagtcattttttacagtaacaaaatttaagaactgaaataaaaatggtttattccaaaattattaaaccgaatccttcaaaacttattctatttctagggttatgctccggttgaatggattgaaattcccaacttattcatttcaaatagtaagaaataaaatgaatggttgtaagaaattaaattagaccgtcgtggtaattgtaagaaatttcattgaaccggactataaattagaagccggataattaaaccgtaccagcgcttggagaaacgccagacacacgcgcgaaaagaagcgcgtagaccagaacgtgtaggatttgtcacctcagaaaagaaccacggtggatcccaccacacctcagcctcactcctccttcatctccgacgtcatacccaaaccactcttttctcacaattccgattttctcaaaaaccaaaatcacaatcgaagaaatcttttgaaagcaaaatg

SEQ ID NO: 16906 - DNA, 3003 bp, Unknown; identical to SEQ ID NO: 16905
  misc_feature (1)..( 3003): 2750-1469P.txt file - cDNA_ID_1807111; gDNA_ID_2214501; Annot_ID_183994

SEQ ID NO: 16907 - DNA, 3000 bp, Unknown; identical to SEQ ID NO: 3612
  misc_feature (1)..( 3000): 2750-1469P.txt file - cDNA_ID_1807115; gDNA_ID_1620653; Annot_ID_47796

SEQ ID NO: 16908 - DNA, 3000 bp, Unknown; identical to SEQ ID NO: 3625
  misc_feature (1)..( 3000): 2750-1469P.txt file - cDNA_ID_1807115; gDNA_ID_1620653; Annot_ID_163556

SEQ ID NO: 16909 - DNA, 3003 bp, Unknown
  misc_feature (1)..( 3003): 2750-1469P.txt file - cDNA_ID_1807115; gDNA_ID_2926185; Annot_ID_140764
gtagccatcacgatacagacagatgactcgtttcccaattatggtaatgcttcccaagataaactaaacgagtggttaagaattaatccccaatcataccaagtgacagtgtcaaagacttttgtaatacacaaagtcaaatgaaaaaagggaaaagaaattcattctaattgtggtaagtactatgtatccatatatacatatgctttcctaattaacaaaaatcacactataatattctgctctcttatttcccagtacagaaatcttaaccatgagtctaaatgaaaatgattgaaaaattacacgttaaaaacccatattatgttaaacggaattaaatacatgatgtgttatacataaaagtaataaaacatcaatcctatactttaaagtataataatttaggtcatcaaattatgccgtacatgagatctccgagcctactgataattaactttagagagtaaacgagaaaataaaaatctcatttaaatacatatcttaatatatttatccaaccatattctcaaaaacacaaacatggattgaaaaaaataagacaactactaacaaaaagatagaatataccttgagctggagaactcgaagagctttccggtggcagagaagatgatgagagcaacatcagcatcgcaaagaactgaaagttcatcggctttcttgaagattcctcttcttctctttgagaaagtaacttgtctcgctgttatgttatcaatcttctttatccttatcttctctctcgccattttaccagatctctccttcactactgttcttgaatctgcctatacccataacaccatttagattttagaccaagaacaaagaaagaaaccaattggaacggtgttagctaaagagagtttatataatattcttaggaaaccctaatggctagagagagagagaaagagagatcagatccataaaccatgagaagcaaaagaatggacaggactagatgaattcatcaaacactttgcttaagaagaaagaacacagattcacagcttttacctttctgtgagttggaggatcttggattacgttattcaatctcagcacccactttattaaatttgtgagaagataaaaaaggtttttctggtagctgtttactccctaatgtgtgagtgagagagaaagagagagagagatggtgactgtgtttgtgttcaagattggaaaaaagagtctgctttttttagctaaacagtgatctatacttatcaatgggccatatgttttgtatcccttttgattatgtctttttcccaaactataatcattaaaaataacacataaacacactttgtgttttgtctgactgagctgccagacgaagagactgctacagttatgatttaataatttacctaaccttctaattcaattagtctgtcatggaataatgtggaattgtaactttattcagtagcgggtttcctagttttactgttttagtctagttttgaataacttcccatctaaaaacaaaataaaaataaatgacgtgaaatactactccgtataagttaatagatttatatatggctaggtcaaataaaatgatacaaaagttacccactatcaaaaatgtaacatgataaaataaaaaaacataattggaaaatgaaagaaatcacaatacacaaggaactacgtaccaattctaatggaaagaaagtttggttactttttttattcgtaattagaagatgctgttcatcagttcatctacctttttggttttggtttattacaaaagttgtgtctattaaatatttcatgtcttttttatagtctttcacctatatatgctagatgcgacacctgataagatcactcgtctcccaccgtcatcattatcttttatttttgggtttgatcagccatttatacccttttaagttttaaccctaattagaaatgatatatcaccggactccggtaactctagggtgatatcatggccgacaagtatcttgtaaattttttctcccaaagtacaactgaaaattaaactaaactgataaaattcgtgggaaacgtaccatctcataatgatacatgtgaaaagtaatatagatgactttaagacttcaatctgtataagattaagttctttatgactaaaacaaataagcactaagaatgtgagacagatttagtattgtaagcctttggttttgtttatgggaggaaaaaaagcgagtgcaaaatcagaaagtgagagtttttggtgtagatcaatgttattggtctttaggatcttatagtaatatgttgaaaatatatttgggacgagctagaagactcccaaggtcatataaatgtgaaactaaacagtaattgtaatagtgttcaagaagaatcatctaacacgtttaaaaagcttagacttgttgttgacccttgttaccctttcatatatcttgtgtttcttacttgagtttagaaaaagaaaaatcttaagcctttcatttggaatgcttggtcatcttgtcagccctctaggctcatgtatatctcccgattgctcgatcccgaaagtcttcactaaccttcgttgtcagcttaatcctcaaagttttgacttccaaaaataaattatgtgttgtaccctttatatcaactcacattttgcttcctcgtaaacaatgtttttttttttctcctccgagatcgaaccatcatttatagtacttactacttatttccttaaactcataacaagttcgaaatttgggccatattgatgtcttaaaaataggcccatataagaacaagaaatcataattcacaaaaacacagaaccctccgtctcatgaagaagcttcacgataacgacggcaaatggtaaaacgtgaaccacctcaccaccagacacacaaaaagacgagaccgatcggcgatcagtagacttaaccaaactcgcggtgaaacagtcggaatccaccgctataaggaacgatg

SEQ ID NO: 16910 - DNA, 3003 bp, Unknown
  misc_feature (1)..( 3003): 2750-1469P.txt file - cDNA_ID_1807115; gDNA_ID_2926185; Annot_ID_200569
gccatcacgatacagacagatgactcgtttcccaattatggtaatgcttcccaagataaactaaacgagtggttaagaattaatccccaatcataccaagtgacagtgtcaaagacttttgtaatacacaaagtcaaatgaaaaaagggaaaagaaattcattctaattgtggtaagtactatgtatccatatatacatatgctttcctaattaacaaaaatcacactataatattctgctctcttatttcccagtacagaaatcttaaccatgagtctaaatgaaaatgattgaaaaattacacgttaaaaacccatattatgttaaacggaattaaatacatgatgtgttatacataaaagtaataaaacatcaatcctatactttaaagtataataatttaggtcatcaaattatgccgtacatgagatctccgagcctactgataattaactttagagagtaaacgagaaaataaaaatctcatttaaatacatatcttaatatatttatccaaccatattctcaaaaacacaaacatggattgaaaaaaataagacaactactaacaaaaagatagaatataccttgagctggagaactcgaagagctttccggtggcagagaagatgatgagagcaacatcagcatcgcaaagaactgaaagttcatcggctttcttgaagattcctcttcttctctttgagaaagtaacttgtctcgctgttatgttatcaatcttctttatccttatcttctctctcgccattttaccagatctctccttcactactgttcttgaatctgcctatacccataacaccatttagattttagaccaagaacaaagaaagaaaccaattggaacggtgttagctaaagagagtttatataatattcttaggaaaccctaatggctagagagagagagaaagagagatcagatccataaaccatgagaagcaaaagaatggacaggactagatgaattcatcaaacactttgcttaagaagaaagaacacagattcacagcttttacctttctgtgagttggaggatcttggattacgttattcaatctcagcacccactttattaaatttgtgagaagataaaaaaggtttttctggtagctgtttactccctaatgtgtgagtgagagagaaagagagagagagatggtgactgtgtttgtgttcaagattggaaaaaagagtctgctttttttagctaaacagtgatctatacttatcaatgggccatatgttttgtatcccttttgattatgtctttttcccaaactataatcattaaaaataacacataaacacactttgtgttttgtctgactgagctgccagacgaagagactgctacagttatgatttaataatttacctaaccttctaattcaattagtctgtcatggaataatgtggaattgtaactttattcagtagcgggtttcctagttttactgttttagtctagttttgaataacttcccatctaaaaacaaaataaaaataaatgacgtgaaatactactccgtataagttaatagatttatatatggctaggtcaaataaaatgatacaaaagttacccactatcaaaaatgtaacatgataaaataaaaaaacataattggaaaatgaaagaaatcacaatacacaaggaactacgtaccaattctaatggaaagaaagtttggttactttttttattcgtaattagaagatgctgttcatcagttcatctacctttttggttttggtttattacaaaagttgtgtctattaaatatttcatgtcttttttatagtctttcacctatatatgctagatgcgacacctgataagatcactcgtctcccaccgtcatcattatcttttatttttgggtttgatcagccatttatacccttttaagttttaaccctaattagaaatgatatatcaccggactccggtaactctagggtgatatcatggccgacaagtatcttgtaaattttttctcccaaagtacaactgaaaattaaactaaactgataaaattcgtgggaaacgtaccatctcataatgatacatgtgaaaagtaatatagatgactttaagacttcaatctgtataagattaagttctttatgactaaaacaaataagcactaagaatgtgagacagatttagtattgtaagcctttggttttgtttatgggaggaaaaaaagcgagtgcaaaatcagaaagtgagagtttttggtgtagatcaatgttattggtctttaggatcttatagtaatatgttgaaaatatatttgggacgagctagaagactcccaaggtcatataaatgtgaaactaaacagtaattgtaatagtgttcaagaagaatcatctaacacgtttaaaaagcttagacttgttgttgacccttgttaccctttcatatatcttgtgtttcttacttgagtttagaaaaagaaaaatcttaagcctttcatttggaatgcttggtcatcttgtcagccctctaggctcatgtatatctcccgattgctcgatcccgaaagtcttcactaaccttcgttgtcagcttaatcctcaaagttttgacttccaaaaataaattatgtgttgtaccctttatatcaactcacattttgcttcctcgtaaacaatgtttttttttttctcctccgagatcgaaccatcatttatagtacttactacttatttccttaaactcataacaagttcgaaatttgggccatattgatgtcttaaaaataggcccatataagaacaagaaatcataattcacaaaaacacagaaccctccgtctcatgaagaagcttcacgataacgacggcaaatggtaaaacgtgaaccacctcaccaccagacacacaaaaagacgagaccgatcggcgatcagtagacttaaccaaactcgcggtgaaacagtcggaatccaccgctataaggaacgatgatg

SEQ ID NO: 16911 - DNA, 3000 bp, Unknown; identical to SEQ ID NO: 12492
  misc_feature (1)..( 3000): 2750-1469P.txt file - cDNA_ID_1807129; gDNA_ID_2214555; Annot_ID_134748

SEQ ID NO: 16912 - DNA, 3003 bp, Unknown
  misc_feature (1)..( 3003): 2750-1469P.txt file - cDNA_ID_1807133; gDNA_ID_1620774; Annot_ID_50248
agtactcatcgaagcttatcaccgtttcatgcagaatttgactttttgctatgggcaatagatgcatgatctctattagcaatacttctggtacttttgcttcagattgttcagacctaatttctatcattgacaaccaagacgattagccgacattcgcagcggaattggcttcctatcgatctttagtttgtttttttcttcttttcatattagatttcttcttcgtagttttactgttcgagatgattgtttagctaaaaaagctcgggatcgaaaaagtcttttctcccatgaaagcacatcggttcctgaatggctttctctagcggagagtttattaccgattacttaaataaaatagtgtttgtgggggggaaaaaaaattagtctcctacatttattgaaatttctttacttaattagatcgccaaatttatgaacttgtttaggtcaataatttcgatggtaaaaactaaaatcataagacaaaagaaactcaaacctttttatatgatttaacttatagaataacttgttacatatgatatgtttgtatgaaagaaagaaaagagaaccgagaaaaataagagaatgaaaagatgaaagaacagagaacaatttcaaagatatcttatatagtagagaagttaatggataacttggttttattaaaatgtcgaatgcaacatttctaatattctagttaggctgcctatgtgtttaacttcatgcctttcatgacatttcatctcagtacttggagtttactattcaagcttcgtttgcaaacgcacattcaaaacatcataagatttctcgaagatactacacagtagccatacataaaacaattcgttctacaaaccagatcgaataacatgtgtgaaatagattcatctgcagtacctttttaacgcggctagctatcaggaaacagagtgcttcacttgtatataaaaaaaagaggttcaagcagaaatacaaggcatcgtaaaacccgatatggtctaaaagatataactaagcaagtttgcatatgtcctcgtactcaatggacttgatgactcttccatcatagacacctttctcgatctgcactttagcacagaacttctctgtatccacacccaacaaccttgcattcgaaccacgatatgccccattcactatcttcaccatccctccaatttgtggaagcacagtctctagctccttttgatcaactctcaacacatgtttagaatcaagcattttgatctccccaacataattatcaatcactttcttcacaacacctttttgcttataataccctttctctgccaaagccttactcatcaccttcacaatgatcccttcgaacaaccagtaatctttccgattcatcctctccttcttcttctcttcctccttcatcaactcatccaaagctgatctcctctccttctcgctcctcccggagtccccacttctcttcctcttctcccctctctcaaccttgtcattctcttcatccccaaacaaaagtttcgagctttcccctctctctttacccgtagcaacctgtttaacacctccaccaagagcaaatccaaccttgaccccactcttcaacctcaagtcttcatctttcttcctctcatcatcaccatcatccacaacttcatcattaccactggtttcaccttcaccaccaccaccattcaatttctcagcagctctctcaatctgtctctgaatctccctctcttgcttctcctcctcagctaaatcactcttaactctcttattcttcaacctctccttaaacaaagtctcagaatctctatctatataagtaataaaccaacctttaggagtttcttcaaccttacacttaccagttttcccaagatgcttgataaactccgtcaacgtcgcccactccgtcgaattcatgtgaacatgatgtctatcgttaatatactcattgtagacaacagtggcagcgatacgagagaaacggtggctccgcctcatcagatcgagaaacgtctgctcgaattcttcagagtaaccatcgacaacacgagtcggattctgcccaaaaacttgcatctgcctctggtgagattcgctcatacaatgacacttgaatccattctcgtctcggcattgtttctgacacatctgacaataccatcgaagcttttgaagtcctttggctttaattcgattcgcaatcgcctttggggttagaaaatcgttcttacccatcgaatcttcttgggtttgtcgaacaaaattaaggtgttgggaattgaaatctagggtttctcaggtaacaaccactgatcgagaatgatgaagattcaatcggcgaagattagctaatatattgattgatgataaaccgaaactcataccaaatataattgtttatcctgaataccgaatacgacccatcaattaaagcccatacaatactgggcctataagaaaagaaatgtaaattgtggggaaaaaaaaaggtaaatttacaactttataatatatgcctcaaataattttaacagcttgtttggtcttatatcttgtgatctttgactttcagtctttcacaatggaaattattgaatcttgcatttttattgaattaatttcctatttgtaacagaatactattattagagatatattgattgagaatcgtaaaagataatgtagttgtgtgacaagtgagattcaagaaaagtcaactatatacaacgagagtagcaaaaaagaaataaattcaaatgatttggaaaattgaagaggggaccaattcttgggggtaaggagtagactcgtcgccagagctgactttgaaaacttgacttggtctcattcttctcatctactgcaaaaaccacaatcagtatataacaacaacacatgagtgacttaattctcatagaccaatacagagatacaaagcaatagaacaacaagaacaagaaaacagagaaaaaaacaatg

SEQ ID NO: 16913 - DNA, 3003 bp, Unknown; identical to SEQ ID NO: 16912
  misc_feature (1)..( 3003): 2750-1469P.txt file - cDNA_ID_1807133; gDNA_ID_1620774; Annot_ID_167639

SEQ ID NO: 16914 - DNA, 3003 bp, Unknown
  misc_feature (1)..( 3003): 2750-1469P.txt file - cDNA_ID_1807141; gDNA_ID_1621194; Annot_ID_57531
gttttcatacaaacaaatgttgtcgaccttgttttattattatattgtttgcttgatattcatcgtttttatagggcggtgccaagaaagttataatttctgccccttctgctgacgcacctatgtttgttgttggagtaaacgagcacacataccaaccaaacatggatatagtctccaatgcaagttgtaccaccaattgtcttgcccctcttgccaaggttggtaatgttgcacaataattttaccctcatttcattgctatgagattcattaaggtcaactaaactgtatttggcaggtggtgcatgaggaatttggtattcttgaaggcttgatgacaactgtccacgcaactacaggtctatataacttactctcctgctgcagatcactgaatgttgataacctgattacactaacctgtgtgttttggttattttttctttcagctactcagaaaactgttgatgggccatcaatgaaggactggagaggaggtcggggcgctagtcaaaacatcattcctagctcaaccggcgccgcgaaggtacacaaaaactcacatggttatcgcaagcatgtaattatcctaaatcgggaatcatatctgagctgtggttttttgatcaagtaggctgtaggtaaagttcttccagaactgaatgggaaacttacgggaatggccttccgtgtaccaacatcgaatgtttctgtggtggatttaacttgtcgacttgagaagggtgcctcttacgaagatgttaaggcagccattaagtatgcttcctaaaattttattgcccgaccagatatcgtcatcgaaacattatcgtttaatgtagaactcttaataacctctcatggtttaatgtaaacctctaacaggcatgcctcagaaggacctcttaaaggcattctcgggtacacagatgaagatgtcgtctccaatgatttcgtcggtgattcaaggttggtctctctccttttcttcatagtcatctgaatctttttttgtggttgaccaatgtggtgattccaatttggttataacaggtccagtatctttgacgccaatgctggtattggattgagcaagtcctttgtgaaacttgtctcttggtacgacaacgaatggggttacaggtacacttttgtttctcatcttatatttctcatcctagctaacagttctaacacttaaaaatcttctcccattttacttacagcaaccgagttcttgaccttatagagcacatggctttggtagctgccagccactaaatacacacaccagttcttgcagaagcttgagtctttctgctttttgcgtaacctgctctacaaagccggtttggatttgttcggttcaattaggtgccactgtgctaggtgttttgaaatatttggcttgaatctcgagcctttactctatttttgttctgttccagtatcagcaaccatgatttggtccaaaagactgaaaaactgtgcgacttacatctatgaataaggggctaagctagttgtactttaccaaaaatagcttaccagtataagcaacgtttggatacttcttgatagcgcatcgttagctttgcccgtgcttatgacaaaagatcactaaccactgaaacatattttttacaaatgaaaacagaaattgaacttgattagcctgtgtaaccatgtttcagaagaaagcttactcgttttttcatccgacgaaactcgtttggtattggcgattcctggaagggaagcatgaagatttatccattgagatggacaacctcatcatctatctcctctgtcttgtttctgatctctttcaaaacttgtttgtcttttctctatcatcaccacttaagaaaaggtggctgtttttgagttaacggaagtagactcactcaagtgaggctatagctaaggaaggacatgagttatttattggccaccatgcggataaggagaactcttgaagtaaggttactcatatattttcacttgccccgatatttcatggaaactacaacattttccacgaactattgtttattacatatgttttctaagactttatttattacagatatcgcctgaaatttcgtattattacaaaaacacacgtaaattttgtcaattccaaatatctccaaatttttgtttgttacatattgttccctcaagtttttgtttattacagattcccctgaacctctcatggtttgatgtaaacctaaaacctcaaaatcaaacaagtttgtcacagaaagatatatagtctccaatgatttcgtcagtgattcaaggtctctcttctttctctaaatacgtaacaactaacacggaaggcatttcattggctacaattatttcaaaatttatcttacaaaaaaggataatagagtgtgatattgttcatcagagacgtccacgtaagggtaaactaatcagtatatggacaaaaaggtacttgtttatctacaccaggaagaaaaacaataccagttttccggtccacaacttttgcatcaccatgcatccgcagccacgtgtgttcttatgaatattaaaatctacttatttcgttatacgacaaacgaaagatactgctttgttgcgtagacaaacaaacaaaatctcttgataataccagatattcttaattaattagtacgttttaaactcaacatacccataagaaaatccagttagctcatggtttcatgttttccaatagatatatgtgtatataattaaacgctttgcatcgtttgtgatttgcatgttggaaataataatgttttttttttgctaatcaaggtttgattaaggaaaaggagtttggactttggacctttctactacaaatacatgtggccctttttggccaacaccaaaagttccaaaaaagaggccaaaaaataagcaacaacttttgattctctcgtaacttcccccacaaaatcagcagagcgagagcgagagcgatcggttatg

SEQ ID NO: 16915 - DNA, 3000 bp, Unknown; identical to SEQ ID NO: 6292
  misc_feature (1)..( 3000): 2750-1469P.txt file - cDNA_ID_1807145; gDNA_ID_1621088; Annot_ID_55448

SEQ ID NO: 16916 - DNA, 3003 bp, Unknown
  misc_feature (1)..( 3003): 2750-1469P.txt file - cDNA_ID_1807145; gDNA_ID_2926212; Annot_ID_142035
atatttacgactagtttgaaaaaccgtgagctgacacaagctcattgctaatgctacagtaacagctaccttcacttttaactaaatgacagaccaatcattttaacctctgttttcttagctggcgcgtgacagacactctccctctctccatgcccataaaatctcaaagactgtttaaaaaaaaaaatgttttagctttaactgctttttttttgttgttggtgtaatgatatcacagagagaagaaagagaagagaagaagcagagagtgatgggagataagaaattgatttcatcttcttcttcttcctcggtttacgatactcgtatcaatcatcatcttcatcatcctccgtcttcttccgacgaaatctctcagtttctccggcatattttcgaccgttcttctcctttaccttcttactactccccggcgacgactacaacgacggcgtctttgattggtgtgcacgggagcggtgacccacatgcagataactcgagaagtctcgtttctcatcatccaccgtcagattctgtgcttatgtcgaaacgtgtcggagatttctctgaggttttaatcggcggaggatcaggctcagccgccgcgtgttttggtttctccggtggtggtaataataacaacgttcaaggaaatagctctgggactcgagtatcgtcttcttccgttggagctagtggcaacgagacagatgagtatgactgtgaaagcgaggttttttctcaatctctgttttttatcttttgcatgttttaaaagttgattctttgtctctttcccgagaaaatgtttctacagagatttctctttaacggatctgtactttattttcccccttaaaatccgcaatttttttggttgtgattttgagtgaagttttgtcatttgtgagtgtaataatgaatgcacaccgagtgtttgataatttgcttcaatgaaaatacaggaaggaggagaagctgtagttgatgaagctccctcttccaagtcaggtccttcttctcgtagttcatctaaaagatgcagagctgctgaagttcataatctctctgagaaggtttggtttagagtctctcccaaaagtagaaactttcttatttgagatttatgtttatctttcttgtaacagaggaggagaagtagaattaatgaaaaaatgaaagctttacaaagtctcatccctaattcaaataaggtaatgatactatatatagagagacatctacatgaatcattctattttctgtagattctttttgtgtctgattattgcaatgtgtttattggggaagacggataaggcttcaatgcttgatgaagccattgagtatctgaaacagcttcagctccaagttcaggtcactaaagataccttatgtttatcattataaccaaaatcctaaaaccagtctatattctgacataagtctttttttgttctgatatttgcagatgttgactatgagaaatggaataaacttgcatcctttgtgtttacctggaactacattacacccattgcaactctctcagattcgaccccctgaagcaaccaatgatcctctgcttaatcataccaatcagtttgcttcgacttctaatgcaccggaaatgatcaatactgtggcttcttcatacgctttggaaccttctattcgcagtcactttggacctttccctctccttacttcacccgtggtgcgtagttgaattacacatttttcattctataaccataaagctagtttgcttactaatttttttttgttacttaaggagatgagtcgggaaggtgggttaactcatccaaggttgaacattggtcattccaacgcaaacataaccggtaaagtcttgttgttttggaatcctaaggaagttttaggacatttacaatgttaataacgttacgatatttggggatttgcaggggaacaagctctgtttgatggacaacctgacctaaaagatcgaattacttgaacagtgtcccaacttcgggatctctatgtgttcttgtttcttagaacgcaagccataaagctgtctgacaatggagatgcatttaactgtctttattttttctaaggttctatttaaaatcaattgttggtgacacgaattctagagtctaatcttttggatctaatagctatatataaaaaggactgaaattttattacaaagtaattgactaattgttagattgttgtatgtttatggtggatgtaaattttctagatcatcttcgtattgtatttgagagtttgatactcgatggctttggatatgtaaattaccccgataagcttctagagaagttttcgattctacaagatggatttggtatctttaaggttgaccatgttcttttggtatctcttgttctcaaattgatcatttacaatacaattttttaaaatcttttacccttcacatttttgtacttacatttggtatattagtaatttcatttgtaagtgtcttttaaaagtttttcatttataagtgttgttttaagatcttttatgataattaaaaaatgcttaaatatcttattaacccttaattagtatacttatagctttagttctccaattaatctttagtaagtaaaagggacagagctagaactttatttaaaattggattgaaaatacataaatcttatatttttttcaaaaactagtattgaacatacaatttatttattttattttatttgtaaaacaacaataaaagtaaaatcatacaacgatatattttgaaaaaaggaaaagtaattaggattctctttcggtgaaaatatcagagaacaaaatatatttgaatgcgactgtagttgaaacttgaaaaaaatttagatactaaagtttcgtcattctctttttgttaaagactcagtgacgaccctctcctaaaaaacactcataaataaactcgctggagacgccggaaccaaaaacagagttctaatg

SEQ ID NO: 16917 - DNA, 3000 bp, Unknown; identical to SEQ ID NO: 4220
  misc_feature (1)..( 3000): 2750-1469P.txt file - cDNA_ID_1807149; gDNA_ID_1620691; Annot_ID_48611

SEQ ID NO: 16918 - DNA, 3000 bp, Unknown; identical to SEQ ID NO: 4220
  misc_feature (1)..( 3000): 2750-1469P.txt file - cDNA_ID_1807149; gDNA_ID_2926159; Annot_ID_139647

SEQ ID NO: 16919 - DNA, 3000 bp, Unknown; identical to SEQ ID NO: 14172
  misc_feature (1)..( 3000): 2750-1469P.txt file - cDNA_ID_1807153; gDNA_ID_2214704; Annot_ID_136934

SEQ ID NO: 16920 - DNA, 3000 bp, Unknown; identical to SEQ ID NO: 7668
  misc_feature (1)..( 3000): 2750-1469P.txt file - cDNA_ID_1807165; gDNA_ID_1621156; Annot_ID_57019

SEQ ID NO: 16921 - DNA, 3003 bp, Unknown
  misc_feature (1)..( 3003): 2750-1469P.txt file - cDNA_ID_1807205; gDNA_ID_1620748; Annot_ID_49748
gcacccaaccaagacaacgttataagaacttaagaagagcaaaccataagcatacttagttaaggtttttaacgaggacaaggaaacgaggaaattaacagtgcataaagaatatatagataccaaatggaatgaatgttttttttatatataattaaatcgaataaatgttattagtaatagtattactaaaacaaaactggtgaaacgaaacagaaatgtgatttaaatggatataataactagaaaatttgatcaaatgcttcgtatgatttacctataggcaaaacgttcgtgttcgatacaaaactaaaaacaaaaatctttgaaaaatacattgttatatcaagctaattttctaaagatgcgggagctagtggaaattgtgatttcaaactccttggttgatcattgtaaagaataagaaaaaaaaaacacgatcagaaatcataatgaaaccaatgctcactttttgttccaccattttttagatggacccggtaacaattagtggatctagaatcttcagtttggattataacttatcgaaaacagtttagtattttgactcaattctgtacattggaatcaattatgaacaaatttcattatatatagttagctcatcttattcttcttaatttgtgttccgacataaaaaaacatagaaaccgaaatagattcagttagcattcacttcttattgagaaaatatgtaggttaaaattgtaggtttttgccatgcatattaccgacgtagataggtttggtcggaattttttctacttctttaataagtttggttagatcattcatcttatatgaatatgtaaagaatgcttttaattatggtcgtttcgtttctttcaccagaaacaaggaatgtccgagattcacttattaaattaatatatacttgatctgattcacacgaaaagacaatcttggagtatcaaactataatatcacttattatactttgaattactaggaatttttatcctccgatttcataatgatcctactaacattggatcacaacaagttggctcggttatgaatttggtttgcaacatatacagtttttcaaccgctgttaattttagtgttaatcaattatcttggataattgttgatgcaagatcagacattatatccatatatataaatatgttatatagatatgtattaatatctttagccaaagacgataagtctaaaatcatcaacattttttgtccgggtcaatgtaacaactaacaactcctactgtagactagctagttggtcgtctgatcgtctctctgtttgttagcgatctcaacgggtacatgaacagatagttatgcattattgatactcaaattttcttagttgttatgtttttaatatgtaactagattttaatccgcggtacaccgcggagataatttatttttttaagttaatatatataaaaattttgcaaattatatctatttataaattatttttattttatagtttacaattgttattaagtaacgtccttccaaacccgttccgccaaacccgtcctgtaaaaaaagctcgcggtaccccgctaatttaaatttataattaaaataaatattttacgggattgcaattgtgttttagtttgtcaaacaaaattttgttttaaatagttgtcgaaatctagttcaaattttgaagaaataagatttagtgaattgataaaaaatgtatttagttgcgttttgctcattttaagggattgcaattgtcttttgggttgtcaaacattttttgttttaattagttgccgaaatttagtttaaattttggaaaaatctgcgtgatatatgggattggaatatatttagaatgtttttcgtttgttaatcaatttattgctaaaaaactaataattaaaagtcagtggcagcctttgtaaataagttccaactccaggatttatttcacaaaatggctgcaaaaatgtatatatagattcacccatttatttattattcatagtattatagtactatcttcgtgtctttttacttggtgtttaaagtttttgtacaccgattgaatcatttttaattttatttttttaaacatcaatttatctaattaaccaatagaaaaaattatctgtatattataaatcatcaaaaccaataaaaaaaaactaattaatattgcattaaaaattaaaaacatcatctaatttagaacattttttcctactataacattaacatcaactaaatacggagaaaacgttgtactgaggttcttgcattttaaaattttggaaactaagaatgttaaaaaaattatggttacaaatatatatatagtgttataattagtacttatcgtacttaataaaaaagatactaattagttgttgttatattattttctacaaaaataaaatcattcaactaaaatgttctatttgtcagtcgcttcacaaaactatgcatctaccataccagtgatcataattataaaactctgtttttgttttttgtctttacaaccacttaaatacgtcatagctatatatgcattattacaagttctcaaggtggcgcgcgaatgttttaattaaaatattatgtttttcttatgtatttcatctttaatcgaacatagaaaatgtgaaagatttggagcatagacacgaatcagttttttttttttacacgaatcaatattcatagggtaaataatagacaaacgccaacaaaaaaaaaaaagagaaattcacaacggattatcggctcaaattacaaaacaaaaaaaaaatacagagacaacagtatacgtgtaactttccgaatttttttttttttcatatcaaaaataaaagataggccaagataagaccattataaaatgtaaagaccgacccgaaataatactcatgtttaaattatcagcaaagagccaagagaggaaacatcacacattggtgacaaaaattcttaggaaaaccaattaatg

SEQ ID NO: 16922 - DNA, 3003 bp, Unknown; identical to SEQ ID NO: 16921
  misc_feature (1)..( 3003): 2750-1469P.txt file - cDNA_ID_1807205; gDNA_ID_1620748; Annot_ID_166720

SEQ ID NO: 16923 - DNA, 3003 bp, Unknown
  misc_feature (1)..( 3003): 2750-1469P.txt file - cDNA_ID_1807213; gDNA_ID_1620671; Annot_ID_48161
aagttttagaaaatcattattattggaacataaggaatatctttaatcttgaaaattttgaaactggaaaaataaattaaaatcttttttttaaaaaaaaacattgattgaaaatatttgaatttagttatatgaatactattggttcagagttatggaaaacagaaaaatgtttaatgtcactgattcagtgaatggtgttgtcataatgtgtcttaatttatgtgaaacttttacaaaaatcattatttttaagaacaaatgaagtatctttctgtagaaaattttgaaatttgaaagagattttcatctcaattcatttattgtgaaatggttatataatgaagtagacaagaaagtctattccttgtattttattacattaagtcgccgagaaaacttttttgctttgttggagtgatcggaatggcgaatgcatcacagttatctccgacaaacaaacacttcttcaagcctcttctccccggattccagagaaacctcgtacggaatctctctgtctctgtctttctctcaatctgtatgaacttatagtctcacggttctgtttctctgttgcagaatattcctgtgaagttcttctccgagcacatcgagggaaaacacgagggcgagactgtaaagttgagagcagatgcgtcgaagagaacatgggaagtgaagatggatggcaacagactcaccgaaggttggaaagagttcgtggaggcacatgatcttcgtatccgcgacttcgttgtctttagacacgaaggagacatggtgttccatgtcactgctttgggacctagttgctgtgagatccaatacccacagtctatcagccatgaagaaggcgaagagagtggtgaagttggtatgattgaatcatcattcagtgaccacatttacatttatttagactcttttctattcttgaaacgtttcaatttctgattcagaaatatccgagagagaagttgaggagaatttgcaaaaagaatatgatcagtcttcagcagatctgaattgttttagccaatccgtaacgcactcaaacatatcaaatgatcttgtggttagtcagattaacggtttctttggtgttgttatgtttatttatagttcaaatctgtgtgagtgtatataagtcccaatgcaatttgatgactgatgcagactctgcccagggatttcgcaaaacgaaacggtttagacaaaggaatgcatgagatagtattgatgaatgaagaaggaaagtcatgggaatcagaagtaaggagtagaatgtctggtcaggtttttattgttggaggttggaaaagtctctgcagcgaaaataaattaaaaggtggagattcttgcacattcaaactgctgcaaaatgcgaaaacgcccgtgtttcagctctgtagccgcatcggagaaagtcggtttgtgaagttaactcctacactaaacagccttgagattggcaaacaggtgacttttcgaaacctctatctctggtttcttcagtgcagtgtctttttaattctgaatacttttgcagcatctaccggtaagtttcacgaaagggaatggactcatacatccgggggagataattctggtggacaaagacagagttgaatggtcgatgaagcttcaggttgataatagaggagggatgcatatatttggtggtaatgactggaaaagtttctgtgccgcaaatgaagtaggcgcaggggagtcactaactttggagttgattcgaggaggcttaagtcctttattcaagttcttctccaaggtcagtatttcaaatagcttgcagtccacgttttaggttttgctaaatcaaacaacgacttgttttcagatagagcaaccctcattcgaagcagaggataggagacacaagagagctcgagtccataatgggagccaggaaacagataagggagaaccttctcgagcaactaaaatgggaccggagcttgagaaaagggagaagacagctgaaaaaggagaaccgtctcgagcatctaacaaatccagtggtaaacaaggaaacttacagaaaacgcaagcttgctctgtcacagatcacgtggctaaggtgaaagagagcgttgtagatactttaactagtatcagacggttccaagcagagcttgaaacaatggaacagaaattagaagattcattgcaggaaatcaacaagttaagttaggtatgatctgtaatctgtaatattatcattcttataacaatcttttagtttcggttttggttttgttcaaatttctaacaatttgaatttggcacagagagaggagaagataacatcttcaagtaataatcaagtttaaatgtgaaactgaagactcttgtaacctctgtttttattatatgactttgtttaagatgtagttgttttattttcccttttttcattttgttaattaatcgtaaagtttataatgttcttgttctctgttggcggactaatgtcgtatttccataatatttattaattagtatctgataagtgataacaacttaaaatggttttttttttttccttatctgcatcactgcattgaaatggtaaacaaaaaatgactttatctgctgcaacaagccatagccaaaaacaatacaaaaccaatatacagtagttttttttttttttttgtcgtaaccaatatagttttattaaggaaaagaaaagtaatcatagccaaaaaaaggaattattacaaggtaacgacaaaaaacgtagttgaaaaaggaaaacaaaaaagcatataaaggcccaatctttgtaattgcattggaaaggcccaaacccaacaacatagaacactgtcttctctactaagtaacaaaaatcaacgaagcggtaattcttgaacagacaaagaaaaaaaaaaggtgaatacttgaaatatataaaagatacagaagacacgagaagggagaagagatcgatgattttgagaagcgaattagatg

SEQ ID NO: 16924 - DNA, 3003 bp, Unknown; identical to SEQ ID NO: 16923
  misc_feature (1)..( 3003): 2750-1469P.txt file - cDNA_ID_1807213; gDNA_ID_1620671; Annot_ID_164115

SEQ ID NO: 16925 - DNA, 3000 bp, Unknown
  misc_feature (1)..( 3000): 2750-1469P.txt file - cDNA_ID_1807213; gDNA_ID_2926200; Annot_ID_141478
ttttagaaaatcattattattggaacataaggaatatctttaatcttgaaaattttgaaactggaaaaataaattaaaatcttttttttaaaaaaaaacattgattgaaaatatttgaatttagttatatgaatactattggttcagagttatggaaaacagaaaaatgtttaatgtcactgattcagtgaatggtgttgtcataatgtgtcttaatttatgtgaaacttttacaaaaatcattatttttaagaacaaatgaagtatctttctgtagaaaattttgaaatttgaaagagattttcatctcaattcatttattgtgaaatggttatataatgaagtagacaagaaagtctattccttgtattttattacattaagtcgccgagaaaacttttttgctttgttggagtgatcggaatggcgaatgcatcacagttatctccgacaaacaaacacttcttcaagcctcttctccccggattccagagaaacctcgtacggaatctctctgtctctgtctttctctcaatctgtatgaacttatagtctcacggttctgtttctctgttgcagaatattcctgtgaagttcttctccgagcacatcgagggaaaacacgagggcgagactgtaaagttgagagcagatgcgtcgaagagaacatgggaagtgaagatggatggcaacagactcaccgaaggttggaaagagttcgtggaggcacatgatcttcgtatccgcgacttcgttgtctttagacacgaaggagacatggtgttccatgtcactgctttgggacctagttgctgtgagatccaatacccacagtctatcagccatgaagaaggcgaagagagtggtgaagttggtatgattgaatcatcattcagtgaccacatttacatttatttagactcttttctattcttgaaacgtttcaatttctgattcagaaatatccgagagagaagttgaggagaatttgcaaaaagaatatgatcagtcttcagcagatctgaattgttttagccaatccgtaacgcactcaaacatatcaaatgatcttgtggttagtcagattaacggtttctttggtgttgttatgtttatttatagttcaaatctgtgtgagtgtatataagtcccaatgcaatttgatgactgatgcagactctgcccagggatttcgcaaaacgaaacggtttagacaaaggaatgcatgagatagtattgatgaatgaagaaggaaagtcatgggaatcagaagtaaggagtagaatgtctggtcaggtttttattgttggaggttggaaaagtctctgcagcgaaaataaattaaaaggtggagattcttgcacattcaaactgctgcaaaatgcgaaaacgcccgtgtttcagctctgtagccgcatcggagaaagtcggtttgtgaagttaactcctacactaaacagccttgagattggcaaacaggtgacttttcgaaacctctatctctggtttcttcagtgcagtgtctttttaattctgaatacttttgcagcatctaccggtaagtttcacgaaagggaatggactcatacatccgggggagataattctggtggacaaagacagagttgaatggtcgatgaagcttcaggttgataatagaggagggatgcatatatttggtggtaatgactggaaaagtttctgtgccgcaaatgaagtaggcgcaggggagtcactaactttggagttgattcgaggaggcttaagtcctttattcaagttcttctccaaggtcagtatttcaaatagcttgcagtccacgttttaggttttgctaaatcaaacaacgacttgttttcagatagagcaaccctcattcgaagcagaggataggagacacaagagagctcgagtccataatgggagccaggaaacagataagggagaaccttctcgagcaactaaaatgggaccggagcttgagaaaagggagaagacagctgaaaaaggagaaccgtctcgagcatctaacaaatccagtggtaaacaaggaaacttacagaaaacgcaagcttgctctgtcacagatcacgtggctaaggtgaaagagagcgttgtagatactttaactagtatcagacggttccaagcagagcttgaaacaatggaacagaaattagaagattcattgcaggaaatcaacaagttaagttaggtatgatctgtaatctgtaatattatcattcttataacaatcttttagtttcggttttggttttgttcaaatttctaacaatttgaatttggcacagagagaggagaagataacatcttcaagtaataatcaagtttaaatgtgaaactgaagactcttgtaacctctgtttttattatatgactttgtttaagatgtagttgttttattttcccttttttcattttgttaattaatcgtaaagtttataatgttcttgttctctgttggcggactaatgtcgtatttccataatatttattaattagtatctgataagtgataacaacttaaaatggttttttttttttccttatctgcatcactgcattgaaatggtaaacaaaaaatgactttatctgctgcaacaagccatagccaaaaacaatacaaaaccaatatacagtagttttttttttttttttgtcgtaaccaatatagttttattaaggaaaagaaaagtaatcatagccaaaaaaaggaattattacaaggtaacgacaaaaaacgtagttgaaaaaggaaaacaaaaaagcatataaaggcccaatctttgtaattgcattggaaaggcccaaacccaacaacatagaacactgtcttctctactaagtaacaaaaatcaacgaagcggtaattcttgaacagacaaagaaaaaaaaaaggtgaatacttgaaatatataaaagatacagaagacacgagaagggagaagagatcgatgattttgagaagcgaattagatg

SEQ ID NO: 16926 - DNA, 3000 bp, Unknown; identical to SEQ ID NO: 16925
  misc_feature (1)..( 3000): 2750-1469P.txt file - cDNA_ID_1807213; gDNA_ID_2926200; Annot_ID_201792

SEQ ID NO: 16927 - DNA, 3003 bp, Unknown
  misc_feature (1)..( 3003): 2750-1469P.txt file - cDNA_ID_1807217; gDNA_ID_1620836; Annot_ID_50813
atacaccctccggttttattttattttatatggtaacttaacataacctaaccgggaaacatggatacaaattgtatttggaaccaaaccaaaccggtttgtaaccctaagtaaatcgtgttgacttgaaccggatataaataatcattccggtaatcaaagatggttatgtgatgtttctcttcttgattgtgttacagaaacaagccgatgtgaacttcttcttgctgcttatgggcctgttgtgtcatttgctgccattattgttaaaatatgcagcaaccggcgaagtatcgacctctatgattaacaaaatgtcgctcactctgtcgcggacaagcagcatagttatgcttattgcttacattgcttatctcatcttccagctctggactcaccgccaattgtttgaggcacaacaggtacctaagagttacgtcatgttttcatgcgaataaaatgtatctataatcaattttattggtatctaggatgatgatgatgcatatgatgatgaggttagtgttgaagaaactccagtgataggattctggagcggatttgcttggctcgttgggatgacaatagtcatcgcattgctatcagagtatgttgtggacacgatcgaggtactgattatgtcgatatacgtttgaatcccaacatgaaaaagaaagaaagaaactcacaagattaataaggaggtttcatgttggtcaggatgcatcggactcatggggactatcagtgagtttcataagcatcatattgcttcccattgttgggaatgcggctgagcatgctggagccatcattttcgcattcaagaacaagctcgtgagttttcttttttcttgctttacaagtattctttgtttgtgtttggttttatgtttagtgtgaatttcttccaaatgaacccacaatatttagcattgaaaaaaaaaattgttgcaaaaatatcttataaaactccaacatgtaacactgcctgaaatctatttttgtggaatggttaattataactacaggacatatctctaggggttgcgttgggctctgcaactcagatttctttgttcgtggtaagttcttcttcgccttttatattatgttgaaatctgaaagatgacaaatgttgcgtgcaatataagaaatctaaggcaatgttaatgtgtgtgtttcatcaggtcccattgagtgttatcgttgcgtggatcctgggaataaaaatggatctcaactttaacatccttgaaactagctctctagctttggccattatcatcacagccttcactttacaggtaaaacgttttgctttaaacacaagtttgatttggttgacctttctagttaatcattatcgtttgtttttgggccggttaggatggaacttctcattacatgaagggactggttctattgttatgctatgtcatcatcgcggcgtgtttcttcgtcgaccaaattccccaaccaaatgatttggacgtgggacttcaacccatgaacaatttgggagaagttttctcagcttaaagttatcaaatgacttgtaaaaaaagaagaagagaagaaatcagcaaattatgatttgattgattcgtcatccaaaaacggagagactttgtcagagggattcctcaagcatgaatgagggagggagcttgatgaagacagaggttcttggtgtttaagaaatgatcacattaatttctgtttgctttctttttctgtttgttgttggcatttttaagtttttcttgtatattatatgttcttttgctgagtaatgtggactatattttctgatatattcgtttaccttacagacttaactgatgatactgtatatgcaactttttctttttgagttaagttgcaaattagtcactttttaaaacttaattggaaaagtagtcactttattatttataatttgcaaaatagtcatttttcattgtttgattcgtacacttagattgtacaccacttttagtgtacagatatatataaaaaatacacagcgtacactttacatttgtacactaaaagtgatgtacaatccaactgtacgaatcaaactgtgaaaagtgactactttacaaattatgaatagtaaagtgactattttcctaattaagtttgaaaaagtgactagtttgccaacacaccctttttttttaatttaccccaagatacatgtagaggaataaaccaaaaatgaagttttccctatcatatatcatggtgcatgaaaaatgttaaacaacttcttgtagcataaaccagcaacagaaacaatcaacaaattgtggaagcattgccataaaaagttatctaataagataagacttccttgcactgcaacaatctttggttgtggatcccaattacactcacatatacaccatcatccccttcttgtccttgagtccatttgagatacacattgttactaatgttgtcaaaaataaaaatcaccatacaagaaagtggcttctgaggttcatcacaaattcagcaaaaactcttgttctgctttaacataatgttagtcttattcatacacacaagcatataaataaaaatgggtgtgttggcaaaatagtcactttttcaaacttaagtggaaaagtagtcactttactattcataatttgcaaaatagtcatttttcactgtttgattcgtacacttagattgtacaccacttttagtgtacaaatgtaaagtgtacgctgtgtatttttatatacatttgtacactaaaagtagtgtacgatgtaagtgtatgaatcaaacagtgaaaagtaactattttacaaattatgaatagtaaaatgactacttttccaattaagtttacaaagtaacttaactcaattataatttggtttataaggaaacgtgtgggaccaatctcaagtagacgaaaccatttcttaaggtttttgaaaacctttgcgtcttatcttcttcttccctctctacaacatg

SEQ ID NO: 16928 - DNA, 3003 bp, Unknown; identical to SEQ ID NO: 16927
  misc_feature (1)..( 3003): 2750-1469P.txt file - cDNA_ID_1807217; gDNA_ID_1620836; Annot_ID_169904

SEQ ID NO: 16929 - DNA, 3000 bp, Unknown; identical to SEQ ID NO: 12104
  misc_feature (1)..( 3000): 2750-1469P.txt file - cDNA_ID_1807221; gDNA_ID_2214531; Annot_ID_134280

SEQ ID NO: 16930 - DNA, 3000 bp, Unknown; identical to SEQ ID NO: 12104
  misc_feature (1)..( 3000): 2750-1469P.txt file - cDNA_ID_1807221; gDNA_ID_2214531; Annot_ID_184931

SEQ ID NO: 16931 - DNA, 3003 bp, Unknown
  misc_feature (1)..( 3003): 2750-1469P.txt file - cDNA_ID_1807228; gDNA_ID_1620645; Annot_ID_47590
aaaatgttgaatcactgaagtacttttctaacaatgagaatgacgactgatctttatctctatttcaaatagcattgttctggtatatcttttgaatgatttcaaccataaatattctagtaacatgtggaattctaactagctttatatatatatataatgtatattaaatacataatgtatttctgtactgtatgcatatatatgttaaatcatgaaatgcaaacatatgattctctttagttattgttattaacagaaaaaaatttacattttcagataattgtactcttctcatgtctttaaaacatcatattagaggaatatttatgtacggaggttcacgtaatatagtgtataactgtaacttttcccaaagttttataatttcaaaaccaaaaaaaaatggaaacttttggttggtagatttttttaaaaacaaatctgccaaatcgatactttctttgtttaatggaccagtgataaatagatttagagaaagaacatttttaatctcttttacatttttaatagttagttccacattaacatgttctgccaattaatttgggggttaaggactgttcttgattcaaatatattttttgtttaattgtttaataaatttttggtagaagtttacttttgtaccagtgataaacagaatagtaattttatattttacataaaatttggtaggcattaactattgtaatcaaatttccttgataagcacaacaagatcagatgcatgtggaccctcatgatcattttagcttagatctccaaaataccataactgccgctggttattattctatgctatttagcatttgtttctaaatcgtttttatagttgacacttaacacatgttgacactactttagtacatagaccatagtttcaggttatttattgatttttaacaatgtatattagtatgatttatgaaaccatatatatttctctttcaacagaaaacacttattgtacatgtgacatattttgtcacatcttcgatagaaatacatatttttaataaaaacaatatcctaattcctaattaagaaattccggagatccaaggtgactgagaattcgcaatagagtaccatgaatcataaggtctaaaacttgcaatatgcatcggccagaaaagatgacacaattactctagcgtttgtaatgatatcaaaatactaaagaaagatgggataattatgcattttacgcgctagaaatatgtgtagtataattattttttggatttactgttgtaaaattcgtcagaaatgcaagtcactaaacaacagcaacaccacagttgtattgttatatatcagtataaatttatattcatatgatataaatttagcttctagaaaagtagctagtcactaatcaataaaaatgcataaaacttacactatcaaatgatttcaatttgcataactacaactcatggatttcatggtaaagaaacttagaagctactacaatagaccgtggactatttctaaacaaatgcaataatgaaactgtttaaaagctattaccaaattttacccgcaaataacattatatttgtttctggagccaaaattaaaagtccatttcctatcttgatttatgcttgtacccatactatatcttcaatgtttcgataattagtaattactccaatataaatatatatttttttaaagtttttgtttttactattactttttttatgtttaaactttttaactcactaatcttttttcttacaaaacctaatctacttttactctctaaatcggtggactatatatatatatatatatatatattctcttcttctatgacaaatatttgtctcatttatatttactttgactaatagcataattacacataatataatagcacaaaagataacaattcacttgtgaataaaaaaaggaacgaccgcatcgcatgcattagttaataccgttgctggaattgcggttcacagggctctataagtcccgtatccataggatccgacacgaaaatatattattttcctatatataaaatagaaaataaagttgagagataacagaagaattaaagttgagaaaattcgaaataaaatgataaaaaaaacattaaattactacaacaactcgtgggtgaaaaatgactttaaaacatattttaaaacttaacaatatcctattttaaaatttcaacaaaaaaaataatatagatatgaaaatccgagcattacagacaattagcttaggaaagagaaacatagtcctaatcaccaaatgttaaacacagtgtaagagattttgtcttctttcttttgtctaagattttaaaacaaaataaaaataacaagagagagagagagagaaagattagtttaagaattaaactgctaattaaatacgaaacagtaatcttctcttcaaatgcttataaaaaggcccttcacaatctctcattcaattcacacttcacatttggatatctctctaagtctctctatactttcatttctcgtttcataatattaggtaagtctaattaaatatctcatctccttaatttttttattcgctcactaatctctctacacctttcagctaaacacaaaacaaccaaaagctcaggttcttgtgttttggtcctctgtttatttcttgctcaaaaaacaaccaagagctcacttgctcttaatcacaaactgagacttttctcagtcttcctctgctttaactagtttacttgggacagattctgtataacataaacttaaatcaggacatgtaactgaaacatgtcaagtttctaaatttaacttgagttctaaaaccgttaacacaaacacaaagctgtatgctttcctctctgtttctatgctctgttttccattttttgctctctgtcctctcttgcttagtaaggtctgtttttttttttgcaggaaacttgttagtgtttaaggaaacaaaaggaagaagatg

SEQ ID NO: 16932 - DNA, 3003 bp, Unknown; identical to SEQ ID NO: 16931
  misc_feature (1)..( 3003): 2750-1469P.txt file - cDNA_ID_1807228; gDNA_ID_2926175; Annot_ID_140310

SEQ ID NO: 16933 - DNA, 3003 bp, Unknown
  misc_feature (1)..( 3003): 2750-1469P.txt file - cDNA_ID_1807232; gDNA_ID_2214483; Annot_ID_133306
aggttggaaaaatttaatgatacattgtacgttttctaggttttgttctaaatgctcataaacctacttggatttggaaataaatgagagcttacatatatagaacaatactctatttccacaaaaattatttgctactcatatacaaatgtaggtttagaaaaaatccactttagcaaaaagagatgggaaattaatgaaaattcacttgactttctttgttttgtgagcaattttcgatttcaaagtaatggtcggacttagactttttcctgttcttttttgctgacttaataataagctgaaacttaacagttagaagttggaacaagatataaataaaaaagctaagttgtcaaacataaagttgaaaatgatttggtgatgtcaattaaataaaaagttgaaaactaatcatttgtatttgaccggcggttacttggaataagactaagaattattgtactttctatttaatgggtttgctaagttttttatcagatcattttaagcaaaatatcgataacttttcgaagagattagttgaaaatactaagcattatatatatttaaatatgatggatcagtatatatagttttgaaaatcacactgcaggatccgttggaattggtggctgagaacttttatgatcttcttaaaattttaatccgtaaataaattatacgagttggattggttcgcgtcttctaatgcgtattgacatctataataaaagctatcagaaaagttgctgatctttttctgtatcttattaaatatgtagacccgagcagagaaatgtggatcaattaataaatatcatgtacggatgaacaagagagaagaaaaaagtataataatactatagagcgaaaagtattgcatgatggagaaactctcaacaatttcaaacatgaacgacttcttacaaaacaatgtatctttagttgtcacaatctttgaaattctacaaatagagaagacggaaaaagatgaaaatgaaattagtgtttttctttggcaaggtccttggatctcttaaaagtgattagatcaacggtaatgttttagatatcctacatgtgcattgattcgataaaagcatttaaatagtgaatattacaaacaaaaatagatacttacatcatgaaatagaaacaaaatcaaactgggttgctacttaccagtaatcacgtgacggtaactggctaactgcaatagtatatccaaaacaactttaagaaatggatacgaaatgttttagttttgggaaaatgtcaaataaagatttcgtcacaaatccatcaatccagtatagaacacttttatcaaaatgattttgcaaattgattcttagagtacgatacaagttgcaaactggaaaaataattttgcagttgcaacaaataataataaatgattgtgcaaattgattctcaaattaagtaggaaacaagttgtagtagatatagactgtttttacatgatgttaattccaaaaggattcattgccatacaaatggttttctcatagaggacgtaatatcaattaatggaaaatagtagttgaagatttatagaagaaaaaaaaaactttccgcaaacaacactatatatatatatattggatcaaaaataaaaagagttaaatgaaagaaatacacagacctggcctgtatcaaccaactcatatattattatataaaccaacatccatttctcagctcctcatcaaattatcttctttctctttctctctgatcatttccaaattatttctaagctaagaaaatctttaaaaataacaaagcttctaaaataataatccgacctaccggattcaaaccattgatctgaagatcatctataaaccagtccttgatctataaactaaaataaggtcggttgcttaatctttgttacccttttatttttgtggttataattatattatcttcattttgtttccttttatgattaatcgatcatatcaggatagatatttcgttaagtttatagtttaaatccagaattttatgtttagaaaagagaatgggaagagttgaagtgtttaacgtctatgaatattcctcacgtcaagaaaaaagaaaaaaaactatgaatggtcctctctcgatgtccttacattggttagagagcgttgcaactacaatacatacatcactttcatcatatttattgtctttttcagaggttttcatatttcgactgaattcttcaatttgcaatattatgaataatagagaagatgatgaaaaaaggataaagagagtgaagccagggttatgcatgctctcacgtttagggcgtgactctaaactagcgatttagtttacggtattattaaaaataatattagtcacataatatttgtaattttagtcgaaattaatgacagaaaaatactagacgctaggatttgtacttccttgaatccttggaaaatatacgtatgtaattaatattattcattatcaaaccacaaatacggaaaccaagtttgtgtcaaatccaaatggagtagtttggtatcttaggttgttgtttatcataaatgagaaactttggggttgcactcgatcggtatggttaggtggaccggactggtgacaattaatgccattgatctataactgttagattataatctaaaggttccattgcagaacaattcatcaaactttaatatctatgtatttatgtatgttcccaactcacagaatttcacggaattgcaaaactatgataaattctgctaccttaatgaatacactatgaacttgactaaaaaaacaagaataaagtatgataaattccctcattttatatttctcttatctatttcacatttttgcttgaaaatttgtaccattaatctctctattcggcagtgttaaattttattatttaactccgtcggttggattcattttaaatttctcttcagggaagaaaaaaacaagagagagaaatagagaatg

SEQ ID NO: 16934 - DNA, 3000 bp, Unknown; identical to SEQ ID NO: 11091
  misc_feature (1)..( 3000): 2750-1469P.txt file - cDNA_ID_1807236; gDNA_ID_2214478; Annot_ID_133168

SEQ ID NO: 16935 - DNA, 3000 bp, Unknown; identical to SEQ ID NO: 11091
  misc_feature (1)..( 3000): 2750-1469P.txt file - cDNA_ID_1807236; gDNA_ID_2214478; Annot_ID_183201

SEQ ID NO: 16936 - DNA, 3003 bp, Unknown
  misc_feature (1)..( 3003): 2750-1469P.txt file - cDNA_ID_1807240; gDNA_ID_1620716; Annot_ID_49114
atcaactccaccaaaaacaaaacgagtagtagtacgtcgttcattagcactattagaagcctttgaatcatattagcaaaaactgctatacgtcattttgtccaaagaggacgtttaccaaaagaaaatagataacactaaaattaggcatgtgataaacactccaacccccaaaatgtacaccgccctattctcaccaacctcttctgactcttctctcattttctgttgttcacaaataagttaacgtggtaccgaactaccgatttcctccactattttattgaatttctggtcaaaaaacttaagtgttacataacgaatctataaaaagaaccctcactttcaaggtttttgtcagcaaaacatttgtcttcgtgtttgaaagctagataaaagattcactaaatggccaccgcaagcaccgctgctactttcagaccctcctccgtttcagcttcttccgaattaacccatctgagatcaccctccaaactccccaaatttacgcctctgccatcggctcgctcacggtcctcttcttcgttctccgtctcctgcaccatcgctaaggacccagctgttgtcatggcggactcggagaagattaaggccgctggatctgatccgactatgtggcaacgacctgattcattcggtcgtttcgggaagtttggcggcaagtacgtccccgaaactctaatgcacgccctctctgaactcgaaacggctttctattcgctcgccaccgacgaagatttccaggtatgcctgctgattttgtttccatcttgttcatagtttttgaatcgattcgaaatgatttggctttgtgagtttctgattcaagcgttgtcattgccatggctagtgataaagtttaaaaaacggatttttttgttccaattctaaaaaataatctgccaaacaatgttaagccgtatgggacaaatcgatttgtttgcgatgtaggatgtaattctgggaaagtgttgtatttttccagaaatctggaaacgacattcatttcatattcttagtttcttcagcattacatgcttctgtgtgatgtaagttagaagtctttttggttagttcgtttgttgggcaatgtctaactaatgtttgatgaatctgtagagagaattagcagagatcttgaaagactacgttggtcgggaaagtcctctttactttgcagagaggctcacggagcattaccgccgtgaaaacggtgaagggccgctcatatacctcaaaagggaagacttgaaccacaccggtgctcacaagatcaacaacgctgtggctcaggctcttctcgccaagcgtctaggaaagaaacgaattattgctgagacaggggctggtcaacatggtgtagccacagctactgtgtgtgcacgtttcggtttgcagtgcattatctacatgggtgctcaagacatggagagacaagctcttaatgtgttcagaatgcgtcttctcggtgctgaggtgatgtgaattctctgcgtaaaccttgcaaaatcgcaatgctttcaaattgttatctaagtctgatgcttgtaggtaaggggagtccactctggaacagccactttaaaggacgcaacttctgaagctataagggattgggtgaccaatgtggagactacacattacatattgggatccgttgcgggtcctcatccttatcctatgatggtcagagactttcacgcggtgattggtaaagaaacaaggaaacaagcgatggagaaatggggcgggaagcctgatgttctggttgcttgtgtcggtggtggttcaaatgctatgggactcttccatgaatttgtcgatgacacagaggttcgaatgattggtgtggaagccgctggatttggattggacagcggcaaacatgctgccacattgacaaaaggagatgtcggtgtactccacggagctatgagttacttgctgcaagatgatgatggccaaatcattgaaccacactccatcagtgccgggtaagagattcttctctgttcaaagttggttttaagccacatgtatctggtcacctgtatctaaagagtaaaagttgatgttatcagattggactaccctggagtcggacctgagcatagtttccttaaagacgtgggaagggctgaatactttagcgttactgatgaagaagcattagaaggtacttacttgacacttcatttttctccttttagatgtttctttcacaactcatgagaacttgcattgtgtattctaatctatgcgtgtagctttcaagagagtgtctcggttggagggaataatcccggcattggagacatcgcacgcattggcccatctggagaagctttgtccgacgttacctgatggagccagagtggtattaaacttcagtgggagaggcgacaaggatgttcagactgcaatcaagtatctcgaagtttaaagagtgtagattactttcattttcacacagtgctatttcttttatgtagtttgttagttctccttgcttatggtcgggaatccaaaagtttggatcaaagggttaagaagagaataagtgttatgaatgtatcatataaataaaaatgttctatggaacgtttgatgttcttataagcaattcgaactgttttgttcttgacttagctggttttccctttcatatcttaatttcaccaatgcttagaaaaaacaactctgatcgaatgatttataaacaactctgctctttaatggtgatcattgtaaattcaaacttgtgtattgtttgtactaatttgttctgatagaaactattttgggttaaatgggaaacgggtcaaagcatagggggctagtgttgtaatttagtagattggggaggagtttcaaatctgaacgctgaagataaatcacaagggaggtgcttcgtcctcgaagcttttagaacttagccaagcagctgttgtttcttagttgactccctctccgacgaaaatg

SEQ ID NO: 16937 - DNA, 3003 bp, Unknown; identical to SEQ ID NO: 16936
  misc_feature (1)..( 3003): 2750-1469P.txt file - cDNA_ID_1807240; gDNA_ID_2926190; Annot_ID_140993

SEQ ID NO: 16938 - DNA, 3003 bp, Unknown; identical to SEQ ID NO: 16936
  misc_feature (1)..( 3003): 2750-1469P.txt file - cDNA_ID_1807240; gDNA_ID_2926190; Annot_ID_200965

SEQ ID NO: 16939 - DNA, 3000 bp, Unknown; identical to SEQ ID NO: 14064
  misc_feature (1)..( 3000): 2750-1469P.txt file - cDNA_ID_1807244; gDNA_ID_2214695; Annot_ID_136808

SEQ ID NO: 16940 - DNA, 3000 bp, Unknown; identical to SEQ ID NO: 14064
  misc_feature (1)..( 3000): 2750-1469P.txt file - cDNA_ID_1807244; gDNA_ID_2214695; Annot_ID_189518

SEQ ID NO: 16941 - DNA, 3000 bp, Unknown; identical to SEQ ID NO: 12293
  misc_feature (1)..( 3000): 2750-1469P.txt file - cDNA_ID_1807247; gDNA_ID_2214542; Annot_ID_134484

SEQ ID NO: 16942 - DNA, 3000 bp, Unknown; identical to SEQ ID NO: 12293
  misc_feature (1)..( 3000): 2750-1469P.txt file - cDNA_ID_1807247; gDNA_ID_2214542; Annot_ID_185262

SEQ ID NO: 16943 - DNA, 3000 bp, Unknown; identical to SEQ ID NO: 12542
  misc_feature (1)..( 3000): 2750-1469P.txt file - cDNA_ID_1807259; gDNA_ID_2214558; Annot_ID_134831

SEQ ID NO: 16944 - DNA, 3000 bp, Unknown; identical to SEQ ID NO: 12542
  misc_feature (1)..( 3000): 2750-1469P.txt file - cDNA_ID_1807259; gDNA_ID_2214558; Annot_ID_185801

SEQ ID NO: 16945 - DNA, 3003 bp, Unknown
  misc_feature (1)..( 3003): 2750-1469P.txt file - cDNA_ID_1807277; gDNA_ID_1621091; Annot_ID_55516
aacgccatggtcctccaagctcaatgctcgtagctgcagccgctccaacatcaatgagaaccaggacagacgatcaggtgaacattccgacttcaagccagtgctcggtggggcgagaaagtgagaagcagagtaaagaagcattggacgttggtggagagaaagtgatggaatcagctaggactttgttgagcattggattcgaaatcaagcaatgctgattatatgtagtttatgagttttatagagttcatcgactcaattttcgcctccttgttcttgttatataataataataaaaaaccccatgaagattaccaactaaatacgttaacattcgtctgtgtaatgatggtatatgtttattgtgatattaaatcgctaattttagtgaatagcctctggttcgtctagagggtcttctgaaacttgaaagggactaaaagacgagaacaaaaaccctttctctctactctgtgtaaaccctagtgtgttcgtgctctccgatggcgagtcttcgatgctttcgtgagctgagccgccgcgctacgactgttttctccatcaaccagacgcgatcgatctcttcatttcatgggattgagttttccgggaccagcatttctcatgggaccgtaattccgaatcgatctctcactaggaatttgccatggtacagtcattggtatcgctctcaagatcgttgtttctcttcgaacacaaaggatactgatgaagatgaagaaagcagtgaaggagaggatgatgatgaggaggagggggaagactttgaggattcggcggatatggaagtagaaagggaatattcaccggcggagaaagtggaagaggcggaggagatagggtacaaggtgatgggtcctcttaaaccttcggagagacttttcaaaccctatgaaccagtgtttgccattgttcaggtctcgtctctgtgctatctcaattaatcctttagtttcatttctcactctcactgatgctgagtggttatttttatcctgtagattggttcgcatcagtttaaagttagcaatggggactccattttcaccgagaagttgaaattctgtgacatcaatgataaggtatgctagcttcaagctcttcttcgttaatctttgctattcttctctcaaagggctagactttaccgtatctctcgtaagaaggacgaacctttgcatttgtgtttatgatttatgattgttgctaaaacctttctctttatgtccctttgcagttggaactaaccaaggttcttctattgggctcggcaagccagacgattattggtaggcctattttgccagatgcgacagttcatgctgtagttgaagagcatgtaagtgtctcattgacttgcttggtgttttataatactagtgaagctgtgcttaagaataatttacaattgaaaagaggatagatgagagtttgcttgctgaatccggtgactgagagaaactaaatcaaactgtctgctgattagtttgtgaaagtcttgcaagtcattagattagtgttcatctatctctacatcatctgaatgtcttgatttaagatgggcttggaatgtagaaggatctactcatgtaccagcattactcaactagtttttccttgatgcgtgacaggctttggatgaaaaagtgctcattttcaaaaagaaacgaagaaagaattataggagaacgagaggacatcgacaggtatactttataactccttgtttagatagacagtgtgtttatttcatctttgccttcttctagttctttccactgtgttatgattgttgtttttgaccattcaacacttgtgtccaggaattgacgaagttgagaataaccgatatacaaggaattgaaaaaccagaaccgaagatcgtccataagccttcgaaagaagctgttacagaacagacgaaggctgagctagttgcttagagataaaatttgcttctttcttttttgctgatgccgatacatttgaagtaagttaaattatcacttgctgttcactaagaactagattttaaagtcgttgaaatgatgaaaaggccttcttggtagttagtggtaagtaactaggctcctgagatatgaaatgtgatttgcctttcactgtcttgttctccttgctcttcattttgtatttaaactggctcatgcttgtgggagctgtttgttgcttctgtttcagaaataaagatttgcggaaacatctctctccttatcttctctatgctttgtactttgtactgtactactgtggtttggttatggtttaatttacttcttcatgcaagtctcggtcacagatatgaaactggtggtaaattggtaataactgcaagtcacattacactcaaaatctcgattttttccactatgactctttagatcaggtgattattattgtaactatatatggcaaccacttcctcatcaacaaatgattcacagaattgatagtacttggaactgatttataatttcttttatcaacatcggaaaatcgtgtaagaatgccttgaaatatttgaatgtttgtaaatagtatcaaaaccattgtttgtataaatatgtataaagaacttaaacaaaagcaatttggagccaaagagaattataaagctacacgagtacgtaagtccatggttaagatcgggtcgggtggggacgggttggataaaagcaaacaatgagtcaagtaaaagaagaatcatcgtcaacaagagagagagagagataagcacaaacgcggcttttcttctccttataaataagagaagctcagtgcgttactcaaatggccgtcactttggtaacgtccttcgcttcttcgtcttctcgcttccatttccgctcattctcctcttctccgtcgtctctctcctcttgtttcgtccgattccagttcccctctcgccttagactcgcttttgccgtcacgcctctctactcttcttctagagccatg

SEQ ID NO: 16946 - skipped

SEQ ID NO: 16947 - DNA, 3000 bp, Unknown; identical to SEQ ID NO: 6015
  misc_feature (1)..( 3000): 2750-1469P.txt file - cDNA_ID_1807281; gDNA_ID_1620836; Annot_ID_50808

SEQ ID NO: 16948 - DNA, 3000 bp, Unknown; identical to SEQ ID NO: 6015
  misc_feature (1)..( 3000): 2750-1469P.txt file - cDNA_ID_1807281; gDNA_ID_1620836; Annot_ID_169898

SEQ ID NO: 16949 - DNA, 3003 bp, Unknown
  misc_feature (1)..( 3003): 2750-1469P.txt file - cDNA_ID_1807300; gDNA_ID_2214528; Annot_ID_134208
cgtttcctttgctgcagtaaccatgtagatcaacaagatttctttgttttaccttggagattgcatcgatctcggctattagggctgtcttttcttgccttgtgttgcaagtaattctctttacggcaattatctctgtaggagcaagttgccctttataaaaactcccagagtttccctctcccaaaagcttagagttgtcaaaacctcccgtcgcgctggaaatcgtctggtgggagaatttccgtgcgcctccggtgaagttttccgttctacgaaaaaagcaaaccgctaagaagcttaagatcaagattccaaatattgctgatgcagcaatgattatgatcagcatcgtgttactcgaatttttcatgactgaaaccggaggactcggggatggagacaatggaggtagcgggtctggaagagagggaagcttcgtgatatcaaagtctgatgctttcccctcgatgctgaagctccagcctagcacaaaatgtgagctcgtgacagttcccgtggctgcagagaatccaacataattttcttcagagatgatcccagaaagatttagttttctagagagaagaggcaactttggcttcggacgatctagaggagccaatgtgacattgagcatcgtctcagttgcgttgtattcgatccagactcttattggtttcccactcgccagcctcaaacttatgttctttgcctctcggtcatcaaaatattcagcggaggtagactcaatggagatcactccgttgaggtctataccaacatggttatcatcaatatcgttcaactcaacggcctgcacagtgtcgaattcaactgcaagaatgcaattcaaggagtttccattgttggaggtattgaataggcctagataattgcttggtaaggccccgctaaagtccagcgagggtgaaatgacaaaagctaagccgtggcctggtgcgccaggtcctggagtgatggcaaagacgaagcttgtggggaaagataccaaatttgaggagttggggtttaagaatggtatgggaaagccatgaaaagcttgacctatttgcctcatcgaagtgtttgtcaactccaagtggccactcgggtggatcttggacgagccagacttgaggagattagcttccagaaagccatggttaagaaatttggtttgttgttgacttgagacacaagaaaagtatagtaggaagattattgatacagctatcgatttataggtattagccattgatagttttcagattttgatgttagctatgttcaatgctatctttttatagcttcaaagagctcaagacacattcatattcaaattttttgtttatgctgacaagttaaacaaacttagttgaagatttgactttctatataaactgctaaacaaaccctttttttttttgcaaacctttatattagtatccttgaaaaattctttcgaactttcctccacaatttcttcctaataaaattgattgcaaaataaacaagaaaatggttacatattttctgtataatttaaatgtgattacaaagtcataatggatcaaaaattattgaacaaaaaaaacgtcatcttttagctagcctttagggtgaatcacctttttttttgttacacatataattttgactgcctaacgatcgacgtttatccactatgactatgtgatacaaacaaatagaaaggtttctcttgagtcttgtaattgtgcaattatttgtattaggaagaaattgtggaggaaacttgcaataattatcaactatatgtcgcataaaaggcgttgctatgttaggcttttagccactatatatccaatataaaaataaaaaatggatgaacaattgaacattccttgaaattaaagtgttaactttaaatatgaatatttataataaaaaaatatcctaacttttttttattattattataaagacatacgttgtcaaactaagaaattcaatttgtaaacgaagaagaagaatacttgaccattcaaatcttagtcttgttctcactgaaaacttgtacaaaaataaataattacaaaatctagagaagttttcatgcaaaattgtatatgtagatgtagtcagatagagttccatatattctataaacgaagaaatcacaacaatacaatgtacaaattaacatcattagattagagtcaaagaatttttaaaaatatatcaactttctgagaagagtacaaagattgtttacgaacgaagaattctcaaaacataaaataattagtttccattttacaaaaatgatcttaggtaatctgcttatattggttaaagtatttctattttctaaccaaaacttaggcaatttattttgtcaccaacatacaatattatattaacaatctatatattactaatctatatgtttttttctttttggtctaaggtaaactttgtgatttaattgtagtattgtacctcttcaatagatactccgtactcgcatgtattaatagagcatcacatttatcgacttctctatggttagtttatgcatctactaagttttttatggacttttgtttttgttgttcatttatcgaaataaagcaaaaaactgcaacgatccagttaatccgcaaaaattaatgaattagagttttttttttttctcttcttcttgttgcattttctcctttttttttctattttttctaatgatattaactaatatcttccctactaaaatattgaaatgctttattttattttttaaataaagaaattgattatgattttttttttgttacagtttataaatgtgtctaataatttatggatattttataaagtttataagatatatatacagtaatttaaaatttgccgcaatgatgacgtcgtcatcgtcactaaaccaatcagaaccatgcttcgcataaaggtgactctgactcatttgaaaagctgaaacataaactctgctctgcataaatg

SEQ ID NO: 16950 - DNA, 3003 bp, Unknown
  misc_feature (1)..( 3003): 2750-1469P.txt file - cDNA_ID_1807311; gDNA_ID_1620631; Annot_ID_47244
taattggtttatgaaagaatctacatatacaacattagcctcgcttttaacgaggactaacacacgtgaccgatacagaacaagaaaaagacatgctagtagacggaccacgctgcaatctatcagctaagggatttggcttgaatctgaccctaaagacaaatcctggtggttgaggcacatgtagagtaattgaagtatttgtgagcatatgaaagactgtagacatcgttggacgatcagcaggattttcttgaacacataacaatccaatgtgaatgcatctaatgacttcatttctatcataattctcccccatgggtgcgtctaccagttccaacaatggttcattgttccaaagcctccatacctattcaagtcatttatcaagaaactaatttaaatgttgagagctatgatcattttgctaagagaagtagaaaagtttgagatggcattggaaatatactaacatatgtgactaagttacttattgagccgtctgtctcgttgatgctactattctttttcccaccaataatctccagaatcaatactccaaagctatacacatcagatttcgtcgagaactgcccattcgtcacatattcgggtggcatgtaaccgctgaaaaatacaacgcataccagtttcaacttttatcaacaacaataagtacaaacagattatataactaaaatggaaaattacttacattgttccaactactcttgctgtggtagcttcagtttggtccactctaaaattcctagccacaccaaaatccacgattttcgggttcatatcggcatctaagagaatgttacccgctttgaggtcacggtgtatgattgtaagccgtgaatcttgatgaagatacacaatccctcgagtaattccattaataatgttgtatcttcttgtccaatctagttgacccttctttaccgggtctgcaaaaatcccatgtattaagcaattagactatgagatcaagaactaaggtttcagagaatataaccctatcatctgtttcttttcttaccaaagaggaagtggtcgagacttttgttaggcaaaaactcgtagactaatatcttttcgtctcctttgacagcatacccgagaagcttaacaagatttctatgttgaagctttgctacaagaaacacctcgttcttgaactcttcttcaccttgtcctgacgttttagacaacctcttcacagcaacttctgttccattcggaaatgttccctgccaagtcatatgatcttcacataattatcagaacatgttctgttttttctctctaacacaaaaaaagtactagagacaaacattataccttgtaaacttcaccaaaaccaccatgaccaagcttgttaacattatgaaaattacatgtggcagcttcaattgctttaaactcgaactgaagtgaacctgaagttgtaatatcatctgctactgcaaaacgaaatcataattatatagtgtatccagagagtttctaagggacattcaacatttatatctcaaattcttattcaagaccactatcaactttatgttttcaaaacatgagaaaacttacttttagttgtctttgttttatatgcttttctcctcttccaaagaccaactcctagagcaagcaataagatgggaacaacgataatcgccacaatagctcctgtagaaatgcttttgccatctgcacgaaccctaggaaaaatattagtctcaaactacgaacatagctataaaaaaaacttaaaacatggacccatggtcttacctttttgacgaggacgaatattatcaaaaagtcccaagaacggataaagctcccatcgaatgaaacagcttggcctcaaaataatacctccttgtctcccacggcaacatgacctatactcaaccacgttttgttgtagacacttggtgcagttttgaagagataagtctctactgcattgcacaaaaccgtaaatgcgtgagatagacgtctcaagctttcgtatcccggctgcatagtacaaatatgaagcttggtctatcatacgaatcatcaaagcctcccatgtaatttccaaatccgtcaagttagcttgaaaatctctggtatagttatcactcctcagaatctccataccaagggaactataaaacgagcggtttgagtaacgtacaagacaaactgttctatcaattctccagactatagcttctgtctgattagtacaattctgcaacaatctagcatttgaaggatgatacaatcagaacaagagtgtgcatcagtacctgggacacacatccctagaccatatgctctgtttggatgttccccgatccatgtcgtgtaaaagccgtcgatagctgtgacattagaggaagagaagaaagcaggactcggcggtttaagtcgtaagtactattgggtgtgaagaaaccagatctttcaaggcatacctgtgcagagacatgactaaagcttatgaccacaaaccagaagattactaaaaacttgaccattttatttactctttccttttttgttttgatgtctgaaattaaaacctcaaatcttggaagatgtaatatttatacaggcgtttcaatttcaacctcttgtgctgtacaaaatttgactaatcgtcattgaattttctaacgtagacttttgatgatgagtcaatgtctagtttaggtgacttatgtcttatacgagcctgattcacattttttaccactttgtaccatatgaattggtatttttcctccaatgtggtaacaaatcttgttgaagcttcatcaaagcaaaacagcaaatgcatgattcttgaaagggtattaaattgaaacttttaaaatgtttaagcatattatgaaaagttaaaatattagtggggtggatttgtagttttttaaaacttggagaacagatacatcttactgtcattactgaggcaacatcgagtacattcaccggaaaatg

SEQ ID NO: 16951 - DNA, 3003 bp, Unknown; identical to SEQ ID NO: 16950
  misc_feature (1)..( 3003): 2750-1469P.txt file - cDNA_ID_1807311; gDNA_ID_1620651; Annot_ID_47749

SEQ ID NO: 16952 - DNA, 3003 bp, Unknown; identical to SEQ ID NO: 16950
  misc_feature (1)..( 3003): 2750-1469P.txt file - cDNA_ID_1807311; gDNA_ID_2926182; Annot_ID_140600

SEQ ID NO: 16953 - DNA, 3003 bp, Unknown
  misc_feature (1)..( 3003): 2750-1469P.txt file - cDNA_ID_1807318; gDNA_ID_1620766; Annot_ID_50117
cgaaaaaacgtaaagcaaaatagtacaatatggatcctgatcttttgacttgctcacttctttccaatcatgttctttcctttggttgttttctctcgctgcgttgttgttccatctacgttattaactattgtcgttttctctctcgtcactggttttgtcccttttaaattgcttttctgaagctgatgaaggaaaaataaacaagaaattagacaagacacttccaaaaaaaacccagcatcgagtcactagatcataaaacgtttatttatctaagtatatgattatatacccctttcaacgcggtccgacctgcatagataaacaagacatgttagtttcatacaaggtagtacttagttaatcatatataagttatttcagctatcttaattattcatcatgtacaaattagcccgaacgtacgtaccttcttcgcctgcagaattactggatgaagaatccatagatggaaacaactaaacaagagatcagagatatccgtgaatacgaagcttgttttttttattttatttttattttttaatgttcttaatttcaaatatatagagagaaaaattattattcttgttctcttagggacgacgccttgtaattggtctgctcacaaagcaaccgcacttgtgttttttgattcattgaatataatttatgagtgactaactaaatatttagtaaagaaagtgggaaaataatagtcaacaaattgaagcgttaaccttgccataaaatcgtcttttcattcaaaaagtgagggattaaattacataagaaaattacaaaacttttatttcataggccagaagtctagaaggtacgtaggccaatattctagtttgttcatcataggctcatcgcgataaactccatatgattaactgcaacactatttgttatgaatttccaaataatgtattttaattttgagctaggtttcatatgaaatcagaataacaaaatagtagtacgaagtacgaaaaagcaattttaaaaaacagctaaaaacataacaaaatagcagtaagaaaaagtggaaccaaaaagctgaaagtatcaaagccgtgttgctaatcaaacccaaaaacaaataatccacccttaccaaaaagacaaaacttgatagtattaattcacaaccatttatcaccaaaagtggggaaaaaccaacgagcatccttgaaaagttttgtcgaggaagtagttagatgttcaaactcttggaccacataatcgcttccgatttggtaaacgcaaatacggtcagcgttataaccatcgcgtagactaatcccacaacatctatgatactgatcattactaaaatatatgcaatctctcataactccatctttggccggaaccgtaattcctaaatccaaaagcaatgcctcgtcccctatagacttgattagtactgtaaattctgatgattttggatccatcttattgacagtgaagacgcatttagcctctggagaactatccattttaccacctacaatgatcaaaacttctccagacaaagtcacagcaagattgctgaaatacttcatatgaaatctatttacacacacagacgatccgaaacttgcacattccatttctactggagaaacaccaccggagaaatcaaaaacagtgagacattgatgtgcactaatcatgtaaagcttgctttctttaaacaccatatcaacacagccttgatgctttattggttgaagaactttccagctattgttgtcatctcctctcttgtgatgatatgctacataactagaaagattacaaaacacaaagtaatctctgcttttgtcatctacccacagaaccgctttgtctatttctatatggctaccgctaatgggtctcttgaatcgcatataccgttctccatcgattgattcgagagacggaagaagaatcctctctcgagtaaaaagattcaaaagatgaaaatcagctctatggtcgaacataaggaaccaactaccggaactcgctaaacaacgactcgtagacatatcaaaccctaaatctctgattatgtaggttttgttttcatgaggatcaaacaacttacatgaaccgttgttttcgacatttttgtttggaaaaagaatgatccatggagttgttggatttgttactccgatgactgatttcgaagcaacataccatgttgaagaaacgcatctcgctcgatgaaaatcaacgaagctcaagcgctccaagattaatctaactaggtccacgatataggccgcttcgaatcgtccttccatattttttccgtcggaatcgctcatctccttcttttgtgctatttcacgattttcaatcttagggtttgtgctcagagacgtgggggagaagatgagtcaataaagttaatgaggctattgggccattatgtaaaataggcccatatattaatgggtttcgttggattagaaatcttaacttgtaggaaaaaaaaaattcacgccggcaaaagaaaagaaaaaaaaaaccttcgccgtcgtttgcttagtcttcttcgctctatcccaacactcgatcaaataatcccagtgagcttcttccattccaaggtacgaatcgataaagtcatcaaacctataccttttcaggatttaatggtaattagtcaggatctaaatcgtttcttcgaatttgatttcggtgatctagaaccctaatttggtcgggaattttcaaatcaattgatttccctgccctaatttaatttgatgattgttctgtttgcctatgaataagtttgatttcaatggcaaacaaaaaaaagagagacattgatttgaatatttttacttaggtgcattgattctgcagattgtgttaatgtgtgtcactcttaatcttctgtcttatgtttttctcagttgataaggaatttgaagaagcctttgtttaatggaaagcaaaggaagaatccatccatctcatcatcatatg

SEQ ID NO: 16954 - DNA, 3000 bp, Unknown; identical to SEQ ID NO: 12879
  misc_feature (1)..( 3000): 2750-1469P.txt file - cDNA_ID_1807330; gDNA_ID_2214578; Annot_ID_135214

SEQ ID NO: 16955 - DNA, 3000 bp, Unknown; identical to SEQ ID NO: 12879
  misc_feature (1)..( 3000): 2750-1469P.txt file - cDNA_ID_1807330; gDNA_ID_2214578; Annot_ID_186395

SEQ ID NO: 16956 - DNA, 3003 bp, Unknown
  misc_feature (1)..( 3003): 2750-1469P.txt file - cDNA_ID_1807333; gDNA_ID_1621088; Annot_ID_55422
aatctttcccgaaattggtgttcacagttcccatcctagaagagctcatttcagcagcagcaggaacaaccttgtcactggcatttggcttagctgataccatgcccattagctcagcaagaacctgctttgggttctctgcttgttgttttaaatcctcaagctgcagaaaaaaaatgttggacattagtatgggtttagagatattttaatgaactgataggtttagtttacttgccttcttttctagatcttcagcgagaccagctaagtctccgatctcaacttctttgtctgaagcagatttatcaatgtaaggaacattggatgattgttggatgccttcatctatttcagagacggttgaggaagttgctgaaccagatgcacctttgatttcattactgagcctctccatccgagctttgcatattaacaaagctttttgacaatatggtattgcttccttaggctgacatccagtctcaagacaaatgcagatgcggaagtttctgaaacgttcaagttaagatataatccaacaactgaattgacagaaacgaaaatcaggtacaatttaagaaaccacaaggatacaattcagctgtgcgtcgactgtcgggctcaaccagtctctctaagatggataatgcattcttgtagtcagacagggaagactcaatgtcctctgcatagtaaacaacagaactcaaaaccaaccaatagctgacatgagaaaataagacaatgcaaaggtgaaaggaagaaaaaatacctctttccaaggacacttcagcaagcgaacagagtatatccactttttccattgtctcagtagactgtttgtcagtaataaccctagcaatgtccagcattttccaggccatatccaaatcagactcatcttcatcagcatcaccatcagcatcagataggtcatcatcttgacaatcttcaccatcctctccttggtctttaccaccagaacctatacatgagggagaaaagaagtcagcaaacaaagaagcagaagcatctatacccataagcttaacctaagacaattcccaataatccataccttcttgcccacttgaactcccttgtctctctgggtcacctgaaacaacagaaggagccagcgattcaccattgctggactcttgctgaacttcaccttctttcttaggcatgttcccaagtggatcagcttcagcttgagcctttgccaggagagctaatccatatcgatagtatgcgtttatacactcagcatcaagttcaccataatgtgcaaccctaaccataccattaaaacaagcaatgttttcattagatcctttgataaaaggaccagatactaaagaattcagtcgagagaacacacaattgaaactcaactaaaaattcagaaccatgattagatcattcgagcataaactagattcagaaacatctgaaaccctaaacccttgattgagaggttctcgactacaaattctcaaatgaatctcccaaaaagatacctgatttcgagagcacggctgaagcaatcgacggcttcagcgaaatcgttctctttcaaaaacacagagcctttctccgtcaattcctcagcgaactcaagcgtcttctcacgctcctcatcacaaacctcagtagcagcactgtcagcggcgttgttgttattagcgtcgttgttacaagtcgattcagtgcctccctgaacaaccgattcgacggtggcttcgattgaggctaggttaggttctagggtttgcgcaatctccgtcgccggctcggttagggtttgtatcaccgaagcttccgacgcagaagctgattcttcaaccatcgcggattgagattttttctgggtgaatttgaatttcgaagaacaaaaacgtcaaatttgttgagaagagtggaatcgtattaaaaccctctcttcgctttttttggcggacttgaaaatgaaaaccaaaattaaagaattaggggaaaaaatatttttatgttttaattaaaatattcacggtaaacactaaaatatacgaataaaaaatgcgtatgttatcccactaacggttagtctagctaaactgctccgcttttgttcaagctatttgactcatgacgcacataggccataggaaaattgttacgctgtaaaaaaatatatgaccgttgtaacggaaaagggtaattttgtcttaccgaagttgtcttaccgaaaagggaaaattgttagctaaaagtttttctattatataaaatatttttattacaaaaatgtttttaaacttaaatgttaaatttaaatactggaacggttagatttaacatcccgtcttttaggtatgtaactcgtgcgttatcataagttcaacatgttttctcatatttaaatttaattttaagattttttcaaaaataatctgttttgatattttaaagctaaaagtttattaacaaaatgttttcaaacttaaatgttgaaatttaaatacttgaaagcgtttagcatcctgttcttttagtctgtaactcctgcgtattataagttcaacatattttcacatatttaaatttagttttaaggcttttttaagaataatattgtaagtaatccgttgatttttttttttcgtcaagtaatccgttgattaaacgcaaattttaattatatatattctttttattcaaaacttaaatgttaaatttcaaagatgtacaaactaaacttgatattctgtccttagaaaaaattaccacttagctttataaatattaaagtttatcaaggtaaaaaaaaacactttaagtgtatgtggaatataaagagtgactcatttcatattattttgtaacaaagtttaaatctttgtaacaaaaagcgtgtggctctaatagcttggttagacgaagaagctactactccttcgataataacgatctgatgagtagcagttttgtcatctctctcactctctcccgacgatg

SEQ ID NO: 16957 - DNA, 3003 bp, Unknown; identical to SEQ ID NO: 16956
  misc_feature (1)..( 3003): 2750-1469P.txt file - cDNA_ID_1807333; gDNA_ID_1621088; Annot_ID_170554

SEQ ID NO: 16958 - skipped

SEQ ID NO: 16959 - DNA, 3000 bp, Unknown
  misc_feature (1)..( 3000): 2750-1469P.txt file - cDNA_ID_1807333; gDNA_ID_2926213; Annot_ID_202743
ctttcccgaaattggtgttcacagttcccatcctagaagagctcatttcagcagcagcaggaacaaccttgtcactggcatttggcttagctgataccatgcccattagctcagcaagaacctgctttgggttctctgcttgttgttttaaatcctcaagctgcagaaaaaaaatgttggacattagtatgggtttagagatattttaatgaactgataggtttagtttacttgccttcttttctagatcttcagcgagaccagctaagtctccgatctcaacttctttgtctgaagcagatttatcaatgtaaggaacattggatgattgttggatgccttcatctatttcagagacggttgaggaagttgctgaaccagatgcacctttgatttcattactgagcctctccatccgagctttgcatattaacaaagctttttgacaatatggtattgcttccttaggctgacatccagtctcaagacaaatgcagatgcggaagtttctgaaacgttcaagttaagatataatccaacaactgaattgacagaaacgaaaatcaggtacaatttaagaaaccacaaggatacaattcagctgtgcgtcgactgtcgggctcaaccagtctctctaagatggataatgcattcttgtagtcagacagggaagactcaatgtcctctgcatagtaaacaacagaactcaaaaccaaccaatagctgacatgagaaaataagacaatgcaaaggtgaaaggaagaaaaaatacctctttccaaggacacttcagcaagcgaacagagtatatccactttttccattgtctcagtagactgtttgtcagtaataaccctagcaatgtccagcattttccaggccatatccaaatcagactcatcttcatcagcatcaccatcagcatcagataggtcatcatcttgacaatcttcaccatcctctccttggtctttaccaccagaacctatacatgagggagaaaagaagtcagcaaacaaagaagcagaagcatctatacccataagcttaacctaagacaattcccaataatccataccttcttgcccacttgaactcccttgtctctctgggtcacctgaaacaacagaaggagccagcgattcaccattgctggactcttgctgaacttcaccttctttcttaggcatgttcccaagtggatcagcttcagcttgagcctttgccaggagagctaatccatatcgatagtatgcgtttatacactcagcatcaagttcaccataatgtgcaaccctaaccataccattaaaacaagcaatgttttcattagatcctttgataaaaggaccagatactaaagaattcagtcgagagaacacacaattgaaactcaactaaaaattcagaaccatgattagatcattcgagcataaactagattcagaaacatctgaaaccctaaacccttgattgagaggttctcgactacaaattctcaaatgaatctcccaaaaagatacctgatttcgagagcacggctgaagcaatcgacggcttcagcgaaatcgttctctttcaaaaacacagagcctttctccgtcaattcctcagcgaactcaagcgtcttctcacgctcctcatcacaaacctcagtagcagcactgtcagcggcgttgttgttattagcgtcgttgttacaagtcgattcagtgcctccctgaacaaccgattcgacggtggcttcgattgaggctaggttaggttctagggtttgcgcaatctccgtcgccggctcggttagggtttgtatcaccgaagcttccgacgcagaagctgattcttcaaccatcgcggattgagattttttctgggtgaatttgaatttcgaagaacaaaaacgtcaaatttgttgagaagagtggaatcgtattaaaaccctctcttcgctttttttggcggacttgaaaatgaaaaccaaaattaaagaattaggggaaaaaatatttttatgttttaattaaaatattcacggtaaacactaaaatatacgaataaaaaatgcgtatgttatcccactaacggttagtctagctaaactgctccgcttttgttcaagctatttgactcatgacgcacataggccataggaaaattgttacgctgtaaaaaaatatatgaccgttgtaacggaaaagggtaattttgtcttaccgaagttgtcttaccgaaaagggaaaattgttagctaaaagtttttctattatataaaatatttttattacaaaaatgtttttaaacttaaatgttaaatttaaatactggaacggttagatttaacatcccgtcttttaggtatgtaactcgtgcgttatcataagttcaacatgttttctcatatttaaatttaattttaagattttttcaaaaataatctgttttgatattttaaagctaaaagtttattaacaaaatgttttcaaacttaaatgttgaaatttaaatacttgaaagcgtttagcatcctgttcttttagtctgtaactcctgcgtattataagttcaacatattttcacatatttaaatttagttttaaggcttttttaagaataatattgtaagtaatccgttgatttttttttttcgtcaagtaatccgttgattaaacgcaaattttaattatatatattctttttattcaaaacttaaatgttaaatttcaaagatgtacaaactaaacttgatattctgtccttagaaaaaattaccacttagctttataaatattaaagtttatcaaggtaaaaaaaaacactttaagtgtatgtggaatataaagagtgactcatttcatattattttgtaacaaagtttaaatctttgtaacaaaaagcgtgtggctctaatagcttggttagacgaagaagctactactccttcgataataacgatctgatgagtagcagttttgtcatctctctcactctctcccgacgatg

SEQ ID NO: 16960 - DNA, 3000 bp, Unknown; identical to SEQ ID NO: 11918
  misc_feature (1)..( 3000): 2750-1469P.txt file - cDNA_ID_1807341; gDNA_ID_2214522; Annot_ID_134090

SEQ ID NO: 16961 - DNA, 3003 bp, Unknown
  misc_feature (1)..( 3003): 2750-1469P.txt file - cDNA_ID_1807355; gDNA_ID_2214555; Annot_ID_134771
gcagtgattttgagcatgaagtagcatcaaagcaagtattagaagcgctcttcttcaaagcagaagccccacacaggcaacgcatcctcgcagctgaaggatcggactccatgaaccgccgtttcatagagagggcttacaaatacagacccgtaaaagtggtggagtttgagcttcctcgcccgcaatgtgtagtgtacctggacttgaagcgagaggaatgcgcaggactattcccttcaggaagagtctattctcaggctttccacttaggaggtcaaggtttcttcctctcagcacactgcaacatggaccagcaaagctcgttccactgctttgggctattcctcggaatgcaagagaaaggggctgtgagttttggtgtggactacgaatttgcggcaagagataaaagtacaaaggaagaatacgtaagcaaatacaaaggaaactacacattcacaggggggaaagcggttggttacagaaaccttttcgggattccatggacttcgttcatagccgaggacagtcaacatttcatcaatggcattctccatctcagagccgagctcaccattaaacgttcctcagacctgcactgactgttttcttctctctctctctctatgtcgtcacatttaagttgtataatctcgttatgtagcagctctaaccacgagtgtcctttgtacaataattgcctaaggagcaaaagtatggcttaaagagtacctcattctgtaaattctttgattggatttttttacttttctatatgggtctttataaatagtccaagatagaatttgggcctagcttttgaggttagtcttaaaatatgggctcaaggcctactacgatgcgtaatgatgaagctaaattgcctatagtgtgaacattaggcttttatattcaaagttcaaacaatgcggctatagcaatggtacatcgaggaaatagaatgaagtgacaaggataatttaggaaatgaggatagaggaattgagtcctcgtcacatggggcccacataaatgcgtaagtaagactatccgcttaccagacggacacgtcattttgtcgggacacgtttgagccgttggatgattaatctccttttctgacttatcgaccccactttttttttccactacaaaatattgatggccacgtcagatgattcgaagttatataaaacacacgtttttattgcagcttaaccgtcgatttttttctaatcgagaaaccgagatcaacggtctatattcaaagctgatgtggtctgtacctttgcttacgtcaccgaaaacctaagttgaataatactagtactagtattatgctctctgatttctttctacagtacacaaaataaaaataaacaaaaatagagagcccagacaatatttactacatcacccaatggataaccgacacgtagatacatccatgtgagtcgcattttgtaatgtagggaccacttcgtggatagaagctcttttacgccaacgcaaaaaaaaaaagcctcgttggccctttagcctctaaatgccaataactatctactggcgtggcttagtttataccgttggatcatttgtttatcccagccgttggattcgaagcagttgtcgggcttgtgggccttttctttattgttttgttttcataataatgaaagaaaataaactaaaaaagtattttttatttttccttttatggtgattccatgatggcaaaaacgtggccatacacgtgggtcgtctcgtggcacctttggaagatacgaatcggtagtgaataatggacggttcggatctttagttttgtcgacagaagtgctctccgcgtcggagatactactagtcaaaggtcttttcttccttcgtattttaccataatgtcccttctttctaatcaaatttttatcatgtatccaaattattcgaagcaatattctatataataaacaaatatgcccatcggtaagtagcaaaagttaaattgtgtttattttcatgccatacaaaaataatgattctgaaaattcgttggaaagattgtttagttttcttatttttatgttgcacatgacttcactgacgtgtgaatgtgatgacggattttgaagaggattatacactatggtaaatatcgactataaaaataatctaaacatgagggaagcgtagagcgactagaaatcgaacacgtgtacggtagagatgacataagaaatggctggcactaaactcgatgagccaactcatcaaacaccaccgtagtttacgctgttatatattctcatgacacgtgtctgatgacgtggtcatcgtcttggcgctccgttttttttctctctctctcgcgtctcccttccctcaaaaaaaaaaactgaactctttttcgctctggtttttttagagagagagaaagatgaaaatgcgtttaattgctgtttaggtttcgaattcgcgatttaaatttctgggtttctctctgtttaagcttcttcttcttcatcttctgcttacgtttcttcttcaaggagctttcggattcttgtaggtattgcgtaacttaaatggttcaaatagagattgtttggtcgaatagttttgtgatttggtttctctatcattcattgatcttctaagttttgtgaaaattttgccatttttgatcgtttgcttttgcatttacttgaattgaatgaaaaattataagttttgaatttgaacaaaaacagctaaagcgtagagaagaacagagtttctttttttgggtgcatgtgattgtttcaggggtagaattgtccagtagtgtctactttgttgattccttttgtcttcctgaaagttttctgaacataggatgtgagagagaaatactattttacccttctctgtctctatatttctcacacaacaacacccatccccatgattttgcagaaagagtcattgttctcttgagtgggaaaccttgaaaccattcctatg

SEQ ID NO: 16962 - DNA, 3003 bp, Unknown; identical to SEQ ID NO: 16961
  misc_feature (1)..( 3003): 2750-1469P.txt file - cDNA_ID_1807355; gDNA_ID_2214555; Annot_ID_185702

SEQ ID NO: 16963 - DNA, 3003 bp, Unknown
  misc_feature (1)..( 3003): 2750-1469P.txt file - cDNA_ID_1807359; gDNA_ID_2214527; Annot_ID_134190
agtgggatcagcttgaggatgaaaagaaggtgaagaactagcgaatggttgagaaggaattggctggtttggtttgtgcgtcttcatagaagctgaaacagaagggcttggcaatgtatcgtgaaccacttgagcagcattgcgcatacttggctgcattcctccagattgtctccattccctaataaccgaaaaagcatttgttattgataggaaaagagaagaagcttttcacttgctcatcggataaatgctcagatttaagatcttgccttatccttcgtattgtatcatctgagttaacacggcctagaagctctctatgctcctcattcgataaactcaactctttacgtaattcagttatgacactttctttttcctgaacataaaatacatgttattccacctaaccagacactaacacaacaagagaaatcaaagtagatcaaaaaatacccatgaaatagcatctccttgggctttaaaggctcttaaaacagagatatatgcttccttctcaatctggtgaatctgagcttccatatccgcagcaagatcatcatacatctttgggtaagatggcggaagattcaaaggtcttccattaccagccacgcgtcctcctcttcctcctcctcctcctcgtggaactctatgcgacggtggcagatcatcatcagttcctgaatacaccaccggtaaaatcaatcaatgttgcattctcaataatcaaacctttgtgaatcaatcattaccacacattacattcaaaaggtttcagcttaaatcaagaaacagcaagatccaaaatttcaactaaaaacaccaatccaccaaaataacacaatgtataacagtaatcgcacggagaaatcccaaaagttgtgaaaaccctaattttcagtgactgatagagaaggcgagagaaattctacacagttttcgggaactaaccactgctatcagacgatttgcagtccatgacgaagcttaaatcaagagacgaatctcgaagatgaaaattggagaagctagacgaagaatcaagcacaatttgccaaggttgatttcaatttgacttagaagaggactcgatttttggttttgagctcaattttgtactttgtcgagctgctataagaaagaagcgacggatcaatttcttgctccggtaacaaatctgagcttcactataagtgattcagcttaaaagattacagattttgcctaaagctcattatttgccaaaattagaagaactcagacgaaatttaattttataagaacaaaagtaaacaaatttgttgagaaaataaattttcgtagattcattctcattaaaattatcaaaatagttacgagggaaataaaacaccgtcgtttcgtccccagccacgtgttcacgtagagatttaaaaataaaaaataaactgaaaattagatatatcacaaaaccccgaagctgtgtaaagccttacccaagcccattagttttataagtaggcccaactatttgtatgttaaattgataaacaaacgtatgttattgcttcgatgtgttcaagtaagtaaaatacaacaacgtacgttagtacggtaaagaaagagttcaattttgatggatcctctaattctttttttatattatttgttattcttcaaatttgttgaagtgcaatagctcaccaaagatactacgagtctacgataaagaaagagttcaattttgatggatcctctatttttttttttttcttccaatgattctatgtcacattgtaattctacctaagcctgcatgcttatgtaaattgtaatcacgaggaaaatcagttttagaaacgagcaaaacctcactcgtatacttttagtttacgcggtgtctccgaagacgatcgattctaattataatcggcattacattgttgatatatggaaggttcttcaatgaacagtgtgagtttcctaagaaacagctaaacagttatcggtgatcgctaaaacctttcacagtttgataaagttttctcctgctctagtttaatttcatcaattttggaataaattttatttaaattatttttggcttacaaataaatttgtattggactgttcttgtaaaaattaaaacttttgtaatgaatagttgttaaatataaatattttgatagttaaattattactaactattaagaatttagtccatatttaatttaatatgaactaaattctttgtttttgatcaaaaaacttataaaattaaacgtggaaaaagatccgatcctctcaaaccaaaacaatgacttggttcgtcacattgaaaatcaaagagagtgttaattaatttattaaatatatcatgttaggtttgataaataaaattgttattctgaccgacagtccaaatcccaaacgcgttccagactacaccaacctgtgaaaataaacgtttaaaaaagaaagaaagactcaaagaagtaaaacaaaagtaattaattaaaatttgaaatagtagccgttacaagaaacttgtcgatatttgtatcaaaagacgtttttacacaaaatgacgaaaactggacttatcaataaaactaacacgtcttcacgtttccttgagaaattagcacatctaagtaaatgtctacacgacgtgcaatgatgcttttctttctctaattttttctttttaataatgactcagctactttagatttatttttgaaaaaattcactcacgttttatcattcttttcctattttgatataacttgataaggtcatttttgaattttccgtttactaattaagaaaattagaatattttatcatactctctttctctttccctctatcagatcatctttctcaaatagctctatttagatattcacatacatatccagttgtgattctcttccttatataaacctccacttaactcatcttcttaaaaacaaaactaagattgaataatcataaagaagaaaactaagaatg

SEQ ID NO: 16964 - DNA, 3003 bp, Unknown; identical to SEQ ID NO: 16963
  misc_feature (1)..( 3003): 2750-1469P.txt file - cDNA_ID_1807359; gDNA_ID_2214527; Annot_ID_184800

SEQ ID NO: 16965 - DNA, 3003 bp, Unknown
  misc_feature (1)..( 3003): 2750-1469P.txt file - cDNA_ID_1807363; gDNA_ID_1621153; Annot_ID_56928
tgcacaaagaaaacgctcttatacgtaaatatattggtatttctactagatcatactttatactttatgtgttatttctccattccagtattattgtttttcttttgttacgcatcataatagggcggcaatattcgttgacaatgattgctaagctgaatggaaacataattacaattttaatagcaacaaatatatttaaataaagtaaatagtaaacaatacttaaatgctaatcgtacaaattaaaggaagggaaaataatttgataggtctactgattgaaaaagaaagaactaaagcactcttgctggccccatcccctgtctccctcatctatcacttaacttgataatccaaaaaatatcatatacttaatttgcatttacttaattagtttaattttatatacatctacgttttaagtttgtttggttcgaaataattctgaacagcaatcactttactttcaactaaaaacgaacttggttttaaaaaatgatttatatattcgaggttgattaattatagaacactagattttgctgaaaatgaaaataaagtaatagaacactagctttcagtttttttgtagcccttatagatttgatgctacgtgtgtgtatatatattattcccatcaaataatttacgcgagaatataataagatttaattttctaattagtgtataaaattttctaaagttttcccccaccatcattgacatagtttctctatattcccctcttcttctcctttcaagaccaaaagaaaaaaaaaaactttttcttttctgatgaatcgtatctattagctatgagcctgaggtgatgatcatgtcaacataaccatcaacgttctaccatggctagtcatagcaacaaaggcaaaggcatagcagaaggatcgtctcaaccgcaatcgcaaccgcaaccacaaccacaccaaccgcaatcacctcctaacccgccagcgttaagccggtacgagtcacagaaacgacgagactggaacacgttttgtcaatacctgcgtaaccaacagccaccggttcacatctcgcagtgtggatcaaaccacatcctcgatttcctccaatatctcgaccagtttgggaagacaaaggttcatatccatggatgcgttttcttcggacaggttgagccagcgggacagtgtaactgtcctttaaaacaagcgtgggggagtttagatgctttgatcggacggctaagagcggctttcgaggagaacggaggattgccggagagaaacccttttgccggcggcggaattagggtttttctgagggaagtgagagattcacaggcgaaggcaagaggagttccgtacaagaaaagaaaaaagaggaagaagaggaatcctatgaagagtcatgatggtgaagatggtactacgggaactagtagtagctccaacttggcttcttagcggaagcaaacaaaaaatctataataaaacaaagtggaattagttaatggtaagcatttaatactctccataatctctattaattttcagtactttaatcctattttgtgatctatttacaattttacatatagagtgaaaagaaacaattctacattcgtttcttgatagtcagctcttaatgcatagttgaattttatacgtatcatacccaaactataagattaatcttgatcttagatcatatacatatatcatcatggtgtgtaccctaagtttcataatcatttttcttaactatttatgtggatattattactgtactagataatattttatacagcttaaattaatatgttcattaattttacctcgctgtaaaccctagctagagagtatacaatatacatatacacacaaatggtataaaaccctagttttggctcagatgtaagtgtgtgtatacaatcatgcatcgtgatatatgcatctatacatgaatgcataggcgtatacatttaattcattaatgtgaatatgaagggaattacatcgatcagatgttttaggggtttagtttctgcggtggggcttcctgtttaattaagctccggggatattgtgctccttaattaagtgtttacgaatgctacaattttttttgaaatggttataaatttttattaatctatacatgtataaatgtataaaaaagatcaatgctagctaaaaagtttcactgactaacttttgtttcatattttaactgcattattccaattattgtttgcataatagtctactagtttgcaaactaggcctattgcttaacacagcgttgtaagttgtaacgttataaatcgtgtaaaaaaaaaattgcatgtgcactagactatgatatatcacgatgcatgatttacgcttttgttccacaaatgttgattagtgcgactatattaatcttacacataagtgtcataagacacatacacagactatggacagaccaaactaagggtagaaattaaaaaagtttaactcgaaggagagacgacacatcgaagaagtgtggacgtattgccggagaagaggcaaacgattgaagaagtggggctaaagagtttagaaaatttgagaacatgtaatgtagtaaattttacaatattgtggcttacctcttataatgttttttttccccataaagtttcgattgatcttccatgtcaattcgtatctaaaatgttcttcagagaattagaggggggaggggggggggattatgcacagtaaaagttcagggatcagcttgttaaaaacagagattttggggtaaaagttttaaaacgttagaagttttgggtctaacttgtaagaaatcagaggattaggtgaaaaacataataaagtgaaagtttaggcgttaaaatgcagtaaatggtaaattgttaagagaaaagagatctaaaataatataaaaagtgaactctaatgacaaaaacggaaagcttgaagttcttcttcctcatcggaaaacaaacaaagaatgatg

SEQ ID NO: 16966 - DNA, 3000 bp, Unknown; identical to SEQ ID NO: 12576
  misc_feature (1)..( 3000): 2750-1469P.txt file - cDNA_ID_1807367; gDNA_ID_2214559; Annot_ID_134856

SEQ ID NO: 16967 - DNA, 3000 bp, Unknown; identical to SEQ ID NO: 12576
  misc_feature (1)..( 3000): 2750-1469P.txt file - cDNA_ID_1807367; gDNA_ID_2214559; Annot_ID_185839

SEQ ID NO: 16968 - DNA, 3003 bp, Unknown
  misc_feature (1)..( 3003): 2750-1469P.txt file - cDNA_ID_1807371; gDNA_ID_1620677; Annot_ID_48275
ggccagttcatgagcaactacagtggcaacctagcagcagaaatttaactgctttagataattgcacaagagagcacaagacaatttcctctagagaataaatggacatgtttacagtaccctctgtttgttagaagcagctgaatgttgttcatcatagagaagagctgtttcacggtatgtaactaaaccataattctccatagctccggcagcaaaatctggtattgcaatcatatccattttgggaaggggatatggcacagcaaagtacctacaagaatgattggacttatgcaatgagatgatacatccattaaagaagctcagaaatatgcatgcacataaagtttcaaatgtcaacgaaggacctactctttgaacagatccaatgtcttggcaccaacatgcaatgcaaatttcccttggtcggctttgcccacttgacagtatactctgactttaatccctgagaaaaagatgaaacttgatttagagcttctcgacttgactagacgggagataataatggataaaattaatttaccatcggatgtatgatcttccacgtagtcaaacaaaccaacaacaattgctaccaaatatgtagacatgattggtgactcttgataggagacaatcttcagattcccattgactttctcctccattattggcatattggagagagccaccaaatcagttggcacctctaatgtaatcttgaaggtagcctgttgaacaatgtgtcaatattgatagataaagacagaagaagaacaaaatcaccaacttgataaactcatgctgatagaaagaggagggaatgagaaagaacaagtggaaaccttgcaagcaggttcatcccaacatggaaagcatctcctagcatcagctggttcaaactgggtaactgccatattcttcttctcaccgttatgttcataagtactgccaccaagacaaatacaagatcgttctagaattaatctcgagctatctaacagtaaaaaaagatcgaaactcattgctttaccttctgtagaatcccttcattttgtcatttagtactccattgaaaccaagtttcagaactcccactccatggggaagaatctcaccaaactcaagcacgagaatctcatcctcctcaaacaagacaacttttggagctgcaagcgcctgcttaacaaaacataagaagcaacaacaagctaaatctttgctgattccagattcaattccaatccatgacagttttctaaagttgaggattggtttttcagtcgaacagaaaagtctggctgaaacgtgattgtatctctctagttaatttaccattggaatcaaaaatcatagatgatgatatccaaatactcagatcaagaagctaatcatgaaaatgaatatctccaaggcgctaattagctcaaaaccataactccaatcacattgctaaaatcggaatccataacagcaaaaaagaaacgcgatagagagaccttagaggaggaaggaggagtgaaggaaacggaggcatcgttgacggagagatcagctgcgttgagaacgatgaaacgagtatcggcgactatgtcgagatcgatggctacagttccagtgaaggtgcaggcgatgagatcgggattgaggcggagatcgtagcgcttggggacggcgaacttgggtagacgaggctcacctttgaactgatccattttctattacttgcagatatgatttttttttgttttctcttgttggagttttgtcttttataatacgagggttgtaagcaattgttttatgttacgccacgcgagtgattcgtttctagtagaggacgcaacgttaataacatttacaaaacattcaataatatcactatcaaattcaatgacgttggattatccattagcatctccaagctaggccgaatatgacaaaatgtgttttgaccagtgaagaaatgtttaatcagattacacttgttcataagaagattcaatgtcactactactcgtcaactcaaagtcccgcggatctagtttgaacaacacacatttaatcgttctatatcctcaatcatctccttgatcagattcccaacatcccctgagtcccatgttgtactgatgaccagggtgatcttcttggctcggcgtgtccgtttctcgaggagcatccgccatgttccacgtagcttcatcaggttgtagcctctgtcccttggagctcggccattatacttaacagtgagatgaagatgatctttattcccttatttatatcatcataataagactttaaaattttgaattgtatagtttctcttttttaatgttaatttcctctctttctttttttggtcaacgagactaatttagttttctttcttgcctagggttttcgtcttctgaaacgacgtcgttaggatctttccaatcgagttcttcccaagcttcgtcgtcgtcgtcgtctaggtcgggtgtttaaatttacggtttctgagttagacgagagactctcaatctcggagaatctgaggttttacgggatatcccgttttaatcaaattcagggtaaatttcaattctttttccttctgagatctgattttttttcttttttttttgggtattgaaattctattatccttgaaaagcttcatacttcttaaaactttgcattgtctgagtttcatttttgatacaatctctctatttgattctttctgcaactttggttatgttcatttatatttttagagtatcaaaaatgaatcttttagttgtcttttggtcatcttggattatatttctctgtttgtgatgaattctgaagcttgttgttgtgttagattcttattgtctcactgtttacatttttatccttttcttaagagtgatgatataggttttttttttttctgaattatagatagatggattttcagagttgctaaggtgggacagagtattagtggtgattgcaacgacaatg

SEQ ID NO: 16969 - DNA, 3003 bp, Unknown; identical to SEQ ID NO: 16968
  misc_feature (1)..( 3003): 2750-1469P.txt file - cDNA_ID_1807371; gDNA_ID_2926203; Annot_ID_141618

SEQ ID NO: 16970 - DNA, 3000 bp, Unknown; identical to SEQ ID NO: 11202
  misc_feature (1)..( 3000): 2750-1469P.txt file - cDNA_ID_1807374; gDNA_ID_2214483; Annot_ID_133319

SEQ ID NO: 16971 - DNA, 3000 bp, Unknown; identical to SEQ ID NO: 11202
  misc_feature (1)..( 3000): 2750-1469P.txt file - cDNA_ID_1807374; gDNA_ID_2214483; Annot_ID_183436

SEQ ID NO: 16972 - DNA, 3000 bp, Unknown
  misc_feature (1)..( 3000): 2750-1469P.txt file - cDNA_ID_1807381; gDNA_ID_2926150; Annot_ID_198017
ttaaagcccaatccagatataaaggaaagcacttgtaaaaagtcacgtgagaataacattttcaaccacagtggcttgtattggcccaacgtttttttcactaacggcccaaaaagcccaaatcagctattgattagtggaggagtactcatttattaattcctcctactaattggggtttaccaacttaacagaaaaaatgcatcagttgtgtgagttgtcgaacaatcaaagtgatttaccaacaaaatataaataaaagtaatcattaacttgattagatataaaattaaaaaaaaatcggttagtcaaacacaatgtttaaattaatgttgacttaactcgtttttagtaatattgtatgtatctttataataataaaagaatgcttgggtttgggtccacgcgtttttgtgatacaatgcctcgtgcaggccacttggagctaaatattttttttgctaaaaaaactcgtcctcgaaggtttcacgtggctcatgcacccctgactgggtcaggagaatcttgaccgttggatcaaagttgaagcatttataatagctttgaccgtccgatgaatgactacaaagattgtgattcgttataagccgtacgattgactaacacaaagaggaatcaacatcacgaggcgagagataatggtaacaacggcataaaagcatttttctcgacagctgtagcaaactccacgtcatcttatcttactcgccgtgtgaaccgttgattttatgaaaatttgtcaaccttttttactcgcggagatcacgcgctcccctcgtttggcacgtgtgtcacactctgcttcactcgtaaaattctttttccttttcttctttcttattgttcaccatataaattattttgaaccaattttttttttacaatacaaattgtttttaaatttctatacaaattatatattatttttatatttatgattattacataataattagttaaattttttcaaaataaatattcttaaatctgcgtgtttttagttaaaataatttatattgtgaaacggaaagaataatattttttccgaaaataaaatgtttagtaaatttgtgtgtttatttcaaaaattatgttattgtttttcttttttttaaatgagttgtagaatgggaagaactaaataaacacactactcatattattattttttataacattacctacatgtgctttgctgttgctattctcaaaaggtaatgaatggtacaatagtatcccatgtttagagtatgtggcagagtgatcaacactatggtgctaagtgacaatcactatctttctatctacatactttttatattgcatttaagcacattttttggaaaaatataaaatggaatacatatgtgttatccatgaatggttctttttttataaacatcagttgttagattgactattttgtaatgtcgaaagctcacaacaaattaaacttttattcttatcccttaacattataattttttttgtctaaattaatcttgacaacttccaattccataatcgttggtgtaaaaagatttaagaattgtttacttcatcttgtgcgcatcgataaaaagtgggcactagtacgaaagtatggtttcccactatttaaaatcaaatcaaaggatccctaaaagcgcgtgtgagagacgcgtggaaatgtccaaaggagtgtgaggttgacaaaagatgaattaagagattattcaaagcctttgacattttatcaaagtcaaccaaatacaagaaaccggaaaccataagtggttttagtcactaggcgacaaagacaggataagcatcgagataccttcttcaagcacatacttttctctctttctagaattgcccaaaaaagccaaagagactattcctctctctatatatatatagaatataaaatattctaatatacgtattatataatcggcatatacacgtattgtgattccgacagtgctcatctttttccaagtgtgttcatacttatttgcttttaaaacaagatacagagatatgtttaatttagtaatgtctaaacaattgctatcactaaaaggaaaatatgtcaaataaacactaacatttagtaaaattgtaacgataggttggcacaataatggcatcggtttatagaggacgattcctattagtttgctaattacaacatctagtattagttttgtgcaatcgtcacatgtccttcttcatttcctgttttatatacaaaaattattcagtatgtttacaccatccgtacacaaattttatttttagttaaatatattttatagtcacaagttgtgtgactcaacaaaatattttcaggtctttttttgtaattcataaattcatgtctattaatattttcaactaataaactaatttttgcgagataaactttgaatggttacagcgatccaagcggacaaaccatctacaaaccgaaccgctttttatttatcattcacaatctatagttcgtaatgaagcagaaccaaaaaaacaaataaatttgatgcggattgactttaaactaagtttgcagcggtttgttctctgtcctaaaaaatagtatagattggaccgttgacggattagttcgcactaaccacaacatatccgtctcaaaaaatagtatagactgtactgctgacggattattccggattaaccacaatatccattcaaaacaataagttgatatgtggaataattacaatgtaacaaaaagagagaagaaaacaaaattgtatattatactgtatttgaatcataaataataatttaataaaatctttcctccatttttttcaaccctttttttattttcgtccatcttcagtctctttataaacatatctctctacccttcaaaagtcagcgctctcttttgtctcctctgcttttttctcttctctcctcagagattcgaagctttttgtctcccctgagtaaccaaattcaatg

SEQ ID NO: 16973 - DNA, 3003 bp, Unknown
  misc_feature (1)..( 3003): 2750-1469P.txt file - cDNA_ID_1807381; gDNA_ID_1621155; Annot_ID_57002
ccattaaagcccaatccagatataaaggaaagcacttgtaaaaagtcacgtgagaataacattttcaaccacagtggcttgtattggcccaacgtttttttcactaacggcccaaaaagcccaaatcagctattgattagtggaggagtactcatttattaattcctcctactaattggggtttaccaacttaacagaaaaaatgcatcagttgtgtgagttgtcgaacaatcaaagtgatttaccaacaaaatataaataaaagtaatcattaacttgattagatataaaattaaaaaaaaatcggttagtcaaacacaatgtttaaattaatgttgacttaactcgtttttagtaatattgtatgtatctttataataataaaagaatgcttgggtttgggtccacgcgtttttgtgatacaatgcctcgtgcaggccacttggagctaaatattttttttgctaaaaaaactcgtcctcgaaggtttcacgtggctcatgcacccctgactgggtcaggagaatcttgaccgttggatcaaagttgaagcatttataatagctttgaccgtccgatgaatgactacaaagattgtgattcgttataagccgtacgattgactaacacaaagaggaatcaacatcacgaggcgagagataatggtaacaacggcataaaagcatttttctcgacagctgtagcaaactccacgtcatcttatcttactcgccgtgtgaaccgttgattttatgaaaatttgtcaaccttttttactcgcggagatcacgcgctcccctcgtttggcacgtgtgtcacactctgcttcactcgtaaaattctttttccttttcttctttcttattgttcaccatataaattattttgaaccaattttttttttacaatacaaattgtttttaaatttctatacaaattatatattatttttatatttatgattattacataataattagttaaattttttcaaaataaatattcttaaatctgcgtgtttttagttaaaataatttatattgtgaaacggaaagaataatattttttccgaaaataaaatgtttagtaaatttgtgtgtttatttcaaaaattatgttattgtttttcttttttttaaatgagttgtagaatgggaagaactaaataaacacactactcatattattattttttataacattacctacatgtgctttgctgttgctattctcaaaaggtaatgaatggtacaatagtatcccatgtttagagtatgtggcagagtgatcaacactatggtgctaagtgacaatcactatctttctatctacatactttttatattgcatttaagcacattttttggaaaaatataaaatggaatacatatgtgttatccatgaatggttctttttttataaacatcagttgttagattgactattttgtaatgtcgaaagctcacaacaaattaaacttttattcttatcccttaacattataattttttttgtctaaattaatcttgacaacttccaattccataatcgttggtgtaaaaagatttaagaattgtttacttcatcttgtgcgcatcgataaaaagtgggcactagtacgaaagtatggtttcccactatttaaaatcaaatcaaaggatccctaaaagcgcgtgtgagagacgcgtggaaatgtccaaaggagtgtgaggttgacaaaagatgaattaagagattattcaaagcctttgacattttatcaaagtcaaccaaatacaagaaaccggaaaccataagtggttttagtcactaggcgacaaagacaggataagcatcgagataccttcttcaagcacatacttttctctctttctagaattgcccaaaaaagccaaagagactattcctctctctatatatatatagaatataaaatattctaatatacgtattatataatcggcatatacacgtattgtgattccgacagtgctcatctttttccaagtgtgttcatacttatttgcttttaaaacaagatacagagatatgtttaatttagtaatgtctaaacaattgctatcactaaaaggaaaatatgtcaaataaacactaacatttagtaaaattgtaacgataggttggcacaataatggcatcggtttatagaggacgattcctattagtttgctaattacaacatctagtattagttttgtgcaatcgtcacatgtccttcttcatttcctgttttatatacaaaaattattcagtatgtttacaccatccgtacacaaattttatttttagttaaatatattttatagtcacaagttgtgtgactcaacaaaatattttcaggtctttttttgtaattcataaattcatgtctattaatattttcaactaataaactaatttttgcgagataaactttgaatggttacagcgatccaagcggacaaaccatctacaaaccgaaccgctttttatttatcattcacaatctatagttcgtaatgaagcagaaccaaaaaaacaaataaatttgatgcggattgactttaaactaagtttgcagcggtttgttctctgtcctaaaaaatagtatagattggaccgttgacggattagttcgcactaaccacaacatatccgtctcaaaaaatagtatagactgtactgctgacggattattccggattaaccacaatatccattcaaaacaataagttgatatgtggaataattacaatgtaacaaaaagagagaagaaaacaaaattgtatattatactgtatttgaatcataaataataatttaataaaatctttcctccatttttttcaaccctttttttattttcgtccatcttcagtctctttataaacatatctctctacccttcaaaagtcagcgctctcttttgtctcctctgcttttttctcttctctcctcagagattcgaagctttttgtctcccctgagtaaccaaattcaatg

SEQ ID NO: 16974 - DNA, 3003 bp, Unknown; identical to SEQ ID NO: 16973
  misc_feature (1)..( 3003): 2750-1469P.txt file - cDNA_ID_1807381; gDNA_ID_1621155; Annot_ID_173463

SEQ ID NO: 16975 - DNA, 3000 bp, Unknown; identical to SEQ ID NO: 16972
  misc_feature (1)..( 3000): 2750-1469P.txt file - cDNA_ID_1807381; gDNA_ID_2926150; Annot_ID_139277

SEQ ID NO: 16976 - DNA, 3000 bp, Unknown; identical to SEQ ID NO: 12185
  misc_feature (1)..( 3000): 2750-1469P.txt file - cDNA_ID_1807383; gDNA_ID_2214536; Annot_ID_134373

SEQ ID NO: 16977 - DNA, 3000 bp, Unknown; identical to SEQ ID NO: 12185
  misc_feature (1)..( 3000): 2750-1469P.txt file - cDNA_ID_1807383; gDNA_ID_2214536; Annot_ID_185079

SEQ ID NO: 16978 - DNA, 3003 bp, Unknown
  misc_feature (1)..( 3003): 2750-1469P.txt file - cDNA_ID_1807395; gDNA_ID_2926145; Annot_ID_197687
tgttatgttgctttcacagttatattgttacccggctactcttaacaaaactgatcatatttaatttttatttttttttgtaattctttttatccatcaattttccgtaaaagatatttcgttgatgctttgtgtcactgacctattgctcccaattttgttattcaataccgtgatagatacacaatcattgtgaatttgtgattactcttcacaaccacgaaggagaagagaggagaaaaatatgatacataccaaaataataagcatatacaaaaatacttcatatatcaaaaaactcgcaaaacgataagacattaatcaccttagatatgcttgttctctaaatctgttacgtaagagattaaattcaaactaaacgataagacattcccaattttcttttactcttcttctttcttctctaattcttttcccatatctcttcctctccacctctgtctatcacttcatcgatggaagtgaaacaaacaacggcaacgttgactcgttgagtccttgacatagtgatcaaaacagtggcgatgaaaccgaatatggcttgagtgcacgatggatatgacacgttgacggaggattcacttctctctcgaagctatcatggctatggatttccatcacgtatgcaacgcatacaacctaaaacgtaacgatgacttaatattttacgtcagtcatcactaccaccatcatcgccagcataatcacactttcgacgacaaacacaaatctatcacttctattatggaggaaataaccaactttttgcaatgacggtgattttgtttttcatcctccagtcctttagaattgggttaaatagcatatttataagagattgttaccgaaaattacgaaaccgacttccttatatttatagcagtttgtaacatagctaggtattaagattttacatatgaccgcatattctaaccgggctaaatttccttttccaaaaaaagaataattaattttgttacctattctcgccatgatttttcttttaagtttatggtagatatcaatttttgtttttctttttgttaagttattttgagaatttatgctaaatattgatgtggaccaataatatcatgtttttaaaatcctatgtggacacctttaaaaccaaataacctcaacttttatatagtatagattgttgctgggtgagttttttcctaaaatgtgacagtttagtcgcaccaaccgttgaaggtagttccagtggtgcaaataaggaaacaactataaatggttttttacaaatatctgatttcagtagtagaagactattgttagttgttacctcgactattattctccttcaacttttttggtcatttcaatagctttacctttttactttaatattctattttgtgttttctgtgaatatgattttagttttcaaggattcccttatttttcgccggcttttgtatttcaaaactgcattttaagtgggtgattggttcgtctgtagctgtaaaaattttgcggtaggtgtgatgactttagctttaggttttattgttgtagaaattaggctgtaaattttattaatataatattattacttaaataaattgattgtagaaataaaattttggttgtatgtatttttaaacaagaaaatattattggtaaattgtacttatatgttatattatattatttacaaatatcaatttaatatatatattaaaaaacaatgtgagttatatatatgtcctaaagtagatatttacctactatttatattcataaaactaaatttaatatatatatatatatatgaaaactataaaaaaaaattttaaatgaaaaataaagtgaaaagaaatgaaaaagatatcgaccttttaaagaccactttaaaaaaacttgatttaggctgtaagaaaaaataggaaagctacgacataaaatagaaactctataaattaatactcgataaattaataaacacgatatattaataaattttgccggtcccaagtcgggacaatgtaaaaattaaccaaaatcgataagataataagataataaattttttgaaatccctatgtaaagttatagtcccactaatattataaattaataatcataaatcttaagtatatattttaagactaatttttatatgaattttttgttcaagctacaattacaattcgttttaaaatacaactagtatgatatctgttgtagtcacataactatttgcgtatttgatccgttatagttgattttgtaaaatcttttatttgagaaagcattgctaagaattgtgtaaagagaaattggattaagcttcatgtttacgtttacgttcacgttcacgttaatattgtagatatacatacacaatatcttgccaaaaaataaattaaagaagtcaaagaaaaataaaaacctaacataattatatatgcaaacaacaaagcatatagataattaaattaataaacattttcaaaagaatatagtattgtattttacacaaacatttctataaattaatatttattaacttatacgataaattaatatttattaacttatacgataaattaataaatattaatttataagataaattaatatcactataaattaataaaatttcatggtcctaacattattaatttatagagtttctactgtaattgtttcaattctgaagctatagtttttaatggttttacaaattttcaacaatctaaccaatcatgtccaaaagtcgtatcatatccttatattttttcattgtattatttttaaaaatttgtaaattttaagaccaaaaaacaatttttttttgttttatcagaaaagcaaataatcaattgcctgattcattttcgtagctccaccgagaaaactccgagtggccgaaacagagatttcgcagaggaaccatcactgattgtgtcaccgaaccattgatcttcaagttccgatccaatttcagatatg

SEQ ID NO: 16979 - DNA, 3003 bp, Unknown; identical to SEQ ID NO: 16978
  misc_feature (1)..( 3003): 2750-1469P.txt file - cDNA_ID_1807395; gDNA_ID_1621187; Annot_ID_57443

SEQ ID NO: 16980 - DNA, 3003 bp, Unknown; identical to SEQ ID NO: 16978
  misc_feature (1)..( 3003): 2750-1469P.txt file - cDNA_ID_1807395; gDNA_ID_2926145; Annot_ID_139072

SEQ ID NO: 16981 - DNA, 3003 bp, Unknown; identical to SEQ ID NO: 16978
  misc_feature (1)..( 3003): 2750-1469P.txt file - cDNA_ID_1807395; gDNA_ID_1621187; Annot_ID_174480

SEQ ID NO: 16982 - DNA, 3000 bp, Unknown
  misc_feature (1)..( 3000): 2750-1469P.txt file - cDNA_ID_1807407; gDNA_ID_1620742; Annot_ID_49634
tctcctataagatttaacaccaaattttttaaagaaaaattcaaagcattgatttttttatatataatcaaatacaaactttagttacaatctaaatcctgctttgtttcttgaaaatctgtttaaattaacaatagttggtgtcttggaatcctcgtaattaactttaatctcaagatttacaaacattacaaagtaacaaaatccaaaacacgtgaaacaacaacgcgttacaagctctaacaaatactaataaggaaagaaatccaaatcataaatttctgctgacgtggatattagatacgcgctctaatccagctagcaacgacttttccagatttcttaccttacctagtccgcgtaaccgtaaaaaactaaaaaacccaatttagaccagtccagtgtcagatccaccacacatataaaataaccatatctctcacttcttcttcttcttcttcttatcactattcgctcatttccccttctctgttgttacagaagtcgacggcgagtagcttcaaccaaaaagaaacaccagtatctgtctcagcaatggaatttttccagaaagcaaaagctattcgaatgcgtaacagtcacaacaagtatctaacagcagacgacgatgaagaaaccgtaactcaaaaccgtaacggatctaccaaaaacgctcgatggaccgtcgaaccggttcgtgattctttccatgttattcgtcttaaaagctgttacggtaagtacttaaccgcttctaacgagcggttcttgctcggggctacggggaagaaagtgattcagttgaaactgagtcgggttgattcgtctgttgagtgggaaccgcttagagaagggtctaagattaagcttaggactagatctggtaactatttacgaggtaatggtggtcttcctccttggagaaactcggtcacacacgacgttcctcatttgtctgctactcaggattcgatttcttgggatgttgatgttgttgagatcttgactgattccgaattcaagacggagtctgcgaaagcgccgccaccgaagacgacgtctccaccgccgcatcggagaccgacgagttcgccgttgtcggctgagtctccaaggacttcgtcttctctttcagacagatccgattcagatgtgagtacttttcctaaattcctaaaacacctttggttttgtttaaaattacagttgtaccgttttccggttattgaaaattttgattttgattttgaccagtcggttgagtctccgcctaaatctgatggacgaaccatatattaccatgtcgctgacgaggaaggacacgtggaagatgaaacaaccgttggatatgctttcacgtttaaaggaaatagcgtggcggagctgactcagacattgcgagaagaaacgtgcatggaagacgctgtggtgtgtactcgtagtcctttaaacggcaagctgtttcctcttcgtttgcaacttcctcctaacaacggaacattgcatgtcattttactaccctccagcgcgagcctctagaatcgacccgagacaattagaaatgagtgattgtgtgattgtttggtgaagcatatgatatgaaccgtataagaagatagtaagagttggtagttggtacaagactcgttgttacatagattgaaaaaaggcgtcggcacatgaaccttgcttaatctatagactatttgtaagagttttgataataggaaggacttataaattattttttgggggaatataatacaagtttgtttttgtaaataagcgatttctttgtaaacgaacatttggattttgggggtttatttgtgtgagcatggattcataaacaaaaatcattaatttcttataagttattcactagtaaatggagattatgactcgaatgtagccaaatttagtttggatgacgtgaacaaccaaatcagaataatcacctatcttaatatagtgatttagtgaccagtagacgatagttgtgacaagaaatcttataaatactttgttgtcacaattcacgaatgttaaaggggttagaagttgaaactatctccaagttaaagtatccattaagctatcgttaaacataaaatacaaatcatgaagcatacgaagaccttaatatcaagtcatatacagaatgaatatacaaaaagaggaataattcctaatgtatacgtacgatactacgttgacgaaaaaaaaaaaaaaaacgtacgatactacgattggagttttctaattacttacagaatatttaaacaacattatgtatctagaaggatctagaataaaattgaatctaaagtacaccaaaaaagtggaatatttcccaatatcctaacaactttgataatatcttaatttcaaactgtttttattatgtaacaataccgtatttcatttcttaacttaaaactcattatttacatgatatttcaaaaattacctatgtacttgtcattatatacatggtatttcaaaaattacctatttacatattacccttttaaatggtatatttactaataaaattaagtattgcatttaggaaaagagagtgcctcttgatacaattttaaaataatacaaataccctatgtcattccaagtaactaataataaattgacaaataatttttttatacaagaaacgtaatccacaaaaataatttgaaaaaatctacacaaaatagttgaaaatagaacactcctatttatttatttttttccttttgttttgagacggataatttcacttgcattactggaatttttcatcaattattatatatttagctcaaaactatcactacccaaaaaccagacgcttcaacttatccccatttctctgaaaaccctaacaaatcctcctcttgttccgccactgccgccgccgctactcaacggtggtgaattttctatacggtcagttcgatcctctttttatcgacaatcctacacaaatccataatcatg

SEQ ID NO: 16983 - DNA, 3000 bp, Unknown; identical to SEQ ID NO: 12141
  misc_feature (1)..( 3000): 2750-1469P.txt file - cDNA_ID_1807419; gDNA_ID_2214533; Annot_ID_134325

SEQ ID NO: 16984 - DNA, 3000 bp, Unknown; identical to SEQ ID NO: 12141
  misc_feature (1)..( 3000): 2750-1469P.txt file - cDNA_ID_1807419; gDNA_ID_2214533; Annot_ID_184999

SEQ ID NO: 16985 - DNA, 3003 bp, Unknown
  misc_feature (1)..( 3003): 2750-1469P.txt file - cDNA_ID_1807429; gDNA_ID_1620618; Annot_ID_46941
ctaccttcctctctgctgctttaactgcagatgtacttatcatttattttcttactttaccatttaaataatatatcaaaacactgtagtttgcttagcattgttaaacaagactactcacttggtacttggtcgtggaatattatacggtatgcaatgaatttgcataataatctagattcggagcagtatcattaattaattttgttaggttaaaacgttttgttattaaaaatcgcttagaactgaacaaaaaccaacacatatttagaatattcattgcaacatctttgtagacaaactaaaggagcaaattcacatgtaaatctaaagaacaaaagaataaagcatagattaatcatacacacataataagaccgggaccaaattttcctcttttgccaagttcccaaattctctataaatacttcttgtctccatttcacaacagcaacgtggactctttctttgttttggctgactcttctttcaccgtttccttagagaacttattcatctcataaacaccacacacaacacacacttctctttctccttctctctatatattttaatatcaactttctagggtttccaagttcatatatagtgatgggtttctcaatgttcttctcccccgaaaacgacgtcagccatcattcctctccatatgcttctgttgactgcactctctcacttggaactccctccactcgcctctgcaacgaggatgatgaacgtagattctcgtctcatacctccgacaccataggctgggacttcttgaacggttccaagaaaggcggtggaggcggcggacataacctcctcgctcgccgttgcgccaactgcgacaccacttctactcctctttggagaaacggtccaagaggtcccaaggtatttaatatgtaacctttacatcaaatattttatcatttcttgatgtgggactaatatttctctctgtacaacaaaacaaatattgataataactttatatgatttttaatttggtcagtcgttgtgtaatgcgtgtggaatccgattcaagaaagaagagagacgtgcatcgaccgccagaaactcgacctccggcggaggatcaactgcagctggagttccaactttggatcatcaagcaagtgcaaattattattataacaataataaccaatatgcttcatcgtcgccttggcaccatcagcataatacgcagagagttccatattactcgccggccaataacgaatactcatacgttgatgatgtcagagttgttgatcatgacgtcacaaccgacccgttcttgtcttggaggcttaacgtcgccgaccggaccggccttgtccacgattttacgatgtgatgagtgatcatttcatagatattccccttataagtcttagccttggataccttttaacaaaaaagaaaagtcttagccttcgttaaattctttattttactttcctttaaatataaatatttaatgtctttttttggtctctgtgtaagtgtttttcttaaatttataattcgtatgatggatgctacttgtgttttccttgcatgacttttaaaatgttctctcgggtaatgaactaataattcgtgactttataacctttacatgatgtgtgtcctactttgaccacgattcagtgatatactatacatatacagaatacatattcattcctttaatttctttttaaagcatctttgggtttttgtacggagaatgtgaatattttgggatgcagatactatcttcacaaatacttatatcttaaacgtttaatttgtgagtttcttttccaaattgaaataatcaaatacttggaccgaatttgaaaattaagccaacaaatatctgcagggtggccaagctgaatgtttgtcgtgttttgcccaaattgtcttggaaatttgaccatcaattaggtcttcgtgtgctgctctgcttaaaactgttgctgccaactgcatgtgaagaatatttatctttttcataacgtgtttagttattgtattaaaaaaacgttagtttttatttgattgtttccggaaacacaatccaagataataaagtgttttgaaactctataacaacagaaagcgagagtaacaatttttttttgagtcatttatgagagtcaagacgaaaaaagagtcactaaactactaaatttgtcttccaattagaataataatgaaatgtttttctattttttcacgaataaaattaaatgtcttcagaatttctactttccactttcaaccgctcctgaccgggaatgagcatataagttgcgattttatttgggcctaagcccattcgatataaattccattcaaagtcaaatgaaattccaaattgaaacgattttttaaaaattggaatatagaccaccgccagattctatacctataaaactctattttaccaagacctacatatacatcatacaaatatacattacttatccgctacgcaagaagaaactgtaacatacggatttaagtaggatgtttaggtcatccaccgggtatctccccaactgtaattagatccaacaaacgctatcttgtcatcattcattgaaaagctaattaagtcattttctcaaaatcatgcataatgacaaacaaacaaaaaaaattaccaaagcaactatcaaatggtggtaatctagtgatttcggtctatttaatatcataaatggaattttgaagggatttgactgtactatgacacttttagtttctagaattgttgtgttcttgtactggttaagaggctaattaaaaaaaaaacagaaaagcatagattaacaacccaacacctaacattttaacaaattccaaatccaagtgccaattctccaagttacatttgaaaagatcgaatggaaaaaatgtttatataatgttgcatcccatttgggcttctcttcaaacatctctcaacaacaacaacaaaacaaaacttgcacaatg

SEQ ID NO: 16986 - DNA, 3003 bp, Unknown; identical to SEQ ID NO: 16985
  misc_feature (1)..( 3003): 2750-1469P.txt file - cDNA_ID_1807429; gDNA_ID_1620618; Annot_ID_162123

SEQ ID NO: 16987 - DNA, 3000 bp, Unknown
  misc_feature (1)..( 3000): 2750-1469P.txt file - cDNA_ID_1807429; gDNA_ID_2926211; Annot_ID_142002
ccttcctctctgctgctttaactgcagatgtacttatcatttattttcttactttaccatttaaataatatatcaaaacactgtagtttgcttagcattgttaaacaagactactcacttggtacttggtcgtggaatattatacggtatgcaatgaatttgcataataatctagattcggagcagtatcattaattaattttgttaggttaaaacgttttgttattaaaaatcgcttagaactgaacaaaaaccaacacatatttagaatattcattgcaacatctttgtagacaaactaaaggagcaaattcacatgtaaatctaaagaacaaaagaataaagcatagattaatcatacacacataataagaccgggaccaaattttcctcttttgccaagttcccaaattctctataaatacttcttgtctccatttcacaacagcaacgtggactctttctttgttttggctgactcttctttcaccgtttccttagagaacttattcatctcataaacaccacacacaacacacacttctctttctccttctctctatatattttaatatcaactttctagggtttccaagttcatatatagtgatgggtttctcaatgttcttctcccccgaaaacgacgtcagccatcattcctctccatatgcttctgttgactgcactctctcacttggaactccctccactcgcctctgcaacgaggatgatgaacgtagattctcgtctcatacctccgacaccataggctgggacttcttgaacggttccaagaaaggcggtggaggcggcggacataacctcctcgctcgccgttgcgccaactgcgacaccacttctactcctctttggagaaacggtccaagaggtcccaaggtatttaatatgtaacctttacatcaaatattttatcatttcttgatgtgggactaatatttctctctgtacaacaaaacaaatattgataataactttatatgatttttaatttggtcagtcgttgtgtaatgcgtgtggaatccgattcaagaaagaagagagacgtgcatcgaccgccagaaactcgacctccggcggaggatcaactgcagctggagttccaactttggatcatcaagcaagtgcaaattattattataacaataataaccaatatgcttcatcgtcgccttggcaccatcagcataatacgcagagagttccatattactcgccggccaataacgaatactcatacgttgatgatgtcagagttgttgatcatgacgtcacaaccgacccgttcttgtcttggaggcttaacgtcgccgaccggaccggccttgtccacgattttacgatgtgatgagtgatcatttcatagatattccccttataagtcttagccttggataccttttaacaaaaaagaaaagtcttagccttcgttaaattctttattttactttcctttaaatataaatatttaatgtctttttttggtctctgtgtaagtgtttttcttaaatttataattcgtatgatggatgctacttgtgttttccttgcatgacttttaaaatgttctctcgggtaatgaactaataattcgtgactttataacctttacatgatgtgtgtcctactttgaccacgattcagtgatatactatacatatacagaatacatattcattcctttaatttctttttaaagcatctttgggtttttgtacggagaatgtgaatattttgggatgcagatactatcttcacaaatacttatatcttaaacgtttaatttgtgagtttcttttccaaattgaaataatcaaatacttggaccgaatttgaaaattaagccaacaaatatctgcagggtggccaagctgaatgtttgtcgtgttttgcccaaattgtcttggaaatttgaccatcaattaggtcttcgtgtgctgctctgcttaaaactgttgctgccaactgcatgtgaagaatatttatctttttcataacgtgtttagttattgtattaaaaaaacgttagtttttatttgattgtttccggaaacacaatccaagataataaagtgttttgaaactctataacaacagaaagcgagagtaacaatttttttttgagtcatttatgagagtcaagacgaaaaaagagtcactaaactactaaatttgtcttccaattagaataataatgaaatgtttttctattttttcacgaataaaattaaatgtcttcagaatttctactttccactttcaaccgctcctgaccgggaatgagcatataagttgcgattttatttgggcctaagcccattcgatataaattccattcaaagtcaaatgaaattccaaattgaaacgattttttaaaaattggaatatagaccaccgccagattctatacctataaaactctattttaccaagacctacatatacatcatacaaatatacattacttatccgctacgcaagaagaaactgtaacatacggatttaagtaggatgtttaggtcatccaccgggtatctccccaactgtaattagatccaacaaacgctatcttgtcatcattcattgaaaagctaattaagtcattttctcaaaatcatgcataatgacaaacaaacaaaaaaaattaccaaagcaactatcaaatggtggtaatctagtgatttcggtctatttaatatcataaatggaattttgaagggatttgactgtactatgacacttttagtttctagaattgttgtgttcttgtactggttaagaggctaattaaaaaaaaaacagaaaagcatagattaacaacccaacacctaacattttaacaaattccaaatccaagtgccaattctccaagttacatttgaaaagatcgaatggaaaaaatgtttatataatgttgcatcccatttgggcttctcttcaaacatctctcaacaacaacaacaaaacaaaacttgcacaatg

SEQ ID NO: 16988 - DNA, 3000 bp, Unknown; identical to SEQ ID NO: 16987
  misc_feature (1)..( 3000): 2750-1469P.txt file - cDNA_ID_1807429; gDNA_ID_2926211; Annot_ID_202647

SEQ ID NO: 16989 - DNA, 3000 bp, Unknown; identical to SEQ ID NO: 11310
  misc_feature (1)..( 3000): 2750-1469P.txt file - cDNA_ID_1807433; gDNA_ID_2214489; Annot_ID_133432

SEQ ID NO: 16990 - DNA, 3003 bp, Unknown
  misc_feature (1)..( 3003): 2750-1469P.txt file - cDNA_ID_1807441; gDNA_ID_1620617; Annot_ID_46899
ataagagataatgccattttgttaaatcattattaaaattgaagaaaaatttaaacagtgcatctaattctcttctttgactacatccaaacaaagaacaaaattcccaaatcatttttattcttcttttttacaagtgggcatttgtgaggttgtgaggcccaaccaaaagagcctctcactacattccacaagaaccacacaaattcaaaagtctcactcctaacacaaagaagcatccaaacgcaatcctctcacctccacctcacattcccctgtgccaccatcacttaccctttctcgcctctcctgaaatcaaaatcccattatgcaaatccattttcatcatcatcaatatcatcaccaacttcattctcatcatccatggcccatttctcatctatgtagattctcatctctctacctcctcctcattttctcctcttgattcactaattcttcttcttcttcttcttttcagacatgactcttccttatcgtttctcttccgttagaaaccactcacttctacttaagacttctcatctctgcacacccagatcagctcttggttgttgtttctctcccaaggaatcccctttcttcaggaagaacactgcccaattcctttctcctcagaaacacacttctcttcctctgaaacttgtctgccctttagctagtttctcttcttatgcggattctgagggagaagagcaacaccatgctgatcaaccgatacagaaccctcacgaatcttctaccgtttcaaacgaatcagatgggaaaggtaatgcagaagctactggagacttttctggaatggctcaagcctttcacatttcttccacaacagcaagggcaatctctatagtcatcgccttctctgctctcacccttccaatcttcatgaagtccctgggacaaggactggctctcaagaccaagcttctctcttacgcaacactactctttggtttctacatggcctggaacatcggagctaatgatgtcgcaaatgccatggggacttctgttggatctggagccttgacaatccggcaagctgtgatgacagctgcagttctcgaattctcaggtgctcttttgatgggaactcacgtgactagcacgatgcagaaaggaattctcatggctaatgtgttccaagggaaagatatgttgctctttgctggtctcctctcttccttagctgcagctggaacttggttacaggttccatcttatcttttgcttcttcatcactaggttcaagacaggatttagtaaagttaataccttttaaagatggcattcacaaatgatacaagtagagaacgtaattgtgaacttgtgaatataacaggtagcttcttactatggatggccagtatcaacaactcactgtatcgtcggatcaatggttgggtttgggcttgtatatggaggagctggtgccgttttctggagttccctagctaaagtagcttcatcttgggtcatctctcctatactgggagctcttgtctccttcctagtctacaaatgcatcaggagagtaagtaaaacaaaccaagaaactaactttctaattctgaaagatcactaaagtcatactcaagcttctgctacattttcacactcttctttcgttctgtgcagtttgtttacagtgcaccaaacccaggacaagcagcggctgctgccgctcccgtcgctgtatttgtaggtgtggccagtatctcctcagccgcattgcctctaagtaagatctttccaatagctctatcacaagccttagcctgtggagtagcaggagccatagtattcgacagaatcatccgcaaacagctcggtcacctcctagctaaaacaaaatcaccagaaacatctcaaaaccaacccaaaaccattggtttcctctccgatatcgcaggaccaacaggtacacaactcgaaatagtctacggaatctttggctatatgcaagtcctctccgcttgcttcatgtcattcgctcacggaggcaacgacgtctccaacgcaatcggaccattagccgccgcattaagcattctccaaaacggagcagctgcaggaggagccgagatcgttatcccaatggatgttctcgcttggggaggattcggaatcgttgctggtctcacaatgtggggatacagagtcatcgcaacgatagggaagaagatcactgagctaacaccaacaagaggattcgctgcggaattcgccgccgcgtcggttgttttgtttgcttcgaaattagggcttccgatttctgcgactcatacacttgttggtgctgtgatgggtgttggtttcgctagagggcttaatagtgtgagagctgagactgtgagagagatcgttgcttcgtggcttgtcaccattcccgttggtgctacactcgccgttatctacacttggattttcaccaagatcttatcttttgtattgtgagtttctgtttcttttggttttgttatacgaagaacatgaaattgatcttcttcttctatgttcgtttgaatgattcgagtttgaaaaaaccctaaagttatcatctttcgattttttcacccatcggtgaagtatgatcaaagcttgtacctttcttgttcagtgtttcgtctcgtcgtccagtaaaatcgaattagagtgggtgacgtttggttacttctaaaacgtcttgttgtttgtttcctaatcgtaaaaacgtcataactttttaaacgacatcgtttttttttcgagtaaacgtgagacgcgcgtatctcttgcttttcgtacacgcgtctcgaacaaagactgacatgattatcttggctaaagacggaaatagccttacacgtttccccatttcagcgataaaattgagggtatttgagtcaaataaagaaatagaaatatctctcttcttctatcttttgattctctggttctacttgttcctctgttttggattgtggtggctctctaatg

SEQ ID NO: 16991 - DNA, 3003 bp, Unknown; identical to SEQ ID NO: 16990
  misc_feature (1)..( 3003): 2750-1469P.txt file - cDNA_ID_1807441; gDNA_ID_1620617; Annot_ID_162058

SEQ ID NO: 16992 - DNA, 3003 bp, Unknown; identical to SEQ ID NO: 16990
  misc_feature (1)..( 3003): 2750-1469P.txt file - cDNA_ID_1807441; gDNA_ID_1620593; Annot_ID_161472

SEQ ID NO: 16993 - DNA, 3003 bp, Unknown
  misc_feature (1)..( 3003): 2750-1469P.txt file - cDNA_ID_1807445; gDNA_ID_1621108; Annot_ID_56023
tttcatgtccctatatcaatcacataaagcgttttccaataacataaaaagtcggataaatgaaaatatttgagaatctaaaacaatgtcatatatactttaatggaaggtccttttcttcgaaatatttgctcaccgaaatcggtgaaagtgatctaagactaaaactaacttgtgagtaattcatgtgatgggccttctgcatcgaaaaagagcatggcgatcacgtggcagcctctcttgcgccgtctcagtattagcctatcacgatagagtaagccaatgtatacagcatggcgatcagacacatgatgatgatcgatctgaataacaagattccgaaggatgtaataaattcatgtgaacagtgcttcgtagctaaactaagaccagagctattgaaatgaggtaaagtgttttctttgtaaccccattttaattaggtgaaatatctagcgcacacaccaatctgattcatataatcataactagcttgtaaactacaaaattatttttcattgtgttacaactagaccattcccacgtgaccattcacgtgctcctataatgaaagaaacctaaagaagagacgctccaattcgcatagacatcccaagcttatcctttcttagtgaatcaagatccaatttacactataatacatgcatatattacgtaataaatgttttataagttttctgtgtcactcactatttttagttattttctcaattttcaatcatcgcaaatatcaattatcacaaaacatataaagtttccagatttgtatatgggcctaccttattagatgcgatgaatatggactaagtacagagctgatggtttttgttataaatatcgtttcctcttctaccctcacctttactctgtttctttctccactctctctctctctcgttgcaagcaacttgttttctgaatccaaagaagacgataacgatgaatggagctataggaggtgaccttttgctcaattttcctgacatgtcggtcctagagcgccaaagggctcacctcaagtacctcaatcccacctttgattctcctctcgccggcttctttgccgattcttcaatgattaccggcggcgagatggacagctatctttcgactgccggtttgaatcttccgatgatgtacggtgagacgacggtggaaggtgattcaagactctcaatttcgccggaaacgacgcttgggactggaaatttcaagaaacggaagtttgatacagagactaaggttcgtgtgtaaagaaaacttaagtttaagttctataaatgaaaaagaaaacagatcttactttgagatttggcttatctgtttcttctgtgtgtgcttttaggattgtaatgagaagaagaagaagatgacgatgaacagagatgacctagtagaagaaggagaagaagagaagtcgaaaataacagagcaaaacaatgggagcacaaaaagcatcaagaagatgaaacacaaagccaagaaagaagagaacaatttctctaatgattcatctaaagtgacgaaggaattggagaaaacggattatattcatgttcgtgcacgacgaggccaagccactgatagtcacagcatagcagaacgagtaagagagcctcattaactaaaattcattaactttgttttttgtgtaatcattgagactaattattaaagtattaaatttgtgaaggttagaagagaaaagatcagtgagagaatgaagtttctacaagatttggttcctggatgcgacaagatcacaggcaaagcagggatgcttgatgaaatcattaactatgttcagtctcttcagagacaaatcgaggtctgaaaattatttccatttatagaaaatatgttttaaagactaattttgcattaccttcctaatttgttatcaaaatattgtttaaaacagttcttatcgatgaaactagcaattgtgaatccaaggccggattttgatatggatgacatttttgccaaagaggttagtcattgatttgtttatgcttatatgaaaaacaaaactttaaaggctatttatagatgagctaaaatacgccatgtggattcaaaaccaggttgcctcaactccaatgactgtggtgccatctcctgaaatggttctttccggttattctcatgagatggttcactctggttattctagtgagatggttaactccggttaccttcatgtcaatccaatgcagcaagtgaataccagttctgatccattgtcatgcttcaacgtaagtcatatttttaatactctttcattatgatctatcctttagtttaactttggatatgataattttttactaaatatgttttgattgttacagaatggcgaagctccttcgatgtgggactctcatgtgcagaatctctatggcaatttaggagtttgattaagaaaccaatccacaacataacaatgttccctaattcaaattattcatcggaagagagagcaaaccagtagctgttatttactaattccactagattattgacttgagatcccccgcccattagttgatgtatcaaagagtgtagacattattgtgtataatttgcaaaccagtccagtaatatatttcttatcggtggacttgtgtctttaattcaaggtgtgttctcatcttcttgtggtgaatgatcatccattagtatttttttttttagtatacaatgccacaagtcatgcgaccatgaaatcaagaaacaagacaccagtcgtttaacgttatgttttacatcttatcactaacaatcttctaatctatgttttggttactttgaaaaagcgggactaatcccaaatttaaagcaattgaataaacaacacctgttaagcgtggcggacaaaacgacgacaatgtaagagaactgagtcagagattaaaacctatgaccaacccattggaactaaactatcctaattctctatacggagagtatatataaatg

SEQ ID NO: 16994 - DNA, 3003 bp, Unknown; identical to SEQ ID NO: 16993
  misc_feature (1)..( 3003): 2750-1469P.txt file - cDNA_ID_1807445; gDNA_ID_1621108; Annot_ID_171668

SEQ ID NO: 16995 - DNA, 3003 bp, Unknown; identical to SEQ ID NO: 16993
  misc_feature (1)..( 3003): 2750-1469P.txt file - cDNA_ID_1807445; gDNA_ID_2926207; Annot_ID_141803

SEQ ID NO: 16996 - DNA, 3003 bp, Unknown; identical to SEQ ID NO: 16993
  misc_feature (1)..( 3003): 2750-1469P.txt file - cDNA_ID_1807445; gDNA_ID_2926207; Annot_ID_202324

SEQ ID NO: 16997 - DNA, 3000 bp, Unknown; identical to SEQ ID NO: 6974
  misc_feature (1)..( 3000): 2750-1469P.txt file - cDNA_ID_1807460; gDNA_ID_1621119; Annot_ID_56263

SEQ ID NO: 16998 - DNA, 3000 bp, Unknown; identical to SEQ ID NO: 4035
  misc_feature (1)..( 3000): 2750-1469P.txt file - cDNA_ID_1807468; gDNA_ID_1620680; Annot_ID_48336

SEQ ID NO: 16999 - DNA, 3000 bp, Unknown; identical to SEQ ID NO: 7398
  misc_feature (1)..( 3000): 2750-1469P.txt file - cDNA_ID_1807472; gDNA_ID_1621143; Annot_ID_56689

SEQ ID NO: 17000 - DNA, 3003 bp, Unknown
  misc_feature (1)..( 3003): 2750-1469P.txt file - cDNA_ID_1807490; gDNA_ID_2214478; Annot_ID_133191
acaaacaacacatctctctgcttagttttgtacactcaaaaccatccttgacaattttttgagcgaaaaccttttgtcttgagaacagactaattgctgtcagctcattactgatttcattcaataagcaatgacacttacctttagatcagtgttttgaagtttctttaagacctaactttgatccaacctctacttatccaatgttagatacattgatgcggaagatagagtgaaggtgagttcagagaaattgcagaagttgggttggacttaccggccgttggaggaaacacttgtggattctgttgagagctaccggaaagctaagcttgtggactgaaaacttggaaagaagagcaaaatagtgttttagcttcatatgttatagttatagtgttccattctgcacacacacacacactctctcatcgtttactcaataataagagttgtgcattcaccatggatttctgagtttttgttattttctttttagatatcattacttttattaccaatctacaattttctttccataatattttacaatatctctctattgtatatgttgttccaatttctaccgaaatcttactttcaaaggataaaacacacaaacttttatctcaattggtacgtcttgtttctgtataaatttgttaatcattgtagaaaataacataacaaatgtggatttaagctgaacataaatattaatgctttttccgatgaataaaattagtcgaacaaaagttgagatatggagctgaagcagagatggtcaaagtcaaacaaatagctaccatttgcacaaggaagaatcttcttctcatttgggtgatcaaaaatggcggttgtgcagaaaggaaaggtttgtgtaaccggtgccggaggttttttgggttcttgggtcgtcaatcatctcctctctagggattacttcgtccacggcactgtcagagaccctggtactactctcctcaccttttatctctccctctgtaaattgtcaacctttattctctcgcatttctagttcatcgaatttttgtagctcagcctggtcaaaattgattctttcgtctactttctaaggttttctattcccaattctttttgtagctccgatgtttctgtctacagacagaagattaagccttttgagtttgtctattgttctgatgaagagtttcgcatggttcttgttataggtaatgaaaagtatgctcatttgaagaagcttgataaagctggtgacaaactcaagctcttcaaggctgatttgctcaactacggctctcttcaatctgctattgctggctgcagcggcgtcttccatgtcgcttgccctgttccatctgcttcagtccctaatcctgaggtgaggatttcatttttacaatctcattggtggctatatgcattgtctcactatggtttcactggttttgcaggtagatttgatcgcacctgcagtggatggtacgctgaatgtgcttaaggcatgcgttgaagcaaaagttaagcgtgttgtgtatgtttcctctgtatctgcagttgctatgaaccctatgtggtcaaagagtcaagtgttagatgagaccgcttggtctgaccaagattattgcaaaaaaactgaggttaataatgcatcttgaatccctcatctcacttttttttcttcttttaaatctgactttcgtccctctggcagaattggtattctttgtcaaagacacgagcagaaagtgaagctttcgaatttgcaaaacgaaccggacttgatctcgtcagtgtttgccctacccttgtcttgggacctgtattgcagcagcacacagtaaatgctagtagccttgttcttctcaagcttcttaaaggtattataaacaagcctctcatttcatctgggattgttagaagcagcaacttggtatatgagttggtattgattttatacttaagtgtggtgcagagggttatgaatcgcgtaataaccaagaacggcatttggtagatgtgcgtgatgtggctcaagctttacttttggtttatgagaaagcagaagctgaaggaaggtacatctgcataggccacacggttagggaacaagaagtcgctgagaagctgaaaagtctttatctaaattacaactacccaaagaggtaagcaaacaacagctgcacatctctctacccaatttgagtgaaaacctttaaaccttaataagctgtttttgttactttcatcagtaaacagtgtcacttacctttacatcaatgtctctgaagtttcttttagaccttacctttgatctaaattctacttatccaatatcagatacatcgaagcggatggaaaagtgaaggtgagttcagagaagttgcagaagttgggttggacttaccggccgttggaggaaacacttgtggattctgttgagagctaccgcaaagctaagcttgtggactgaaaactgggaacgaatagcatatgagtgttttgggtccatgtgttaagtgttcctatctgcacacgctctttcatcttttactcaagaataagagttgtgcaacatattttccatcatgaacttctgagtttttgttactttcttagacaccattacttttatgaccaatctacaattactccttccataactatgttccaatatctctttgatacgttccaatttctacctacttacaaaggataacttcaccattaatacatgaaatcagtaacgcacaacttcaccattcgaattaacctctaagcctagcgtagcagatgcactacatcttggctgaccatgggactaaaaaaacattcgcaatatttaacaactaaagccaggttaatggacctgtattagggcccaaaccaggcccgtttagatatccgactttttttttaactttgcccatctcgatagctagattctcttttccctcttccttctccggcgaagttgcgttagttaaacagagagtcatg

SEQ ID NO: 17001 - DNA, 3000 bp, Unknown; identical to SEQ ID NO: 4772
  misc_feature (1)..( 3000): 2750-1469P.txt file - cDNA_ID_1807494; gDNA_ID_1620730; Annot_ID_49379

SEQ ID NO: 17002 - DNA, 3000 bp, Unknown; identical to SEQ ID NO: 4772
  misc_feature (1)..( 3000): 2750-1469P.txt file - cDNA_ID_1807494; gDNA_ID_1620730; Annot_ID_166087

SEQ ID NO: 17003 - DNA, 3000 bp, Unknown; identical to SEQ ID NO: 4772
  misc_feature (1)..( 3000): 2750-1469P.txt file - cDNA_ID_1807494; gDNA_ID_2926157; Annot_ID_139581

SEQ ID NO: 17004 - DNA, 3000 bp, Unknown; identical to SEQ ID NO: 4772
  misc_feature (1)..( 3000): 2750-1469P.txt file - cDNA_ID_1807494; gDNA_ID_2926157; Annot_ID_198522

SEQ ID NO: 17005 - DNA, 3000 bp, Unknown; identical to SEQ ID NO: 4382
  misc_feature (1)..( 3000): 2750-1469P.txt file - cDNA_ID_1807497; gDNA_ID_1620703; Annot_ID_48804

SEQ ID NO: 17006 - DNA, 3000 bp, Unknown; identical to SEQ ID NO: 4382
  misc_feature (1)..( 3000): 2750-1469P.txt file - cDNA_ID_1807497; gDNA_ID_1620703; Annot_ID_165150

SEQ ID NO: 17007 - DNA, 3000 bp, Unknown; identical to SEQ ID NO: 4382
  misc_feature (1)..( 3000): 2750-1469P.txt file - cDNA_ID_1807497; gDNA_ID_2926174; Annot_ID_140253

SEQ ID NO: 17008 - DNA, 3000 bp, Unknown; identical to SEQ ID NO: 4382
  misc_feature (1)..( 3000): 2750-1469P.txt file - cDNA_ID_1807497; gDNA_ID_2926174; Annot_ID_199728

SEQ ID NO: 17009 - DNA, 3003 bp, Unknown
  misc_feature (1)..( 3003): 2750-1469P.txt file - cDNA_ID_1807508; gDNA_ID_1621200; Annot_ID_57642
ttcatcttactctactagtagtggtccttcagatgtcctagcaatctttcccatgacccatctagcgtaggccttactaggttctgcttatgtttttaaattttgattttgcagtcaatctggcatatggtaattggttaaagggaaatttttatccagctttgagtttcctggtatgtattatctttgtggtgacatattttctcgattatagatttagaaaatcggtcatgctatccagaactatggggtttgctgacatctctgttatccgataatcagatttttgccactgtaatcttcagatgcgatacgatgttactgcttgggcctattggtcttgaacttttattggtgagctggtgacgaatattaaatagtttgggttctcaacttctgtatatgtataattggccgtatactttaccgttccatctgatgcgggtgctttatgtttgtcaatgacagaccaaatcgatctccttctggaaagcacttaagtattgtgttggaaccgctctgttggccgtaggttggttaaaattcctcttctttctgtgatctattttgctttttcccttcagacactaattcccgagtctattttctgtggtcatggaataatccttagcacaggtcttaccattttcgttgactctatcatgtggaagaagtttgtctggccagaatttgaagttttctggtttaactccattctaaaccggagttctgattggggtgtatccttcaaaaaaattgtttcctcaattgatttatttttcatatgatgcataatgttctagcatttttctactgcctgattaaaggattgcgttctgtacaatgataaccgtttggaatttccaattcaaagtttaatattgtggcacttgcatttgtatgaaatgatgtgttgtccttgaaaattagttgctaaactagacacattccatacattggtacttcacctcagcactcccacggtctttacttgtagcttatccactttcattggtaaataccagacttcctaacatctgtgatagtgtttgtcttgttcctttctagttaggatcgctaattgtatctctacaaattttcttatttggtttctttttatgcagcttggtactttagttgacagaagggttccattctttatagttccagttttatcgttcgttatactatactctaaacttccacacaaggtattcagatggattacttatctcagtagccatcaacgtttcttaaccattttctgacatcggcttacctatctttcttgatttatgaaggaactccgatttatcattagttcagtgccaatgttcaacttgtctgctgcagttgctgctagcagaatgtatgagttctatcagatgtttgctagctaagctttcaatcatagctaggacgttctttgattctgtatcttaagagctctttggagtttggatacacataatttctgtatgccactttaaattactaccaatgcgggccgacctcttaatataatccgattttgttgtacagctacaataataggaagaaaacgatttggaaactggtgaatatggttatgctagcgttttttgcaatcaggtagaaatagtaaacaattatctttgctatgtaagagaaggaaagagatttgctagtctactaaacctggttctatagtgcagggtgcacggttgtaacattcatggcatcttactacaattatcctagcggctatgctttaaagcgcttgcatcagattggtgagtgacttattctgttattggggtttgttattaatgcagcagcattgacttggctatcaaacaagaaacatctgctggtcagcgtttgttttgtggtgtctatctacctctggttgataatttgcctacaatatgattaattgacttggtgccttccatggttctcaggccatcctgcaaatgtagctggggaagagtgggttcacatagacacttttggtgcgatgaatggaatatctcgcttttgtgaagatgattttccgtggaggtatgttagctgtactacctcgttttagggttggtaaaagtaaaggaaatatcaatgtacatggaaaaaagttgccactcggaagcacccatttgtgcgagatgaggcatctgtttgtttttcatgttcattttcttggatacgaatatcactttgttggaaaagggatcattctacattgcctttgaatacatagaagaggtatctgtttatctatttaggaggatataaaattttgttgtgcaatgcagatattccaaagaagaagagatagtagtggaggagttgcgaaaccgaaatttcacgtacctggtgaagtgagtatttcatcatatagtagaaagcaattcatagtaaataaaaaaagataccactggtggtcaacatgtaacactgttgtcatgcttggtgcagcgagcattcctctgtagatggatacaagtgcttattttatgaagaaggctttgagagacttgagctgcggcgaggtttccctcccattgtcttggtaaatcggtgggcgtggggctagtatttcatcaaaataggtgcatggaatgtaatgtaatgtaatgttgaattgcaggtaaaaaaagccaaagtatacttgcaccgggagatgaagaaggaagatccttttcataagaaatggcctggatgttaggtaatcctacaaatagagacaatgttttgggtcgatgtaatgtagcattcctcagagaggacatgatgtaatgtaacaacggagatgcttgttactgacttactgtaatggattcaacaaattcatccagaagcatcatcggcctttgggctttgagttacgcgtcacaattgaatcaattggtccttttaattagttttaccaatatacccctccgtcttttcccccttctcgtttaggaaaaaaaatcattagcttcgacttatccgaaacctaacgagtaacgacgagagatg

SEQ ID NO: 17010 - DNA, 3000 bp, Unknown; identical to SEQ ID NO: 3757
  misc_feature (1)..( 3000): 2750-1469P.txt file - cDNA_ID_1807522; gDNA_ID_1620662; Annot_ID_47992

SEQ ID NO: 17011 - DNA, 3000 bp, Unknown; identical to SEQ ID NO: 3757
  misc_feature (1)..( 3000): 2750-1469P.txt file - cDNA_ID_1807522; gDNA_ID_2926151; Annot_ID_139326

SEQ ID NO: 17012 - DNA, 3003 bp, Unknown
  misc_feature (1)..( 3003): 2750-1469P.txt file - cDNA_ID_1807526; gDNA_ID_2214552; Annot_ID_134693
tctttgttgatttactctaatctgtgaaattaactaactataaaaaccagcatcatgttttaatctactaataaagaccattcaacatattaataaaatataatccgatggtgacgactgatgatcataatactagtagtaatggatcaatcaagaatcctctttaggttagaaaaatagactaataaccaattatagagttatatttaagctcaacaaaacccacaatagtacattctcgttggtttcttcttaatattatattgttgcttgttttgtaccaacaaaaaaagtacgaaccacacactttcgatcgtgattaggcttctttcaacaaattttgattagtaatataattaaactatcatcgtctacataacatatgttatccgtttcactcaacctatctatgttatctctttgcgaatctggcgcgggtacttcaactagtgtagaaagatactattcaaaaaaaaaaaaaaaatctaagatcacgagattaaacatgatatatatatgatgtttaacaataacaaagcggtttgttcaaaaaaataaagcggtgccggtatgctagagaggaaagccttgataattacgaccacaagttgtatgagaaaaattattggaaccttttgtatttcatgaccctgagaaaaattgaaaatttgacttaacgtggagtttgctagagaaaatgactcaacaaaattatatccctagctttgttttacgtcaaattgttactctcttttcagttggttcgctagtttgatttccggtattaagttactaaaagcacataatgatatttcagttggttcttggtaataagtttacacgagacttttgtggtattaaagtacataatgatcttttaattagatattattaaagcaaaggtgaaaaaagtggttcgtttactgtttttacaatgtgacgactgacaagaaacatggacgtgttaggttggatagatagctagatactatcacggggcattgtttgattctttctggcgaataatatacacttattttgttctttttatatataccaattgaatcctataatcaatataatattagtccactaaccacgagcactttttgcagattgactttccaacgatttataatagtaatatcttcataaagaaattcattagcattctacaattttcttcataaactggaagtgacaacaatcggacataaaaatgattcaacttttccatgacaatttttgtttctttggtgaagaaattaatcttttctaaataaactttttttattgaccaaaaacaatgtatcttttaaaagattgcacggattctatggttgaatatattctagatttagtttgtaatagcatatcgtcaactagacataagtctatattcctcactagctcgtgttcctttcttctttcgtcacggttagttcagatccggacaagaatcctggattgacaaaattttggaaatggcttaattaaactattgttttatctttcttacaattctttgaaacggtgatatttcatataaaattctcaaaatttttaaattagtgtcgttaaattctgtattagcagctcaaccagttaaatataaagccacgttttgagagaatcggattatatctgaaattcgataccagttacgaagattatattacatttgattttgaagttgtaagataaaaaaaattagtgtcattattgtatgaacttcgtgaagtttatttatgtgcttcacttttagttaataatgtaatatgtataacaaaaacaaacttgtatgcctatatttagtacaggtggattgaatcgtatcaatgtcacgtaaaagttttatttggtttaatgtctcacgtaaaagttgcttttacttttcaggtgcctagccgtgttcagaaatcagagaccaaaatcttatgggggcaatatgatcaaatgtaatataccaacagttagttaatgcggattgttgacaaagaagaacatttcatgatcggatattgttgacaaaaaactactgtaagccaaaaatgaacaaaagaaattaatgataattaagtataagacttgacaaaaccaagccgacatgagctgagtcaagttcatgtcgtcaatgttatagtgatgattgacgaatatccaacggctgagaatgattggaccgcagtggaatggacttttaactataaaatgggacgaattattcatgattgcttaattgaaaattcacattgttattttgttatttatttatcattaaaactctacttcttttctcttttagtcagttttgataaaattcaaaatttcgtttgttacaatttgaatagtattttaaaatcaataacatcttttttttgtcattctaaataattaaaactcaaaataataatttttaaaaaatattgtttatatatgtgatataatgtggtaaaatacgaatcaatatattttcgtataataaatttatattccttataaattatcgtcaaacttcatattaccaatgtttatttttgggttaaaatctcacactattttttttttatacttcaaaactcatatattttttgaacaatcatgcctccaatatagaaaaaacaaaattgacggatacaaagaaaaaaaaacaaatttgacattgaatataaatgcaaatatttttttgaaaaagtagaaaaaataaaaagaagatggggtttaaaggcgggaccggtccgtcatcaatgccacctccctaactcctttctctttctctctttcagctacttgcaacaaaattgcaaaattgtcgacagaaacttctctcaaatttagttcctttctcatttatccactgctcttaatccaacttcaatatctctctatcctcacaatatttgttctgtttctccttcaactttcaactgataaagtttaaacctttatgctctttactctctgatctcaaaagggttttgtttagttctcctcaaaaccatg

SEQ ID NO: 17013 - DNA, 3003 bp, Unknown; identical to SEQ ID NO: 17012
  misc_feature (1)..( 3003): 2750-1469P.txt file - cDNA_ID_1807526; gDNA_ID_2214552; Annot_ID_185592

SEQ ID NO: 17014 - DNA, 3000 bp, Unknown; identical to SEQ ID NO: 6291
  misc_feature (1)..( 3000): 2750-1469P.txt file - cDNA_ID_1807542; gDNA_ID_1621088; Annot_ID_55450

SEQ ID NO: 17015 - DNA, 3000 bp, Unknown; identical to SEQ ID NO: 6291
  misc_feature (1)..( 3000): 2750-1469P.txt file - cDNA_ID_1807542; gDNA_ID_1621088; Annot_ID_170586

SEQ ID NO: 17016 - DNA, 3003 bp, Unknown
  misc_feature (1)..( 3003): 2750-1469P.txt file - cDNA_ID_1807542; gDNA_ID_2926212; Annot_ID_142033
gtttgttattgcatcatcccactcaaaatatgtacaacgtgtcatgtaaaaagcttttgaggagcttagatttttagatttcattgaaagtttcactgatttttcttattttattttcacattcatatcgtcctactctattttcctctaattatttttttgtttcctacatcaactaatttgatgtttaattacatttgaaacatatcttatgttcattgaaaattatttaagattttgaccgacatatgggattagtaaaatatatcagcagctttagttatgatatgataaatccactacatggaaatatttgatgagtttggaatacactgaaaaaagacacagaattcttcaattcctcattcattcctttagaataaatcattgcaataaactccaaaaaaaactcgatggtaaaatcacaaagtggatagtgacgtggcaacctcaaaaattttggtttcaatttttttgttagcccatctttcttcttggacccaacaaatacacgaaaataaaattattcatgtttccctttccgacacaagtccatctccttcatctttcattcgattatttttgtggagatttttcagttagtaatagttttaatatctataaagattaaaaaaatattatggtgatgtaaaggatgacgaatttgctcacaaacaaataaaatacgaatctaacaatccaaatcttataattatataaaacaccaaaatgtaataacagttggctccagcattctagtcagaaaccaaacgtcatctcgagtcgtatctcgtgttcctcacgcgcgtttataagaaagggtgataaacacgcgggttttagagcgcctgaagatgaaaatacgaggtatagagagaaacgaaaggttattggtggatggaagagggaaaaagtggaccccatagtttgtccgtactaaaggattgatcttttctggtaacattttcctttttctctcataattcctttttccttttttcgatacctcttcctctctctaataacaaatcaacgtttttttgttttttgagtatttacgtttatatcctcgtagtcctctcatattttcagattaacctcaagggttttatatgggccactcattcttatgtaatctctccctttcttaatcgattttttaaatcttttactgggcattaccgatcaagcccgattataataaacccaaatagaataattagtaatctggtttggtgtatatttcaaattagaacaaacaaaaacaaaaagcaaaaagtttcattaaaccgaaccaaatggttgtaaatcataagaattgaatgcctaacctaaagcaaagcaatgcctcattttgcaccaaattagatggaaactagcttatgatatctcaaaattagtttgttcctagcaagttgatgaagcaacttgtgagctatttccactacgatttcgttctcttgagtgttttggttgtaattaattttgattaggtctaaaatcttcgtgtcacatgttctgcatgtacaactgtatttttcttgagaaaaaaagccattgcacaaacttcagttcaaaacattttgtgtttcttctatcaattattactatatagaaaaagtttctctcttgatatttgagtttaaaatctggtaatcatcaatgaatattgtcaacagttgttaaaatcagcaactttactaaatatgaacagagaatgcaaatggtggaagtttcacattatattggcaagtgtagaaaaatgtctgaaagtatatgggcgactgggagttatcattcattaagaaaacaaagaaatctagatcgttaaattctacggttaagaaagactttttattatggtaaagaaaaatagtcaaataaccaaagtaagcaattaatatagtttgatcaatgagttcaaaagcctttggttggaataactcattaagaaaacagatagtttaaaatcaattgaattatgatttcagacatagtataagtttgggcaaagtattttaatggaaatagaatacaaacttgataacaagttattgccatttagaaaatgttataactccttatatagtgagaaccctattgcttgcttgtgttcaaggaattgctgtttatggaactccactttaaataaacatataaataatctatttagtatcaaaaacttaatatcccatctactttgaatttgcccgatcatgaaaacacctatttattgtacataaatatacatctttaacaaatatagatctatgcgtgatctatttgtatttgtatcttattaccttttattcatatagaaaaaggaaaaaacaaacaaaaagctttgttccaagagtttaaagtatatcaaaattggcaaaattgtggggttttgaagtaatctactagattattcattttcttgcaaaaaacacctttttatagaattgcttaccgaaccaagccgtggacttcactttcttaaaacatgaaattacatattaaaggaatcttttgattaatcaaagaagatgtttgtatacatagataataaatgaaagtggaaatatttttttaaaataaaaataaaaaaaataaagaaactccaatacgaggaattgtttcgaatataatcttttttccaaagaaagcaagtggttagagagagaataatattattttattaaatttttacaaaaaaaacagtgacaagagaagagagagagagaaagggcagtggaagtaaatataaaggaaaggataaaaatgaaagctttcgtagaagcaatctatcaaatttttattttattttcttctctctctctctttagctcttttttttttgttttcattaaagtttttattttattttctaccaaccaaaagcttttctctttggtttctcttatttagcttctaaccttgaggagaatcataccagaggattgaagtttgaaccttcaaagatcaaaatcaagaaaccaaaaaaaaacaaaaaaaatg

SEQ ID NO: 17017 - DNA, 3003 bp, Unknown; identical to SEQ ID NO: 17016
  misc_feature (1)..( 3003): 2750-1469P.txt file - cDNA_ID_1807542; gDNA_ID_2926212; Annot_ID_202696

SEQ ID NO: 17018 - DNA, 3000 bp, Unknown; identical to SEQ ID NO: 12375
  misc_feature (1)..( 3000): 2750-1469P.txt file - cDNA_ID_1807546; gDNA_ID_2214546; Annot_ID_134579

SEQ ID NO: 17019 - DNA, 3003 bp, Unknown
  misc_feature (1)..( 3003): 2750-1469P.txt file - cDNA_ID_1807550; gDNA_ID_1620648; Annot_ID_47654
agatggagagattatcaggagagaaagagcagagcgtagaggcgtttggatgggccgcgagagactcctcaggccatctctctccctttgtcttttctagaaggtaacggtgactgagtgatgatgaggatggtgttacatgatggatcgatgattattatagccattatgatgatcacgatatgtgcaatgtgcaggaaaacaggagaagaggaagtgagagtgaaggtgttatattgtggaatatgtcatagtgatctccattgtctcaagaacgaatggcattcctctatttaccctttggttcctgggtacgcaaattctttttctttcaataacattaactttcataaattttcagttatgttcaaaataattatatgatcattgtgtcgcttacattatagtactcccagtaatttttgtttctatttgatgtttaagattatatctacaagtttgaccactctagaattcacatggcaattataaacaatgtagattttgatcccgaaaaactcgagtcaagaaaatcgaacttttgcttatggttatttaaatacccaaggattaggtatatattggtgaaatgaagttaacatatgtttcatgaaatattaaaaacaaggagttgtttggtaaaatgcttaattattagagatcaaaatataactgagtggaagtaaatgtggcaaattcttgtttgtccactgtttatagtggagcacttacttagttcttttctttcggctaaattaaatatacagttgaataaaaacacatttaggcagatttattactctcaaataagttctgcaaaaaaatgagagcactcaccgttcattattaccatcattacttaaagttgactattgttagtttccactctctttttttttttttttttttttttttttttttttctgttttgacaaatgatttctcatatagtgacttgtcttttttggttaaaataatataactttattatattataggtaaatccacgaacacacagatcaatataagtgcaacacaaactaaatacatggggcactctttttatattgtttcaagttcaaatgtataaaagttttaaaatattttttaatataaataagataagataaacattaattattacttttattttgttattaatgctagttacattgccagattaatgttagaaatactatattaacgtatggttacgttgtttagtacagtcacgagattattggagaagtgagtgaaatagggaacaaagtaagtaaattcaatcttggagacaaagtcggtgtgggatgcatcgtagattcctgcagaacttgcgagagttgccgagaagatcaagaaaactactgcacaaaagcaatcgcaacctataacggagttcaccacgatggaacgattaactacggtggatactccgaccatatcgtcgtcgatgaacgttacgctgtcaaaattccacacacattgcctctagtttcggccgcacctttgctttgtgcaggtaattcaaatcaaatatggctatatatttaaaaccaaaaaaaaagtgtggtagttgttaagattatcgatatttacaaattacaaacatgaaaaaaaaaaaaaaaaaagaagaaattatctacgtttctatcaatttttacttttcatctgatgatcatgaatatgatttcaattaatataccgtttgtaacgtaacatataggcatctcgatgtacagtcctatgaagtacttcggattgaccggaccggataaacatgtcggaatcgtggggctaggtggtcttggacacattggtgtgagatttgctaaagcatttgggacaaaagtcacggtggttagttcgaccactgggaaatctaaggatgctcttgacactcttggagctgatggattcttggttagtactgatgaagaccaaatgaaggtacgtaatcttaaaccattcattaattatgcgaataaaacgtaaaaaacgttatcaggtttcaactttatttaggctgcaatgggaactatggatggcataattgatacagtttctgcatcgcattcgatttcacctttgattggactactcaaatccaacggtaaacttgttctactcggtgcaacggagaagccatttgatatatctgcattttccttaatattgggtatgcatatataaccctacgtaatagaacgttatattagtctttcacatctagactatgtatcgagtatgatgaaaccatgatgcgacaggacgaaaatcgatagcgggaagtggtattggaggaatgcaagagacacaagagatgattgactttgcggcagagcatggcataaaagcagaaattgagatcatatccatggattatgtgaacaccgccatggatagacttgccaaaggggatgttagatatcgatttgtcattgacatttctaatacattggctgctactcgatcttaattaaagtcgatgttctatatgtattcaaaataatctggatttcaatcccacaaaacttaaggatatatatatatatatatatatagtctattttatataaatggagtatagtcaaataaatatgcattatcaacgatatatagtcttctattacatagatacgtgggagttcacccaacgtagatacgttcggttgaaacaagtcaatttcatcaatgcctcttccaaaaaaaaaacaaattgcattattgatgaacacatgcatcattatcaaataggttggttaaaatgaccaagatgactaaagccaatcacactactaccagatcgagtaaccattagggaccattaattcacgtggacgtagtgaatatggtccttgtgaattaatgagtacgtaattgtcctcattcatatatggatcggttccacaaacatttcctgtataaaattctacatctttcctctcattattatctctacacttctcatctctcaatcccattcgcttattatttatccatatg

SEQ ID NO: 17020 - DNA, 3003 bp, Unknown; identical to SEQ ID NO: 17019
  misc_feature (1)..( 3003): 2750-1469P.txt file - cDNA_ID_1807550; gDNA_ID_1620648; Annot_ID_163330

SEQ ID NO: 17021 - DNA, 3003 bp, Unknown; identical to SEQ ID NO: 17019
  misc_feature (1)..( 3003): 2750-1469P.txt file - cDNA_ID_1807550; gDNA_ID_2926214; Annot_ID_142138

SEQ ID NO: 17022 - DNA, 3003 bp, Unknown; identical to SEQ ID NO: 17019
  misc_feature (1)..( 3003): 2750-1469P.txt file - cDNA_ID_1807550; gDNA_ID_2926214; Annot_ID_202855

SEQ ID NO: 17023 - DNA, 3003 bp, Unknown
  misc_feature (1)..( 3003): 2750-1469P.txt file - cDNA_ID_1807560; gDNA_ID_1620618; Annot_ID_46929
actataaagtcggagatgatggcgatgactatgatcacttgttttatccggtgccggaaaatagttacatcgatgaagcggaatggatgagtctatacatataaattactagcttaatgtaatattatatcaagttagtatcgtgaattagggaagcatatttctaagtaaatttactagattatataactgttgcatttctaatgtacaaatatattgacgatgagtttctcgctaatgtaatttggctatctttatgaaagcaacaatataaaattgcttaagtagttaaaaaaaattagctactttgttgaattaaatttctaagaaaaatatatatgaattcgttaggatttaattataataagtaaactgtaatttggtttcactaacgaaaaaaaaagtgcggccataaaagcagtatcggctgcaagattcgaaaaacctttacttttaaaattgtagaagacaaaggactagatgacatgcacatgaagataagatgagcaaatttgttaaaactttttatctccatggataagagtttgcccgatttatacaaaagagaagttcggataaaatataactaattctggtaaaacattttgagtcaacttttatagatcggttgacaactaatgtgtaagcttatattatggtttatacataatatattcatcacgtaatcattattacttattagtgatctgatcgcataatataaaatgagagtattagtcatcaaaagttaccacgtatcatgcgtttctcaaaatgttagaaaaaacacatcgttttctaatcaacggaaaaatcaaagtgtctttggacaagatcagatgttcttttgattaaaacctcttccagtaattgtaaactgtacaagtgcattttctgaaaatcaaagttttcttggacatgactagagattctttgattagagtcttctggattttgattgacgttaagatatttttgatttagacatatactaaatcctaattaattaaaattatagatcgaaaacattatggtctcgtaaagtttagaaactatggacccacgaagaagtgtttggcgaataagcgaaggatttaatttagttttgggtatatagaaaacgaagtgtaaagaaaacgtaacgttatggctctttctaaattgggtttgttttaagtactcgtaaccactttcaacacattcactgtatatagtgtgttgtattatattgtttgagtcgtcatatgatgagattgtatatatataaagaaaagtcttggaccttttgatatggtgatccatcacatcaactacgtaatggtaatactaatgctctacgatagatgctatatttacctaagaaaaccgattttttaagaatgcactgaattttgctatcaatcagttaactattgataagtcatatttagatttttattttgtttcatttgtaaacagaaaatcacaagacgttggagacatcttggcttgctcctggcacctataaaaaaatgtatgtttgcaataatattagggacttattaaagtaggcccaatgggcttaagattccaccaaattagcttgacaaacactaagggcctgtctcggatattagttgtttttaattagcaattgaataaactgatgcacgttgactctctttttttcgtcgtcatgtttgatttttttttttttttgtcgtcatgtttgattagttcttaaatcttaacgataagttaaattatcgatttaatatcaacaactgtagcaaattttaatattctacgttaaaaaacttactactattttttttttttttttcagtaaaatgacacaaacatgcaaacctagaaaatagctttgacttggttagtttcttgttaaagaaaaagattacaaacaattaacataatatattatgcactacaacgggaaacaaaattaagaaaaaagactctttatctacaaaaaaaaatcatataaatgtaaaaagggttttatcattgacaatttgacagttatcaatttacatcaaaatatattttaaatgtttttaatattcatgtacttaattagatcgctaataatgataataaattgaatatcctttttgattgtaataaatgagtagatgagtcacaccaactgtagctaccgtgtcaaaaccttatccagtaacacgtgtacagctggacctctcattgtcgcacgtgtcagatcatcaaaccctaaaattaaaatcccaaagaaaaaaaaaactttcctctttcttcgcattcttctcctcctatcggactttgccacaccagatcggaaaatcccaatcctcttttcctttgttttttttgctatcttcaatcaaaaactctccgacagattcaatgaagcagcaaaagagataaaaccctaacaaaagtaaacaatcggagttttaatcttcttcttcttcggagccggagttttgtctgatctgtcggagaggacgtgtcggcatctattaaaatcctagctggacttccacatcactttactcaattagaagctggtctgttttctctgtttttattctaactttttctctcgtttaatttctcatatgcaaacaaacacctttgcatgtaactgattctgttgtacttgaattgaattctttaatcaattatgcaaacagagcttgttttggagatgatgattcacaagtatgagattgtctttctgcttaagaattcgttgagtgttggtttctgaagtttgaattgtgtgtgtgtgtgtgatttaaaatactgatgcatggttcgaagcttagagattttagattgctataaatgaaagcaaaagaacagtgcccttactcttgttctgttttaaagtcattgattgttataattgaaagcaaaagattttagttttgatgttttatgattactatttatcgttaagatttttgatttttgtttatagttttgagtaacacaagtaagtagtaagcttataaaacaatg

SEQ ID NO: 17024 - DNA, 3003 bp, Unknown; identical to SEQ ID NO: 17023
  misc_feature (1)..( 3003): 2750-1469P.txt file - cDNA_ID_1807560; gDNA_ID_1620618; Annot_ID_162108

SEQ ID NO: 17025 - DNA, 3000 bp, Unknown
  misc_feature (1)..( 3000): 2750-1469P.txt file - cDNA_ID_1807560; gDNA_ID_2926211; Annot_ID_142014
ataaagtcggagatgatggcgatgactatgatcacttgttttatccggtgccggaaaatagttacatcgatgaagcggaatggatgagtctatacatataaattactagcttaatgtaatattatatcaagttagtatcgtgaattagggaagcatatttctaagtaaatttactagattatataactgttgcatttctaatgtacaaatatattgacgatgagtttctcgctaatgtaatttggctatctttatgaaagcaacaatataaaattgcttaagtagttaaaaaaaattagctactttgttgaattaaatttctaagaaaaatatatatgaattcgttaggatttaattataataagtaaactgtaatttggtttcactaacgaaaaaaaaagtgcggccataaaagcagtatcggctgcaagattcgaaaaacctttacttttaaaattgtagaagacaaaggactagatgacatgcacatgaagataagatgagcaaatttgttaaaactttttatctccatggataagagtttgcccgatttatacaaaagagaagttcggataaaatataactaattctggtaaaacattttgagtcaacttttatagatcggttgacaactaatgtgtaagcttatattatggtttatacataatatattcatcacgtaatcattattacttattagtgatctgatcgcataatataaaatgagagtattagtcatcaaaagttaccacgtatcatgcgtttctcaaaatgttagaaaaaacacatcgttttctaatcaacggaaaaatcaaagtgtctttggacaagatcagatgttcttttgattaaaacctcttccagtaattgtaaactgtacaagtgcattttctgaaaatcaaagttttcttggacatgactagagattctttgattagagtcttctggattttgattgacgttaagatatttttgatttagacatatactaaatcctaattaattaaaattatagatcgaaaacattatggtctcgtaaagtttagaaactatggacccacgaagaagtgtttggcgaataagcgaaggatttaatttagttttgggtatatagaaaacgaagtgtaaagaaaacgtaacgttatggctctttctaaattgggtttgttttaagtactcgtaaccactttcaacacattcactgtatatagtgtgttgtattatattgtttgagtcgtcatatgatgagattgtatatatataaagaaaagtcttggaccttttgatatggtgatccatcacatcaactacgtaatggtaatactaatgctctacgatagatgctatatttacctaagaaaaccgattttttaagaatgcactgaattttgctatcaatcagttaactattgataagtcatatttagatttttattttgtttcatttgtaaacagaaaatcacaagacgttggagacatcttggcttgctcctggcacctataaaaaaatgtatgtttgcaataatattagggacttattaaagtaggcccaatgggcttaagattccaccaaattagcttgacaaacactaagggcctgtctcggatattagttgtttttaattagcaattgaataaactgatgcacgttgactctctttttttcgtcgtcatgtttgatttttttttttttttgtcgtcatgtttgattagttcttaaatcttaacgataagttaaattatcgatttaatatcaacaactgtagcaaattttaatattctacgttaaaaaacttactactattttttttttttttttcagtaaaatgacacaaacatgcaaacctagaaaatagctttgacttggttagtttcttgttaaagaaaaagattacaaacaattaacataatatattatgcactacaacgggaaacaaaattaagaaaaaagactctttatctacaaaaaaaaatcatataaatgtaaaaagggttttatcattgacaatttgacagttatcaatttacatcaaaatatattttaaatgtttttaatattcatgtacttaattagatcgctaataatgataataaattgaatatcctttttgattgtaataaatgagtagatgagtcacaccaactgtagctaccgtgtcaaaaccttatccagtaacacgtgtacagctggacctctcattgtcgcacgtgtcagatcatcaaaccctaaaattaaaatcccaaagaaaaaaaaaactttcctctttcttcgcattcttctcctcctatcggactttgccacaccagatcggaaaatcccaatcctcttttcctttgttttttttgctatcttcaatcaaaaactctccgacagattcaatgaagcagcaaaagagataaaaccctaacaaaagtaaacaatcggagttttaatcttcttcttcttcggagccggagttttgtctgatctgtcggagaggacgtgtcggcatctattaaaatcctagctggacttccacatcactttactcaattagaagctggtctgttttctctgtttttattctaactttttctctcgtttaatttctcatatgcaaacaaacacctttgcatgtaactgattctgttgtacttgaattgaattctttaatcaattatgcaaacagagcttgttttggagatgatgattcacaagtatgagattgtctttctgcttaagaattcgttgagtgttggtttctgaagtttgaattgtgtgtgtgtgtgtgatttaaaatactgatgcatggttcgaagcttagagattttagattgctataaatgaaagcaaaagaacagtgcccttactcttgttctgttttaaagtcattgattgttataattgaaagcaaaagattttagttttgatgttttatgattactatttatcgttaagatttttgatttttgtttatagttttgagtaacacaagtaagtagtaagcttataaaacaatg

SEQ ID NO: 17026 - DNA, 3000 bp, Unknown; identical to SEQ ID NO: 17025
  misc_feature (1)..( 3000): 2750-1469P.txt file - cDNA_ID_1807560; gDNA_ID_2926211; Annot_ID_202660

SEQ ID NO: 17027 - DNA, 3000 bp, Unknown; identical to SEQ ID NO: 4152
  misc_feature (1)..( 3000): 2750-1469P.txt file - cDNA_ID_1807575; gDNA_ID_1620687; Annot_ID_48472

SEQ ID NO: 17028 - DNA, 3000 bp, Unknown; identical to SEQ ID NO: 4161
  misc_feature (1)..( 3000): 2750-1469P.txt file - cDNA_ID_1807575; gDNA_ID_1620687; Annot_ID_164645

SEQ ID NO: 17029 - DNA, 3000 bp, Unknown; identical to SEQ ID NO: 4152
  misc_feature (1)..( 3000): 2750-1469P.txt file - cDNA_ID_1807575; gDNA_ID_2926209; Annot_ID_141903

SEQ ID NO: 17030 - DNA, 3000 bp, Unknown; identical to SEQ ID NO: 4161
  misc_feature (1)..( 3000): 2750-1469P.txt file - cDNA_ID_1807575; gDNA_ID_2926209; Annot_ID_202486

SEQ ID NO: 17031 - DNA, 3000 bp, Unknown; identical to SEQ ID NO: 11487
  misc_feature (1)..( 3000): 2750-1469P.txt file - cDNA_ID_1807579; gDNA_ID_2214498; Annot_ID_133619

SEQ ID NO: 17032 - DNA, 3000 bp, Unknown; identical to SEQ ID NO: 11487
  misc_feature (1)..( 3000): 2750-1469P.txt file - cDNA_ID_1807579; gDNA_ID_2214498; Annot_ID_183905

SEQ ID NO: 17033 - DNA, 3003 bp, Unknown
  misc_feature (1)..( 3003): 2750-1469P.txt file - cDNA_ID_1807583; gDNA_ID_1620618; Annot_ID_46924
acaacacctcctcctataccaccgattgtaccaatgaggttcaacattccgaaaccagctcctctcgcaccatccttataactatctgcaataaacgattgaagcgcgggtataacaattgccaatccaaaaccattcactgctctccataaagcaacctatatcacaagaccattcaaaaacttataacttcaaaatcaaagtccttaaagaaacagatcaaaaagtacctgaatgaagtagctgctggctccaactgcagcagttgataaagcccaacagaaagtacctattgcaagaacaatgggacgatcataggtaatgacaagaactcctgctaatggtgatgcaagtccttgaacaaagtttctaacgaatgttaagtagcctaaatctgatggtcctgcgttaaatgcttcactcacttctttataaaccgaaggcaatagattctcgtctgcacgttccatgatcgcagctaagtttataagaatcaatgatatcgaaacccccaaaaacgttcctgttctgttcaaaaacagaataaacaaaagaaagttttgagttttgtaagattcagaaccagagacaatgaaacggttaaccatttttttatgattactactaaattcaaagataaagtaatcgattaaacagatccacgagccaatcttagaaccctaaaaagtttgaacagattctgattcgaatcaaataaaacccaaaaggagaaaagtcaaaaaggagctaactttatcttcatgctgttagtacggtgatggcgagggaacagagacctgaagaatttaaaagcgacggagatgataccggtacgagttcgagcatgacccatcaaaatccaaaacttgaactcccgagtaaccggagccggagtttggttgctttctataaatatcggatctaaagttccgacacgaatagttttctcgtacgatttaacaaccgccgaatttaatattaattacagtaacatgttggatattctttttgttactgacgtcatatttctttggatgattctttctggataagtcatgaagtggccattaagccatttaattatgtagattaacgtatttattggatttaaaaagatcattaagcacgtaacgtagcttgtttggtggatcgttacatggtaagtgtcgggaacgtgattacatttatctttattcatttttgggatgtgaatggattggtaacgtataatttaagttatatgttaatcttggtaattttcaatttagagctgaaaattattgttagaaataacattattagaaaagtcttcttctttagctcctccatgttaccaggaggaaaatatcagaaatattgctgagtctgaaattaagggcccatgggcctcggacacatatactagacaaatcatgtttcattcaatttaataacgaagtgcccaaattcgttaatattaatgccgagatcttcggctgtctgacaattttcataatgtctacatgcagaatgagctagtgatacaataatattgtgattataagaaatatgtaatgtaatgtagcaaacaaatcgaaacgtttacaaaagcacatataatttttctttttaaaacgcaatactaaccaatattgaccgatgcattgaacaatagtgagaatagttggattatgacttaaatggacgccgcacgattaattagaataatcaacaaattaaattaaaagtaagtactaagtaagattaaatgtacgtgaccacgccgtacaaattgaaaatttatgttaaagattcccccacgtgaatgatctgatccaaagtcactctgacagattggattttttttggcgtcaccgattttatttttcattttaaactttagtagtttttggatttgtgactataaatgagaagacgtggtttaataaaataaaataataaacacaattattaggaacttttttttgtttcatttgattgtctgcaataataacaaatgacattttatgaaattacttttattaatttaaggttgtgaaaatttaacaaatatgtaaataggatttgttaaagtactatattaattagttggctaaaaaaataataatggcatgagtccagctgggtgattctgcttcctggctttgctcacgcctaactggaaccgcacgtgctccgaccacaatagccaaattgctgtttgttatcttatttccatcctttttaatattactaaaaaatgttttagctagcttccctaattatgtggatacatttttttaattcacatcaatgaatttgggaaaatcaaataaacatgtaatttttggaataatttgttcgtcattttctaaaatccaatatgaccgttttaaaactctttagatgctatactaggttaaaaattatgttaggaaaatgagatcagtttcgaattacgttttgacaactccaagaaataacatcaaatttggtgtaaagcttttgtgagttgtattaatgcgttacaatatgaaaatgtgcaatatgtcgtcataaaaaacaatgcaaaatcgttagtatatccagtttttatactgattcttaattcttacaacgctttttgtttttgtttttaagatacaaatttaaattaaagaaaatacgaaaaaaaagaagaaggaaagatccgaattcattgaacagtggacgggagggaaacaacggggaagggaccacagctcgtgcgttacataaataggacacgtggaagctgacttccagaaataaatcgatcacacgtgtagaaacagaccacacgtgtggagacaaatgaatatttgaatttatttatacttaatgaatgaaagttacagccaatccgcttcagactcacacacacacccaaaacaaaaaaaaaaacaaaaaaactaaaaagaaagcttcgtctctctctctctatccctcgtgcgccagtctgacaaagacttagagatagattcagagattcagagctcttcaatg

SEQ ID NO: 17034 - DNA, 3000 bp, Unknown
  misc_feature (1)..( 3000): 2750-1469P.txt file - cDNA_ID_1807583; gDNA_ID_2926212; Annot_ID_142019
acacctcctcctataccaccgattgtaccaatgaggttcaacattccgaaaccagctcctctcgcaccatccttataactatctgcaataaacgattgaagcgcgggtataacaattgccaatccaaaaccattcactgctctccataaagcaacctatatcacaagaccattcaaaaacttataacttcaaaatcaaagtccttaaagaaacagatcaaaaagtacctgaatgaagtagctgctggctccaactgcagcagttgataaagcccaacagaaagtacctattgcaagaacaatgggacgatcataggtaatgacaagaactcctgctaatggtgatgcaagtccttgaacaaagtttctaacgaatgttaagtagcctaaatctgatggtcctgcgttaaatgcttcactcacttctttataaaccgaaggcaatagattctcgtctgcacgttccatgatcgcagctaagtttataagaatcaatgatatcgaaacccccaaaaacgttcctgttctgttcaaaaacagaataaacaaaagaaagttttgagttttgtaagattcagaaccagagacaatgaaacggttaaccatttttttatgattactactaaattcaaagataaagtaatcgattaaacagatccacgagccaatcttagaaccctaaaaagtttgaacagattctgattcgaatcaaataaaacccaaaaggagaaaagtcaaaaaggagctaactttatcttcatgctgttagtacggtgatggcgagggaacagagacctgaagaatttaaaagcgacggagatgataccggtacgagttcgagcatgacccatcaaaatccaaaacttgaactcccgagtaaccggagccggagtttggttgctttctataaatatcggatctaaagttccgacacgaatagttttctcgtacgatttaacaaccgccgaatttaatattaattacagtaacatgttggatattctttttgttactgacgtcatatttctttggatgattctttctggataagtcatgaagtggccattaagccatttaattatgtagattaacgtatttattggatttaaaaagatcattaagcacgtaacgtagcttgtttggtggatcgttacatggtaagtgtcgggaacgtgattacatttatctttattcatttttgggatgtgaatggattggtaacgtataatttaagttatatgttaatcttggtaattttcaatttagagctgaaaattattgttagaaataacattattagaaaagtcttcttctttagctcctccatgttaccaggaggaaaatatcagaaatattgctgagtctgaaattaagggcccatgggcctcggacacatatactagacaaatcatgtttcattcaatttaataacgaagtgcccaaattcgttaatattaatgccgagatcttcggctgtctgacaattttcataatgtctacatgcagaatgagctagtgatacaataatattgtgattataagaaatatgtaatgtaatgtagcaaacaaatcgaaacgtttacaaaagcacatataatttttctttttaaaacgcaatactaaccaatattgaccgatgcattgaacaatagtgagaatagttggattatgacttaaatggacgccgcacgattaattagaataatcaacaaattaaattaaaagtaagtactaagtaagattaaatgtacgtgaccacgccgtacaaattgaaaatttatgttaaagattcccccacgtgaatgatctgatccaaagtcactctgacagattggattttttttggcgtcaccgattttatttttcattttaaactttagtagtttttggatttgtgactataaatgagaagacgtggtttaataaaataaaataataaacacaattattaggaacttttttttgtttcatttgattgtctgcaataataacaaatgacattttatgaaattacttttattaatttaaggttgtgaaaatttaacaaatatgtaaataggatttgttaaagtactatattaattagttggctaaaaaaataataatggcatgagtccagctgggtgattctgcttcctggctttgctcacgcctaactggaaccgcacgtgctccgaccacaatagccaaattgctgtttgttatcttatttccatcctttttaatattactaaaaaatgttttagctagcttccctaattatgtggatacatttttttaattcacatcaatgaatttgggaaaatcaaataaacatgtaatttttggaataatttgttcgtcattttctaaaatccaatatgaccgttttaaaactctttagatgctatactaggttaaaaattatgttaggaaaatgagatcagtttcgaattacgttttgacaactccaagaaataacatcaaatttggtgtaaagcttttgtgagttgtattaatgcgttacaatatgaaaatgtgcaatatgtcgtcataaaaaacaatgcaaaatcgttagtatatccagtttttatactgattcttaattcttacaacgctttttgtttttgtttttaagatacaaatttaaattaaagaaaatacgaaaaaaaagaagaaggaaagatccgaattcattgaacagtggacgggagggaaacaacggggaagggaccacagctcgtgcgttacataaataggacacgtggaagctgacttccagaaataaatcgatcacacgtgtagaaacagaccacacgtgtggagacaaatgaatatttgaatttatttatacttaatgaatgaaagttacagccaatccgcttcagactcacacacacacccaaaacaaaaaaaaaaacaaaaaaactaaaaagaaagcttcgtctctctctctctatccctcgtgcgccagtctgacaaagacttagagatagattcagagattcagagctcttcaatg

SEQ ID NO: 17035 - DNA, 3003 bp, Unknown
  misc_feature (1)..( 3003): 2750-1469P.txt file - cDNA_ID_1807585; gDNA_ID_2214522; Annot_ID_134084
gcggtgataagagaaataatgagaggaaatggtatctagatgcatgtagtgacgaagaaaaagagagctatgggagttaccaaaatgtcttggccaacccaagaatacgatgtgtgacgttttataaaccagaaaacagcaaacgccaaacaaacaatattcaccaaaagcgacaacactgacattgttccaagcaaagggagcttcacagatttccgagcaagatgtctgcattttctgcaggcggaacaaacatatatctgttaagagatgttgaccagaaaaagagagaagtgaaataatcaggaatatttcagaatacctcaatataacagccataatgatgttgtgcataccctgaaaacaacagccactgcgttaaattgacggaaaaagcacatatacatttaatctaaattctagacaggttcaaaaccgccggatgttaatgaaattacctgcatgccgccaatgcagaaaaatatggtgagcacccatacaaaccatgatgacatgaagtagaaaaggagcagcagaaatatggaggctgttacaataaaaaatacagcaccagtgacacttatatcaaggatttccttctctgggtcatcttttctggtcccagcactagaaacatcctggaaaaaattcagtaaattatttttttttctttaaaaagacattgttaattcagctacataaactgaagttttgatcaccaagtctacagaataacaagaggctgctacgcaaagtatctgggaaatgtaaactacgtgtataggatatcaaaggcagttaattgtagaaaccatagcatgcaaaagtgcttaaccacaattctctggtacacctttgctagtatgctgtaagattcattagcttggtcaggatctgtaagctctgaccacagtgatgcaacgacaacagttcccacagccatgagcaataacaatccagctgtgaggtccacggcaggacgctttggagcatacaacaaaagctcaactgcatcataaagaaactggacttagcctaaaagagatttatacgaataccagatggttcaaattgtagagctacaggaccaacaagagaaaaactgaagtgcgaaatcacaaaggctcaccattcttattgtcaaccatagacttgttgagagcatctccgcttgacttagagatcattaagacaggtatgctcacatttagagatgtgtccttttccatacatcccatctcatcaagatctgataacagatcatgagtaaatcatatgatccaaagctacgaaacacgaaaaacatcaatccgaaaccgtattgaaaagaaaaaaacaccttctttgtcattaatgactaagagagcagaagcaccagctgcctcagcatgtttggccttctcagtgaaagcacaattgccacggatcgacaaggcaatatgtccatctaactggaacaaacaatgtcaatacaagatatcaatgaacattgccaaaaaaaaaagtcagcttgcacttccaaattacatggtggaagccattgacttcattctaaaagcaagaagaaaagagaaactgaccctggaagagagatgggaacaagagtccaaaggatctacaaaagcagcaggaaatctaagagcttgatcaggaacagaaggcaaggcagctccaaattgagcagttaagccagtaaggaagtctccttcaacaccatcaacccaatttaagacctttacctatatgaagatcatttccaccaaatatagaatctcattaacaaagagagagagagaaggaaaactagatcaatcaactccactgaaccagagagtgattagatacgaagtaaagataagaaattgaatgcaccatttgaaacttattggtacagccaggagactcgaggctggaatcttcggtccacgatacatcgtcggccgccgctaccgaaaaaccaagcaggagaagaataagtactaaggctgaatatcggtgattcggcggatcaaacgacgacatgacgcaatcgactgagcaaatcggagagaagaagaagaagaagaagaagaagagacaaagagttgctgttaaaatctttctgggatatatcggacggtcgatattatagtcttttttatcctctaaattcaataattcttttactgtttctattgtgccaatttttgagtgattcattaaaactatatgatatacgacagctctttttgctcaactaatcaaaaatcataaattaatatatgtcgcattatgtaaaatataatggtttcaaaagtattttgagcagaattcagatccccacgatgtattttgacttgtctagtatgtcaaacaaacaaatagaacagttaagtagaggagtttgattgtaaattctaaatgtcatcgtaccggccggtttaaatgttcttcatttgataactatcaagaaaaactaaattatttagataactaatttatatgaactcgatttatctgtttatttaacaatagaaatatcaagaaaaacgaataattcaggagagaaacaccttcttggttatataaaattacaagaaatttacagtttgtacttaaaatcttttccctttgaatttcgttttgagctaattacaaaacaatttgtttttttttttctgtttggttccctttgtaattagtaccttaatttactctgacaagatgaatatttttccaaaaagaaagtaaaaagagaaaaagagtccatgacggatattcaaaaaataattaaaacaaaaaggaagggaaagaagaaagaaaaaggcctttgtttttttaaagagaagagaagatctctgagaagaaactcctctgacgttttttctccacccaaatctctctcaactctcaagctcctctctttttcttccttctgcaacaacaacaactgttactgatctctctctctctctcccaagtttttattttattttgatcggagatcgagatcagctagacatg

SEQ ID NO: 17036 - DNA, 3003 bp, Unknown; identical to SEQ ID NO: 17035
  misc_feature (1)..( 3003): 2750-1469P.txt file - cDNA_ID_1807585; gDNA_ID_2214522; Annot_ID_184648

SEQ ID NO: 17037 - DNA, 3000 bp, Unknown; identical to SEQ ID NO: 13985
  misc_feature (1)..( 3000): 2750-1469P.txt file - cDNA_ID_1807597; gDNA_ID_2214687; Annot_ID_136717

SEQ ID NO: 17038 - DNA, 3000 bp, Unknown; identical to SEQ ID NO: 13985
  misc_feature (1)..( 3000): 2750-1469P.txt file - cDNA_ID_1807597; gDNA_ID_2214687; Annot_ID_189354

SEQ ID NO: 17039 - DNA, 3003 bp, Unknown
  misc_feature (1)..( 3003): 2750-1469P.txt file - cDNA_ID_1807601; gDNA_ID_2214555; Annot_ID_134761
atcatatgtactaaaccgactcgttgtagattagttagtacgcgttggctaactggtcgatttaacaatttcattcatacaattttgctagtttaaccataacccattgtttgctttagttgtaattttgtatgatctagatacaagaaatacatcgttttcctacgatcttcgtgattagtttacatactcattaatcgtgaccattatcagtttttcaaacctcgggtccttagttagtacgaaccccgagccaagagtgtttagtaaattgtagtgggaagccttgaattactcaaatgtaaccaaaacgaatatcaacgaaacatgacaacgaataagtgtaaaatattttcaaagaggacccatcaaacgaatattgttaaacagtcaacgttacatggctcgaacacattttatacaataaacaaaaaaaattacaaagtaaaacaagaaaatatattattccttggggttgggccacttaattaataaaaacctaacttactaataaatgcaaatttcagtttccaaacaatattaaatgcatcagctgcaattcccacccacctctttttctcttcccctaactaaattaattaaaattaaattttcaaaaaaataaaaaaataaaaatctctatcactctcttctctctctctcccacatggacccagtcttcttcttctttaccatcaaatgtcaacactcgcctcctccgcctccgtcttcctagtccaccctccccttccaccgtcgccaccacaagcaggcaaccactcttacctcacaactctaggctttggctactccatagccatagctctcggttttctcgtccttctctcgaccgtccttttatcctcatacatctgttgccgtgactctcgccgccgcacaaccgccgtggaatccacaggcgatcgtggcggaagtgtaatcctcccccgcataatctttgtcgccgaggaagacaatgaagatctcgaagcaggtgatgtcgtggtgggacttgatcaagccgtcatcaactcataccctaagttccacttttccaaagatacctccgccgcgtcctcagatggctttggtggcggaggagacacaacgtgctcgatctgtttatgtgagtataaagaagcggagatgctgaggatgatgccggagtgtaaacactacttccatttgtgttgccttgatgcgtggcttaaactcaacggatcttgtcccgtttgtcggaactcgccgcttccaacgccgacttcaacgcctctgtcaacgcctttgtcagaagttgtgcctctctcccagtacgcggccgatcggaggagagcaagaagatgatattattattacatagatccattcgcctaaattagggtaattcctatttattatttttgctccgtttcattacaactttactgatttgtaattaaaaaaaatccgtcaaaagtggagtttgccattaatttcatcgaaatgaaatctagtttgaatcgtttactaaccttacaaaatttatccttttctattggcgtttttgaacgtttttttccgtttcccctatcaatatgagcggttcaaaataaaatacgcgtccgtgttgtgtaacttaaataaaagagtttgagtttgaacaaggcaacttacttttagttttttgttgttttttggtcaagggtcggaaactaagtttagttaaaatattagatttgttgaatgtcggaaatagatgtttctaaagttgggaacaaaaagagttacgacttaagatagtatagttttttttattgcatagcgagtacagaagatgaattcaacgtcgtaaactcgtaggtccaaatgttggtcgagttaaagtgtactctaggacaacttttctaaatgaaattaacatttttatagataaaatgtttttgtttatatatatcacatgtgatttttgtttcaaactaaccgatcacaacatacctatgtttgaagaagcgttgccttcaagcaattctgcatttcttctacgtgacctggatgtttctggttcgatgatagccgaaaactgttatatttttcgtaaggcgcacgttagtcacacgaatcctaaggaaggttggttggtgtgaacactttatattaatacatttgaaaattatggttagtcaatatatagtcataatgaaatgcgaatgtgttatttgacttacactagtccacaaattcgctttttcctacacggcactatcctgtggagcgtagtggtaatatgtttttgtaattaagtaattaacctcgctttgattttgatttattctctttctagcaacttgtatataggatacataattagatgtatatcacctacggaatgtaatagagtttagcattattacattacatctgaataataaaaaaagcagtagtagattaatacatgttaaaacttaaaataactcgacctatcaaagccgcttacttaaagagagagttacgtcgtgagcttgtatttttatttttttgacggcccagtaatatattaaaagcccaaaggcaaacattatagaaggccctcttaaggggatacaagcgaaattacgtcgtgagctttaatgcttcatcataattaagtttgagccgtaaatttcgctatacgatatgggacacgtgtcgtgaatctactcgtggtatcggttacttaatgaaaaggcaccattcaacgttttcttccttatcgttgcctacacgtttcaaggctctgcttctccgtcaattaacgtccgttttcgtcatcaaaatactaacgccgttgatgaccttatttaaaaattaactccgaaccacgacgttcgggttttggaacctcaggctcgtggttataaaagtcttgtgtgaaacctattatatttgccattgcttaatcctctcctctccttcacgttgagatatttttgagttttctgtgttgaattttggggaatcgaagaaattgaatttcaaaaatcaatg

SEQ ID NO: 17040 - DNA, 3003 bp, Unknown; identical to SEQ ID NO: 17039
  misc_feature (1)..( 3003): 2750-1469P.txt file - cDNA_ID_1807601; gDNA_ID_2214555; Annot_ID_185689

SEQ ID NO: 17041 - DNA, 3003 bp, Unknown
  misc_feature (1)..( 3003): 2750-1469P.txt file - cDNA_ID_1807609; gDNA_ID_1621201; Annot_ID_57675
agtctcctctttcaagcaaagcacctaacttctaccatcctctcctctctcacactaccaattcattgattctccaatataccaaattaaaccaaacataaccgaccggtcggaagatttgggttagtgattgaactaaaaaggtaaaactcaggtaacacgacccgtacctttcattatgattatatggagagcttcaatgtccatcggttgccaacggtgaatacttaaattaaatgacactctctcatttctctaaattattggtggccatacatctgtgtgtataataatgtacaagtatattaaagcatgtgtctacttcactttgatggttatggaaaatttaagtcttgtggcttcctctttggtacaccaaaaatcattatatcaatcggttggctaacgtaagagacatgaaaattgcatcttcttctttttaaaaaacaaaattgactccattttttttttctttttgcaaaaaaatgaaaactatctttaaaaaaaaattgctaaaattactgccatataatttgttacacattgatctaccacctattaaaaaattatagcttttttaggcattgcttttgagaggaaataatgtgcaagtgcaacatatctataacataaaaatctgaaatatatgtgtgtatatatagacaaacatgtttgaaataaaccatgtggtttgattaacagctaataatgacacaccatacacgttatacttgaccatcacccccattctcaatttataagaccataaaatagttttccgtatgcaatgaataaaaaaaaatcaatgatagatctgaagcttattaacataaaatagaagtggataacattgatccaatcaattcattgcagtctctctgtttgttattcaaaacagcaccgaccttttgattgctcacatgccatgagcacagccatcgatggaatattacgtgaaggaaacaaaaacttgaatatatatttttcctcacgattgagttcagaaacctggttgagaaaaagaattagagtccacctaaacatatacaaaattcagtattatatagtatatttaataaaaatagatatgtgcgtttcagttacaacatatatatgtgttccctaggagtgaaaagatgtcttttgaattgattttcataataattctacgacatagggaattgaaaatttgtagtggcatcaaccgataaactgacttttatataatctaacgtaaattggttaaacacagagagcatctttacactttttttttttttttaaaccaaataaattaacaatgaccagtattgtcggaaaaaataaaactatccattaaaattaagatgcagaaacccccaaaactaaacctagggacagaacatattatatatatgtcaaagggggattattaaaactcaagaacaaatcgatggccaaagtcatgcatgtggcatcattatggacagaagttacacaaaactctcaaacatacatcaatggattgtaaaacgttaatgatgacacgtggaagaagctcgtgaggtgagacccactatagtcattatattttgggatactgattttgcagtgagccttgtgatgcaaaacagaaagcatcacatgatcgttagtatgtacagtcgcagaatgtctaatgaattaaaatgcatttatttattttttaagtgatcatttgaaatttaaacgtgtttgacgtaaaacatcctagttgtgactaaagacaaaaacacaaaacaaaaataaagtgatagttttgcataaataatcgatttcttttgttggaataacacgatagacatacaaaagtggagtcaatgggtcgaaaaatggacgtgaagccataaacgatggccatcaaaacataaaatagttgcgttaaactaaatctaaacgaatgtgatgaagcattattgatgggttacactatacatgaaagatcataaaactaacggtgttggttcgtaaagtgcacgtgaaaatgaatgtatacccttatttatatttcaacgattgaattttcaattactatttaccaaccaatttaactcaccacctattatgaccatgtggcgaggaccagctctataagctaaaagtcagagtcaaccaattaaagtgcctctaatttcaatatctcaaaatccctacgcatagcaatagacataccgtatgtgacatacctattaacgtatatatatatatagctaggctatttacatatcacaagctggaagataaattaatttcatctgatatgttgttttatatcaacaagttttatctaatctattatagagacctagatttttttttttttttaatctattatagagaccaaaaaccgtgatgccatgcttcattttgtttgtaatggtgatatagtaagtaaaaaaaaactccaaatataaagcgaattttgttttgtttttagtgacataatgcgttttgtttttatcatagttatgtttaatttactagcattattaatcggtaacggtcacaaataaagagatggtggtaactaggtaaattatatttggtgaaatactatatgacaaaaaaaaaaggttaatacatagtagtatttgataagagggacattttggtaaatatctcaaaatattggtcagtttattaaataggaactagagagacggttaagaagtcgttctgatttcgtctttcttctctgtaaagtcgtttctctctccaatttttttgttttcctgcgaaaatcaaagagactaacacagagagcttattcaattttctttcgatctgtgaaatctcagattttgatttggaaagttgtggagatttcagctgttcttctttgttgttgggtctatttctgggtttcttcgagctgatttatagagtttggttctccgatgatagagctaatctgcttgagatagctactgtattgagagttcttctgaggatctttatttttctttacatcttgtgaggaaaatg

SEQ ID NO: 17042 - DNA, 3003 bp, Unknown
  misc_feature (1)..( 3003): 2750-1469P.txt file - cDNA_ID_1807613; gDNA_ID_2214575; Annot_ID_135164
agaagtctgatcgtgcagctaaaagccccgctgggctcttcttccagcatgctggtcacaggttcttaaagacttatcttgatttttcttgattgctttctcattttacttgcttctaagttcccttgtttataaaccatattagggacaaagttgttgatttccactggaatgcttcagacccttggactattgtcagtgtttctgatgactgtgagactactggtggaggtggaacattgcaggtaaccttgaaatctttcttggtaccttgataagcaattttattgacataccgttaaatgttgtttatactttcttctatggcagatatggcggatgagtgacttgatttacagaccagaagaagaagtcgtggcagaattggagaagttcaagtcgcatgttatgacttgtgcctccaagccttaagagtaaagaaaacccattgtctatctatctatcgcctatggtaaactaatgcgggttttagcgaggagtcttggtttttgtaaggctggtttgtcttttgagatattggtggtagcttttaggacctttccatatcagttaggggtacatggttctggttcatgatcctgtttcatcagactcttaggtgctgttttgttcaactgagatgttaatcaaatcggaccaactttatgtgttttggtttaaggtttcaatacttggcctgaacctaatgattccttctctgtaactagtcgagaccaacccggctacaaaaaaaatagttgcattgatgttcaaatgcaaagcagaaggggtcattataaaacaatatagtaataagcatcgcaaaatttggaaactgggttcttgatgattcgtcgcatcttaaataatgtttgcattgtcgttttcattagaaaaaaactgttaatcacgcttagcagtaggattaggtgattttcaattcacagatttattcgtaggattttgaagaaattttaagtattaacagtcactaaacaatcagaccattgcaaatcatacatagatcacctggtcatttcataaaactaaactatatgataatgttttactttattgggcttaacgttaatggtcctcccgcttaataggctttatgaagtctcttgatgagctagagactttaaaaatccaatcacaaagcctacatgagaccgtcaagatcagtcagagaagatcaaacgaagaagtttttgttccaaaagatactaaagagagaaacatgaatcaatgtattgcttgaggaataaggtagggaagctaatcaatcacaagtagacgaatcggagtatttcataaaattagggtttttagacctacattttcttttctttttccgacgatacttaaattgctcgagaaactctattagtgagaaatcccccatcggaatctcgatggaatcatctccttctggatccgaacctccgcagaaagtcgtttctaaactgcagaaagtaggctggcgagctacgatgatcttcaatctcggttttgcaggttagagaaatcttcattactttcttagtaaggtttttagttttacgtccgtaatgtgttcgatgtaatgcctagctgagaaagttctttcctttttctttattaatttttgagaatagaaaatacgaattcttctagcggtcgtctgatatatatgatactacaatttatcccttgaactgttgttgttgtccttgctttgattctcgaagaaagctgattgcattactctgagagtgtttgattctccactctattatcagatattagaacatgcttattgaaaggacattttttggatctgtatctctcagtcactgttgatgttttcagcgacattgaattaagcaaatgtagtatctagaaactatctatatctctgtgtgcgtgtgtgtatatatcttggctaagcatttttgcgttgaatagaggattcacacaggttcttgtaaattttctggttcatggacatgattgcacatcttattatcttgtactcaatacttttcaaatgtttcagcatctcgatttttagctggcagaactacaagcttggtctaaatcagaattgagaaaagcatgcttgcttgatttcttatgatatagcattcatgatagacaacttcaatgtttgctgatttgatcatttggttctgcagcttatatatttgcgataaaacgagaaaaggacattgatgcggacgagaagaagaaagttaaaaagggcagcgaggctagacataaaggtgtgaaaaagggtgctgttaacaccgaaatcgagaagaaaggtgcagaagaaactgataaggctaaggaagcagaaactgcaataccggagaaggaagaaaccaaactgatccctgaactggatccactgtttgaatttacagatgcaactgatcaatccatgtttcaaactgtggcaactgaacatgtaaaggtagcaaggaaaccaattccagaagatgagcaaaaggagcttttcaagtggatattggaagagaaaaggaagatagaaccaaaagacagaaaagaaaagaaacaaatcgatgaagagaaagctattctgaaacagttcattcgtgctgagaggattccaaaacttctacctgatgattccgttgattcttcacttcgtgattgggacaaattcttctccaagtagaacgaatacagaaactagtgtgtacttgttttttgttagtacaccaaatgaccattgttggctttttagttttactactctgattgttactctaatcaacgaatagtttaaatgtgatttcttgggggttgagagtggcacttttataaaactttggggtaatgtttctatttcttataatataaaggacttaaaatataaattcaataaaaataagggtgtttctgagaaagagggtataaatagcttaaaccctagagaaactgaagaatcctaaattgatcatcgtcgtcctttgagtaatttagaaaatcaaaatg

SEQ ID NO: 17043 - DNA, 3003 bp, Unknown; identical to SEQ ID NO: 17042
  misc_feature (1)..( 3003): 2750-1469P.txt file - cDNA_ID_1807613; gDNA_ID_2214575; Annot_ID_186322

SEQ ID NO: 17044 - DNA, 3000 bp, Unknown
  misc_feature (1)..( 3000): 2750-1469P.txt file - cDNA_ID_1807621; gDNA_ID_2214578; Annot_ID_135213
gcagcctgtgaaaatatgattagtggaaccggaatgagacctggagatgtcatcactgcctcaaacggaaagaccattgaggtatctgatgattttttccccctcagagttgagcttttactgtttttcctatgaaatgctaattgttggcgatggtgtgtgtaggtcaacaacacagatgctgaaggtcgtctaacactcgcagatgctctagtgtatgcttgtaaccaaggcgtcgacaaggtattgcattactttattgatatgagaagctaaaggagcttgtttctgttaaatttatcctttcagttaaacattgtcaaatatcttgcagattgttgacctcgctactttgaccggggcctgtgttattgctcttggaacttcaatggcaggtacacagctcaaaaaccctgcagaaaaactcaatctttgtgtcgtttttgagtccaaaattggctcatgatgatcattctgtgttcattacttgataggaatctatacacctagcgacgagcttgcaaaggaagtgattgctgcatcagaaaggagtggagagaagctgtggaggatgccactggaagagagctattgggagatgatgaagtctggagtggctgatatggtcaacacaggcgggcgggcaggaggatccatcaccgcggctctcttcttgaaacaggtgaaaacaaagtccctttagaggctatacatacatgtttttgacaaaaaattcgtcggtgaaagtaactaaaccatcctctattttctgtggtatggcagtttgtgagtgagaaggtgcaatggatgcatatcgacatggctggaccggtgtggaacgagaagaagaagtctgggaccgggtttggtgttgctacgcttgttgaatgggtacagaagaattcatcttcgtgaatgaaacctagagagcgtgagggagagactgtagagtttttcgggtgttgaaatgattgctggtttttaataaggtctcaaaagttactatgttttcagatgttcttaacttgttatgaaaagtaaaatcgtcaaaagttgaataaagtggtactttgttttagtcgtgcaaaaatactgtctgaaatttctacttttgaagtcttcaacattgggttctccttttcattacttttttcggtaaccacttcaaattttatgaaccataatgtcaaatgcaataattgaacatcttttgaaaaaaaaacagcatatgagtggttacaaaacatgacttttatctatcataaaataaaatatttttttgataatattttgaagtaactattctacttaatactccttttgttccttagtactgattttctaaccggtttgcccaggtccacgccttgaagcactgggaagtacacgaaccttcacattgttgaagatcttttgatcccaaaccctgtttcctatttctttcaaaacagaaaaaaaagaagcaacaattaacaaatcatttctgttatgccagtttattgcttacgtatctagaggaaccaatccaaattgaaaaagaactgtatgtccataccggaataattattacaaaagccaaaaatgaagagatattattacaatgattcagttttagttttcatatataatgagcaaatcgtaaattcaaactgcgatgataaagtaaaattgacgactattttctatggatattctttgattttaaagatatatttgcaaacatggaattataaccaaaactatataacattcgattttcattcaatatctctgttttctaaaacggaaaatttgaagtgtatatttaatactctacaatcaaattaaacaaaaatcgaatagtatacaaaattgcttggaatataaaaattacttggatttgaagactcatgatgtactcgggccaatgctgtgtttgatagtccagagagcaagagaaaactcaaagttaataagcaaacgacgaatttatacattttgggttgatttagatctatgaattcaaaatgtaattcaagcatatatatatagagagataaatgaagcccacgttttacagtattcttttttataaatgaaaccaggtcaaaaaaatggtttggtgtgtcccgcgtgcaatgaaaaattgaaaattcatatgtgaacctaatatattattatatctctcagcgtgtttcattttcaatatacaatgaaaatgcgtatgtgactcttgaaaatgtaagattttctatgaattagtccaactcttgaaaatgtaaagttttcaggagaagaaggtggacggttttattaagatcgtgtcaaaaaaaaaaaaaacaatgatttgtaaaataaactaaactttcgactaaacgattgtaaccatttataaaaaaattacgttcaacaatagaaggtatttattcggattacagttttctgaaaaaaaacaaaatcatacaatataatttttgttttcagaatcatatatttaacaaaaaattgcgataaaataacacaactgaaaaatatttgttcaaattactactattatataaattaatctattaaaaactataaaatatttgtttaaaactttttcaccattcaaacattcatactggataacatattattttctcattattcacacattattttgagctgtttgtagcgtttttcttctgcataatgagttttcctccaacaagtcgcatcacataatttaatctgtttgttctgcacattctgattaccatatatatcgcctcagctttacatatatatagattttgttatatatcttatgtctaagctattttcttttaactattctttataggccgcttatgttaacgaaaacactaaaatcataaccaaaactatttaatggtgagattattgggccactcactctttaccttttccaagaacatcaatttctgagctacgtggcttcattggcttccacatttcgtttgaaacattcttgtctgaactaaaacctagaaaaaaatg

SEQ ID NO: 17045 - DNA, 3000 bp, Unknown; identical to SEQ ID NO: 17044
  misc_feature (1)..( 3000): 2750-1469P.txt file - cDNA_ID_1807621; gDNA_ID_2214578; Annot_ID_186394

SEQ ID NO: 17046 - DNA, 3003 bp, Unknown
  misc_feature (1)..( 3003): 2750-1469P.txt file - cDNA_ID_1807632; gDNA_ID_1620687; Annot_ID_48482
tttttcttcttttcagaatgaataatgtttaacaatgtatcaaaatctttctccatcaattggaaaaacaagtttgttaacaaacaaagagctttgttatttgtttgaagtgattatgattgatgatgaaaaccgccttaaagaagctgcaggtgatctcatgttctctttttaatgtctcctttccctgcaactccctgaaactgaagatcctgttttaacaaaaaagcaaaattcaattcagatcccaaactatactcagatatataaatacacagttcactgtaggaattaagaaagtaagttaccatttggtattgtctctctataagcaacagctacattttgaaagaactctctggtagcatctgcatattcaatcaactagcatattggcacactacgaaagcctgagcaatggagaacaaaatcagaatactattttcacaatcaagactcaccatgctccattgtcatagatggatcttgctcatcaacaaacccgatgagttttgctggatttccagccaccatgcttcagaaacgcccgagagaaaatgtcaatttgagcaatgttcaaacaaaaaagctcaacgagattgatatttagatgcatgtcagtggtttcatacctatgcgaaggaacatcctttaacacaagcgaaccagcagctaccattgctccagcgcctatcttaatgttaccaagtatagtcacacatgctccaagaagagcaccgtcgcctatatttggatggcggtcaccggtttctttcccagttcctcctaatgtcacaccctgtaacatgaaaatataagctagcatttataacatcaacagttctttatagttttggagaaatgaagttagagaacggatttgtacatgcaaaattgagacacggtcgcctatcacagcagtctcacctatgaccacaccagttccatgatccaacaatattcctttcccaattcttgcagctgagcaaaaaaaacagaaaccaaagttattcagatgctagatgtaaaagcatagacaagctattagctatgaatctaaaatctttaccgggatgaatatcgattccaaaaacctgagagaaaccattgacatggatcagaggttaacgttgtacaccaagactataacagtaaccaaagaagttgtagaagttactcttacctcgcttactcggctttgcagtgccaatgctaatagttttcttccttgcttccacaacttatgtgctactctatacgcctgcagtgcaagatagccctgtggaacaaactattctggtaaaatacacatgaaaactcacttagcaatcattttatatcggtgtaagagatgttattgtctttaaatcagcaactatgatggttaagagactaccttcagatgtaaaatagccgaactatacgatagacaagcaggatctctgtctttgaatgccttcaatggaccaaaaaaaaaaaacattacactgcagtcacattctcagacaataatatcagtgtcaaaaggaagattcaccgatacgagatagcgtttttacctgaacatcaagacgaatcgagctttgaatacctctgtcatgtaccataacgttgcaaaatatatccataagctgagttgccaacaaggtagggttttggagacggttagctagaacaaaactcaatgcttgctctaaacagtcatgcgacaagatactagcatacaagaagctactcaaaaccggctcctcttctgcctgtaaaacacacaacaatattcaccattaaaggaacataaacacacacaaactctgttccttaacttgtccttcgtgtagttaatgaaaaattgacgctgaaaaagtagacgggtgagagaaatacgtaacagcaagaaaaatttaaaagctttaatcaagtagttaaagagacagagaaagcatttagtgagaattcgaccccacggttttgtcggattgatataaaaggtacacaagaatgtcattatcataacctttcaatgtagaaaatcgaagttgattaacaatatcaaagtttctgtctttgttgaattgaagtcacatatatgaaaaacgtataaatcaataataagaatatgattatggagcataaggagaaaacctcaagcttagcttcttctcttatagaatcccaaattgggtcataactagaattggtaaaatccagcaaaaccgggtcggccacgggattaagggttcctctagcgtaaaccgggaaaatcctctcgaaaggaaactcgtcaccggtctctccatcgtctctggcagaaaagttccgggagacaatcattggaagagaagacaaagatgacgaggaagaaaaatcacgattctcgccgtttatacaagccatgaccaaaaagagtgaagctattggtgaagagtgtagagaagatgataaaaaaaaggttaatgataaggaaactgagaaacccttttaaacacagtgattgattgtgttggaatcgaagtagcgacagtcaaaaagataaaagaaaaaaaaaagtaaaactgaagtcttgtgtttctgtcctcactgttttggaatgtttcatgcgaaatcagatgtggtctctctctctctgctcttgtttgtaatgcgtgtgaccgtgattcagtccaagttcttaataccaccaccattgcaagagaatccaaaactatttggaagtatcctttatctatattactttaaacgtaccacacacgaagtggacgtgaactttaggctacaataaaacatttctttatattatcataaaacaattttcatttttttacaaaatattattttagaaattacaaaaaaatgattgaacaaaataattttttttggaataaagctgattggccaaagaaataaaataaaactgacaaaggcataaacgctgcatgtaaatcgccgaaaacgaaatcgaccttcgttgctctgaaaccctaaaagaagctaaatctagcaatg

SEQ ID NO: 17047 - DNA, 3003 bp, Unknown; identical to SEQ ID NO: 17046
  misc_feature (1)..( 3003): 2750-1469P.txt file - cDNA_ID_1807632; gDNA_ID_1620687; Annot_ID_164656

SEQ ID NO: 17048 - DNA, 3003 bp, Unknown; identical to SEQ ID NO: 17046
  misc_feature (1)..( 3003): 2750-1469P.txt file - cDNA_ID_1807632; gDNA_ID_2926209; Annot_ID_141913

SEQ ID NO: 17049 - DNA, 3003 bp, Unknown; identical to SEQ ID NO: 17046
  misc_feature (1)..( 3003): 2750-1469P.txt file - cDNA_ID_1807632; gDNA_ID_2926209; Annot_ID_202496

SEQ ID NO: 17050 - DNA, 3000 bp, Unknown; identical to SEQ ID NO: 3787
  misc_feature (1)..( 3000): 2750-1469P.txt file - cDNA_ID_1807640; gDNA_ID_1620665; Annot_ID_48034

SEQ ID NO: 17051 - DNA, 3000 bp, Unknown; identical to SEQ ID NO: 3787
  misc_feature (1)..( 3000): 2750-1469P.txt file - cDNA_ID_1807640; gDNA_ID_1620665; Annot_ID_163895

SEQ ID NO: 17052 - DNA, 3000 bp, Unknown; identical to SEQ ID NO: 3787
  misc_feature (1)..( 3000): 2750-1469P.txt file - cDNA_ID_1807640; gDNA_ID_2926196; Annot_ID_141295

SEQ ID NO: 17053 - DNA, 3000 bp, Unknown; identical to SEQ ID NO: 3787
  misc_feature (1)..( 3000): 2750-1469P.txt file - cDNA_ID_1807640; gDNA_ID_2926196; Annot_ID_201480

SEQ ID NO: 17054 - DNA, 3000 bp, Unknown; identical to SEQ ID NO: 4379
  misc_feature (1)..( 3000): 2750-1469P.txt file - cDNA_ID_1807647; gDNA_ID_1620703; Annot_ID_48801

SEQ ID NO: 17055 - DNA, 3000 bp, Unknown; identical to SEQ ID NO: 4379
  misc_feature (1)..( 3000): 2750-1469P.txt file - cDNA_ID_1807647; gDNA_ID_1620703; Annot_ID_165144

SEQ ID NO: 17056 - DNA, 3000 bp, Unknown; identical to SEQ ID NO: 4379
  misc_feature (1)..( 3000): 2750-1469P.txt file - cDNA_ID_1807647; gDNA_ID_2926174; Annot_ID_140250

SEQ ID NO: 17057 - DNA, 3000 bp, Unknown; identical to SEQ ID NO: 4379
  misc_feature (1)..( 3000): 2750-1469P.txt file - cDNA_ID_1807647; gDNA_ID_2926174; Annot_ID_199725

SEQ ID NO: 17058 - DNA, 3000 bp, Unknown; identical to SEQ ID NO: 11557
  misc_feature (1)..( 3000): 2750-1469P.txt file - cDNA_ID_1807662; gDNA_ID_2214502; Annot_ID_133691

SEQ ID NO: 17059 - DNA, 3000 bp, Unknown; identical to SEQ ID NO: 11557
  misc_feature (1)..( 3000): 2750-1469P.txt file - cDNA_ID_1807662; gDNA_ID_2214502; Annot_ID_184025

SEQ ID NO: 17060 - DNA, 3003 bp, Unknown
  misc_feature (1)..( 3003): 2750-1469P.txt file - cDNA_ID_1807666; gDNA_ID_2214600; Annot_ID_135550
aatattattttctccgaatataatttagttaacattattttcctgaaaaaaaaaaaaccaaaattaagcccaactatacaatcgtaagaccaaacgaccaaatacataactatatcgtctaacaacaagtatataagatttgctatgagcagcttattctattttgcaattggacttctttaaaatgacattcatttcagattgtaaagagttggtattggattggatctaacaaaggagactaattggaccttcacggccttcctaagaagtaagaacggtgatacaaaatttcaccatgcttgaagacatgacaacaaaaagtccaaaagacaagttatccaaatcagaaaaacaaaacccaaaagacatgacaaccctttaattattttaaatcacaaatgtttgtggaataaaatcaatcatatgtaaaatcatacaaaattagctaattactgttttgggtttggatgcacaagtataagattttctattggctgcttactattttgaaactggacttcttcaaattggcattcatttcatattgtaaagagttgttattggatctaacaaaggaaactaatttgaccttcctttgttaatagtaaaaaaaattaattaatctaaacgccaaatagaacacaaaaacaatatataaatacaaaagtaaattagaattaattgttgattctatatagaataagaataaataaatatatatatacataataaaaagtttggaactcttggttctagaaccggccaaatagttggttttcaacattgaccggaaaagaacgaattcataaaattttgggattttaaactctacccaaactaataaaatagcatgtttaccagttcaattagtcggacaaaaaccggtaatgaaacaccaatagagtagggatgtgtcgtgtgtgaaatatttcaggttgtagtttttgttagtttgtcaagttgatttatggatatattaattcacgtggtcaattatttacgtcgaagatgtgatagatatttagtaagccggactataggaacaggagtgtggaagccacacgtggaatagcggtggagaataatttggatggatggcggtttaggccgaaccggggaaggttttgtttcttagacatcgtgagaagtcatacgttatgtccttaagattttaaaagctacaagagccactagctatttttcaattccaatatgataaattaattctttgtaagctaaattttattttaatttctaaataaatgttaaattttggataattaaccctaaagccataaacaattcagaaaaaaataacaaaattataacaagcctattcattgaaattcatatatgtacaaaaaagctataaatgttcatagtataaatgttttatgtactataatatgtatggatatgcaaattcatataaacataaaaaatagcagtgattaatatgagatatttagttcataatttgaatgtttatagtataaattttgttaattttttatataattaaaaatgacaatatatgaattttaataaccaaacataatgttgtcacctcgatgtatactaaattgcaggaagatgatacatataagttgaaaacgattgtgcgaataatctatagaaaagaaatataaattagaaaaaaaaagacaatgctaacgttttggtgtggacaagaaagaagacgttgcgacttgcgatgatgtttgaacctgcaggtagtttgattcatgtctctagaataacgctaaagaacacctatggctctgataacatattattaatatttacatttattttatttaaagtagtccattcataattgcacacgactaaatgctacacaacttgtcttagttgtttaatcaagatatttttaccttatgatattttgtgaaaaatgatacctataaaatccctaatgagcacatcaaccttttttaccttattatattttgtgaaaaatgatatctataaaatccctaatgaccacatcaaccttgaatcttctctaataaaccttttttccaaacacgcactaaaccaaaaattaacatctcaagaggaaaccatttaaaaaaaaaacagagttagattaagatcaacaaatatagttgaaaagaacatatgttaagcaacattaccataaattcataattagtagtgattaaaacttaagaatactaaagtatgaatatgaaaattgttgtatttttttgtagtatgtaatatgcggaaacttggatgttatcctattcattgaaattcatatatgtatgtagttatcattttttaaatatattaaaaaattaaaaagtaataatactataaacattcaaattatgaaataaatatctcatactaatcactgctaattttttttccaatgtttctctttagtatttctctttagtatgggagtgacaaacttaatatgaaatctatctccctacatgcaaaaatcgaatctcttttattattaatgaagtgtatggtcggtgtcaataactaatatgtcatattttttacagactgttcagatatgataaaaatagtttttttccaaccaaatggttggtcttctgagtgtatttgaaaacgacattgaagaattaatatatttttttttaattttagttttttatagtacaaatattaaaacaaacaatcctaccatatcataacatttgtaaataacattttaagttttgttttgagttttaattaattttctatgacaaaaaaatgaagtcaatagactaagtgaatcatatagtataaataaacacaatttaaatagtttcaaataaatttagaaagaataaaacaaatagaaatcagaaggtgtctgtttcctcctcgcaacatacgatcaaagagaaacaacttgaccctttacattgctcaagagctcatctcttccctctacaaaaatggccgcacgtctccaaccttctcccaactccttcttccgccatcatcatg

SEQ ID NO: 17061 - DNA, 3003 bp, Unknown; identical to SEQ ID NO: 17060
  misc_feature (1)..( 3003): 2750-1469P.txt file - cDNA_ID_1807666; gDNA_ID_2214600; Annot_ID_187033

SEQ ID NO: 17062 - DNA, 3003 bp, Unknown
  misc_feature (1)..( 3003): 2750-1469P.txt file - cDNA_ID_1807670; gDNA_ID_2214519; Annot_ID_134030
gaaaagaaaagaaaaaacaatggcggatcagctcacagacgatcagatctcagaattcaaggaagccttcagcttattcgacaaggatggtgatggtatgcttcatcctccctttccctctatcatcgtaggtcttggccgtataattctgatttagtttctgcttgatttggttcccttttgatatgtatcgattaccgtggtgacggatccattgttcgtatcctcgcattgactcttttcgttttcgatgttccaaatcattattgaattcaaggatttgtttgtgcctttgttcaaattaaagatctatgtagttcggatgaaatatttgtgaatcagccctgtggtgttagtgatgattcatgttttcaattcgtattttgaccagtttttattgatttgttctgattctggatttgcatcgtagtaacaccaatctttgattactttgtgtaggttgcattaccacaaaggagcttggtaccgtgatgcgttccctcggtcaaaacccaaccgaagctgagcttcaggacatgatcaacgaagttgatgcggatggtaacggaaccattgatttcccggagttcttgaacctaatggctaggaaaatgaaggacactgactctgaggaagaactcaaggaagctttcagagttttcgacaaagaccagaacggtttcatctcagctgctgaattgagacatgtgatgactaacctcggcgagaagcttactgatgaagaagttgatgagatgattaaggaagctgatgttgatggtgatggtcagatcaactacgaagagtttgtgaaggttatgatggctaagtgaggattgaaacaacttcttcggctttctccttttttttttttgactaccttcttatgtaatttcataaagaatgttccttcgctttgttctaaaatttcattcatggctggtttttgctggttaaaaagacaggaatgttatgtgtttttaccttttgtctaaatgactcattgttcatgttattgacaggttcagaacctgattcttgaaatataacagtaatgagatcttcttctattatcttcgtattgatcattctctttagaatctgtcgtcgtatgtagaagcaagaagatgcttatcggttgcggtaagggtagggagcttaacccgagttggctcagacgatgaatgtaaaggagagaagagtatagaagttgtctcagacattccattgttgaagtcaagcacagtctctaagctgtaaatactctctccagctgcataaccacctaagagttgatacgatctgtctgattgatccatcgtcaaacacatatcttctgaacctatcatcaatcaattcagatttcttgagtgtcacaattaggttcaatttgctaaatggtttcctcaatcaaaaattcaaaattcaaaacttacaggcagcaagttcaagctgagtttgataaacgaattcaagaactgcggagacatctcgctcgaattcatgaaacggtccgtcttcgaaattcatcttccttagcttacatactccttctcctaactccatcatcgctcctttatggttcttcaaatcccaaaacactcactaaaattacctcaaacgtgaacgaaaacgagcaatagatggagttaaaaggagagtagatttacgttgttgaatagatggtgaaatccaacagcacattgaagaattccatggattaaggtacgagttggttcctctgcttgaatccaaagagcttcaagcgcgtcatgacttttgtaataatccctcttgttgaagagagtcactgcttcctcaaagctccaatattcttccttatcctcgtcactatcctcttcgtcttctccggcgtggtcgttgtatctgacgattgatcttcgactgaaacggacgcgtatggagctaaattttgtggaggctcgaatcgttgaagcagtaacagagattggagaagaagggattaaggagctgaagaaagaagatggaggaagcgtgaaagatgaaggaacctggaaatgtttcgaagaaactgccattatcaaagtcaaaggtcgagctctgtctctactgcatggttctggcttgcgccagttttgtggtcaccgttttaccaaaactttgtaattgggccactatttgggtccttattttttatataatttaggcccatattttatggcgaagccttcctcatatcatatggttgtctcattcgtaaattatttttctgcagtagctttctcttatgattatcaaatttgttgattatttagggcttttatgttgtcaaaaaaaaaaaattagggcttttgaatactcaagtttttccagacattaagttaaaacaaatactgtatattatttaatttttgttaaataacaaatttatgttatcgcattgcactgtgtgagatttatccggacaaaacacaatgatagaagcagcataaatcatatcaggatatgccttttattgtttatctttaataccttagaaatggtatcttatcataataacttaaaggatcattattatggtagtggtaaaacatcattattattcataagtaaagatttaaagaatgttcaattttttgagatttgtttttgaatttttgaattttggaaatgcagtaatatactatatagtcccaaaagtccgtatgtatcttcagttcaattgatggatcatatagaactatttagaatgatgatggtggcaagacaatgacctaattaaggacccttcctaaaaatttcaaactctatagcaactttttccccaccaatatatatataaatacaaaaatcaagtatttaacatctaaaataaaaaaaataaaaaaaataatctacactctctaccctctcatttcacgtatatataatccatcttttaggacagaacccaccgaaagctccacaaaccccattaattaacaaaaaaccaaaagaaggcggcgcaaacaaaagataatg

SEQ ID NO: 17063 - DNA, 3003 bp, Unknown; identical to SEQ ID NO: 17062
  misc_feature (1)..( 3003): 2750-1469P.txt file - cDNA_ID_1807670; gDNA_ID_2214519; Annot_ID_184555

SEQ ID NO: 17064 - DNA, 3003 bp, Unknown
  misc_feature (1)..( 3003): 2750-1469P.txt file - cDNA_ID_1807678; gDNA_ID_1621200; Annot_ID_57644
tctctcgccacgagctcaaaggctgcatcaacgacgccaagtgcatgcgtcaccttctcatcaacaaattcaaattctccccagattcaattctcatgcttaccggtacagagtatttctatcttttcaaatgcctatgtttgctactatactactattccttggattttgaatacaattttccttggcctcttcaatctgataaacacacattccaagttaccatttcgaaccactttgataaaaatgtgttgcattccatagctgactaactaattgttcatcatggatggttttcattctcagaggaagaaactgatccatatcgtatcccgaccaagcaaaacatgaggatggcattgtattggctcgtacagggatgcacagcaggcgactcacttgtcttccactactctggtcatggttcgcgtcaaagaaactacaacggtgatgaagttgatggctatgatgaaacactctgtcctctggattttgaaactcaggggatgattgtagacgatgagatcaacgcaaccattgtacgccctcttccacatggtgtcaagctccattcaattatcgatgcttgccatagtggtaccgttctggatttacccttcctatgcagaatgaacaggttattagtccctcaaccgcttctaaaagggatgttgcttacctctctcgttatatttaacatacatccatttttttttttaattgaaacagagctgggcagtatgtgtgggaggatcatcggcctaggtcaggtttgtggaaaggaactgctggtggagaagccatttcaattagtggatgtgatgatgatcagacttcggccgacacatcagtaagtagaacgactctaatcatacgtcttgctgttgtagttggttcctcctctcatgattaaaacacatacacaggcgctgtcgaagatcacgtctacgggtgctatgactttctgttttattcaagcaattgaacgcagcgcacaaggcacaacctatggaagccttctgaattctatgcgcaccacaataaggaatacagggaatgatggtggtggtagtggtggagttgtgacgactgtgctgagcatgcttctgacagggggaagtgcgattgggggattaagacaggtaaaattctttcttgctctcttgtgttgatacagatcgataaatgttttcttaaatctgttttttgacaggagcctcaactgactgcttgccaaacattcgatgtctatgcaaagcctttcactctctagtaaaggacaagtcactttttatgtatagcgagtgtgatttgagaatccgtccatataaccaccttttgtttcttatttttatttttctttcaaaagaataaaggaaaacattgatttggtgattcgataacaaaatgtgccatctattctttagtctttacaaacaagcagcaaatggtttgcctttcagaatcaaaatttaaggtgtttctcgaatagacagaaggaagagaagagaagtcccagaaagctgttcagaaggcgcatacaaatcatgtgtgcgttgctgctgcaaggaaaagcacttccgctgtagcagcctgttctttgtttgataccccggccgttatcttccagtacaaaggaggagtttttcacaccatcgctaaagagaagacaccaaaagaaggtacctttatgcaacctagccattcccactccaacctcggtatgcgacctgtttctgagcaccgacaacgcactgctatctctaaagagaatgtctgagaaagcgacttctggtgctgcatacttagagctgcagccgaggatatggccagttatggtaccaaaagtggggagttctacaccacagtttggggcaaacacctgagtgaagtcgtcttcagggtgttcacagctgagagtgttgttgacattgcaattcccctcgcagagctcaacatactggagggccatgcagccaagaccgggactctcatttagtttgcctagtttccgagctgttctgttctggttcaagatgctcaccatttcatgagctgagtttcctgcaaccattctaactaacacttagtccgcctaaaacgaatcaacataatataaactgtcgaatctggttctgactaaagaaagcgaactcgagattaaatcagagggagtggctgtaaattcaaaataaagcctggccaaatgctgaacgagaaatccaagtctatattcgcatatgttatgaggggataaagcaaggagttaccgtgcaatttggagctagctagcactgatgagagtgacagaaacagtaaaatcaactccaaaatgctgatttcgttcttcatatcgtgttttatcctctgaattcccagcgtaatagctcgagctggcggattttcgaaaaatcgagaaaaacaaaaaacagaaaaggagaaagtttttgaaaggagatgagcttgatggagatgttgactggtccctgaataaatgaaaaatgtgttgcattatttctattattgagaagaaaaaaaccaggcattttggttattgggctttgatttgatgttgggctctcaaccattgaaattgaatgaagaaagaaggaaagtacgtgacttgaatttcatttacttcattaaatgggcggcgttggggccggtggaggtgggccaatgacattgatgtgtaaacagaggtaaagccgaattttggctaaggcgaatcaatgcccattggctcctctccttacatatttgaagtttgaggtttccttccttttcttaaattaaatgttgctgtaacatttctactattgtaaaccggggctccaccaccatgtgcttcttcaacactgtatcatcagagcccacatggtcatgcctctatataatactttgtattattattattcttatgtcacattataaacaagtacctccaaattgcacttccttcaaacttattcgacagtagactagctcaagtacctttggatg

SEQ ID NO: 17065 - DNA, 3000 bp, Unknown; identical to SEQ ID NO: 12312
  misc_feature (1)..( 3000): 2750-1469P.txt file - cDNA_ID_1807682; gDNA_ID_2214543; Annot_ID_134500

SEQ ID NO: 17066 - DNA, 3000 bp, Unknown; identical to SEQ ID NO: 12312
  misc_feature (1)..( 3000): 2750-1469P.txt file - cDNA_ID_1807682; gDNA_ID_2214543; Annot_ID_185284

SEQ ID NO: 17067 - DNA, 3000 bp, Unknown; identical to SEQ ID NO: 4912
  misc_feature (1)..( 3000): 2750-1469P.txt file - cDNA_ID_1807690; gDNA_ID_1620745; Annot_ID_49697

SEQ ID NO: 17068 - DNA, 3000 bp, Unknown; identical to SEQ ID NO: 4917
  misc_feature (1)..( 3000): 2750-1469P.txt file - cDNA_ID_1807690; gDNA_ID_1620745; Annot_ID_166620

SEQ ID NO: 17069 - DNA, 3000 bp, Unknown; identical to SEQ ID NO: 3325
  misc_feature (1)..( 3000): 2750-1469P.txt file - cDNA_ID_1807702; gDNA_ID_1620732; Annot_ID_49419

SEQ ID NO: 17070 - DNA, 3000 bp, Unknown; identical to SEQ ID NO: 3325
  misc_feature (1)..( 3000): 2750-1469P.txt file - cDNA_ID_1807702; gDNA_ID_1620640; Annot_ID_47459

SEQ ID NO: 17071 - DNA, 3000 bp, Unknown; identical to SEQ ID NO: 3325
  misc_feature (1)..( 3000): 2750-1469P.txt file - cDNA_ID_1807702; gDNA_ID_2926178; Annot_ID_140415

SEQ ID NO: 17072 - DNA, 3000 bp, Unknown; identical to SEQ ID NO: 11953
  misc_feature (1)..( 3000): 2750-1469P.txt file - cDNA_ID_1807705; gDNA_ID_2214524; Annot_ID_134122

SEQ ID NO: 17073 - DNA, 3000 bp, Unknown; identical to SEQ ID NO: 11953
  misc_feature (1)..( 3000): 2750-1469P.txt file - cDNA_ID_1807705; gDNA_ID_2214524; Annot_ID_184694

SEQ ID NO: 17074 - DNA, 3003 bp, Unknown
  misc_feature (1)..( 3003): 2750-1469P.txt file - cDNA_ID_1807713; gDNA_ID_2926145; Annot_ID_197690
cgtgagaaacttactattcgaatttaaatacttcacaaataaaactattttcgacaaaatcttaatccgatctcattgtctctcttaagattgatcaattcataaaaatgttttatttttatttttatttttaaaaagttttttttgcttttttctcttgaattttaaaaagcaaataatatagaaacaaaatattaataaaatgtaacttttaaaaattaaataaaattagcgcttcatcacctaaaaattaatagttaattgagctagtaaggataaaattggaattttatttttattttgagatcgtgagtatgaaaataaaaatatttaattgtttgtgtattaaattttacagtttcttttgtatgtgtattgtttttccaaccgaaaagttttggatattaaacgttcaaatataaaatagttggagttttgtttgggaattttcactagtaataaagcagaagttttctaatttattatatccatatataactttactgtcattatggtactcttctatgttagattgtatatattataatgaatcaattacggatttgccattctcttaattgtatttatgaatttttcctttttgaatagtttgtaaattttgccctttttgaggttacaaaaatgtgatttaagatgcgttttactcgttatatttaggtttagtctttggtataagtatgtattttaaaaaaacgtaacgaggtacatttttaagtgttaaaaataataaatccgtaagattttaggaaaaatatcattttcacaagatttttataaaaaaggcaaaatcaataataatctctattattttttgtacatacatataataaaataataagctctttctagctatattatgaatactcctacgagcaataaaataataaaaggcacgttatttacactcgaaaacaagctaatttagaggtggtcgagagcagatatcatgattgttttttttaatgtatgtaatccgttcatttgtgtcatcattattcatttttatattatttatccgctttgttaaatatattttgtctgatgtgaattaattgttgagcggtaaaccaatcatgaagttatctttaaattaatgtgttattgataaaaaaaaaagtaaattagttgtaaattttttttttcgtcaatttgttgtatacttaatctgatgaatatttatgattttcagaaatgtatgtttgtatcttctaatttttacccacaaaattcaatgtcctacgcatatgatggaatttaaccaaatacaagtagctagttagtgattctgatttgttatttttttttatgtaggtctaagttataaatcaattttcttcgaacctaaaatatatttttaaccagctctcagtatcatgtttaaagctattaaaaaatttaagtagacgattcgacaactacgctcaccctaaaaaaataatcagatgaaaaaaatctaaatctaaactatcaaacatattaaaaacaattatgaagactattcgacaactacgctcactataaaaattaatcagaagagaaaaatgtagatctaaactatcaaacatatatgtgatggaattaaaattgggtaaagccgtaaaagaggtttcataattttggattagtgatttggtaacttaaattgacttgtcaagggagtcttaactctatcatgaatcaagataaacactctccacaccaaaaacaatatatatatatatatatatatagataacataaaaagtcctaaaatatgttaaaaggcaaggagggccaaccatatccatctctcgcccacttttgctaatatgtcactctctctcatatcctaaccttccaataacatttcagaaccatcctcggtacatcatttatatgatttctctattatccttaataatcaactttaaaaaaataaaagaataaaattaagatatcatttgttttaccagataaaccgatccgattcaaactaaaccatattgatatttataatccaaaaacctcaaatccaaaactataccaaatcatttattatatcattttattttatctgaatataccatttttcataacacagaaattttaaaaacctaaacgaaaatcgaaacgaatcagaaccgaaatccgaattgaaccatttgataattaaccaataatcgtcccactaaaatccaagtgtataaaaaatcagtttaatatttatatgtagaatatgttctagagaattatagtataagattctacattttttttttttttttgaacaaagaaaaaaggagaaattttagggaaaggagtagaaatcttgtgagtcacagttgatttggttcaactggattgggataatatttcaagtggaaagaaataaataaaagttgtggtggaaaattattccaataaatctcgtcgtgtgaattgaatcattattcctagtgtcaatcttcttcacctctctctatcaacctccaatttcttcttcttctttttttttagataacttatttttattttatttttctttgatttttcactttaagacaaaaataataattttatatttctaccaaaaataaataataattataatttaataagagataaatattttttcaaactgtaacctaaacaataaataaattaaaagagaaattaatgcaaatattgctatatttttgggttattacttagagactactttgtccaaaattaggaaaaatctttttgggtgaataattcccaaaagtatagttgcattttgccagagaggcactcagagagagagagagatattcgtaaagataagctttttttttttttttgccttctcatcaaaaatctttttttttttgttgtctttcttctcgagagagataagtgaccaaagggtttcgatttctggaaatagtttgaataaaaaagtaatttttatgtgattattggcaaagaaaagttttagttttttttagtttgtgagagatg

SEQ ID NO: 17075 - DNA, 3003 bp, Unknown; identical to SEQ ID NO: 17074
  misc_feature (1)..( 3003): 2750-1469P.txt file - cDNA_ID_1807713; gDNA_ID_1621187; Annot_ID_57445

SEQ ID NO: 17076 - DNA, 3003 bp, Unknown; identical to SEQ ID NO: 17074
  misc_feature (1)..( 3003): 2750-1469P.txt file - cDNA_ID_1807713; gDNA_ID_1621187; Annot_ID_174489

SEQ ID NO: 17077 - DNA, 3000 bp, Unknown; identical to SEQ ID NO: 7013
  misc_feature (1)..( 3000): 2750-1469P.txt file - cDNA_ID_1807717; gDNA_ID_1621122; Annot_ID_56310

SEQ ID NO: 17078 - DNA, 3000 bp, Unknown; identical to SEQ ID NO: 13138
  misc_feature (1)..( 3000): 2750-1469P.txt file - cDNA_ID_1807721; gDNA_ID_2214600; Annot_ID_135557

SEQ ID NO: 17079 - DNA, 3000 bp, Unknown; identical to SEQ ID NO: 7391
  misc_feature (1)..( 3000): 2750-1469P.txt file - cDNA_ID_1807729; gDNA_ID_1621143; Annot_ID_56682

SEQ ID NO: 17080 - DNA, 3000 bp, Unknown; identical to SEQ ID NO: 7391
  misc_feature (1)..( 3000): 2750-1469P.txt file - cDNA_ID_1807729; gDNA_ID_1621143; Annot_ID_172917

SEQ ID NO: 17081 - DNA, 326 bp, Unknown; identical to SEQ ID NO: 12762
  misc_feature (1)..( 326): 2750-1469P.txt file - cDNA_ID_1807736; gDNA_ID_2214570; Annot_ID_135061

SEQ ID NO: 17082 - DNA, 326 bp, Unknown; identical to SEQ ID NO: 12762
  misc_feature (1)..( 326): 2750-1469P.txt file - cDNA_ID_1807736; gDNA_ID_2214570; Annot_ID_186157

SEQ ID NO: 17083 - DNA, 3000 bp, Unknown; identical to SEQ ID NO: 4179
  misc_feature (1)..( 3000): 2750-1469P.txt file - cDNA_ID_1807740; gDNA_ID_1620689; Annot_ID_48531

SEQ ID NO: 17084 - DNA, 3000 bp, Unknown; identical to SEQ ID NO: 4179
  misc_feature (1)..( 3000): 2750-1469P.txt file - cDNA_ID_1807740; gDNA_ID_1620689; Annot_ID_164695

SEQ ID NO: 17085 - DNA, 3000 bp, Unknown; identical to SEQ ID NO: 4179
  misc_feature (1)..( 3000): 2750-1469P.txt file - cDNA_ID_1807740; gDNA_ID_2926182; Annot_ID_140631

SEQ ID NO: 17086 - DNA, 3000 bp, Unknown; identical to SEQ ID NO: 4179
  misc_feature (1)..( 3000): 2750-1469P.txt file - cDNA_ID_1807740; gDNA_ID_2926182; Annot_ID_200358

SEQ ID NO: 17087 - DNA, 3000 bp, Unknown; identical to SEQ ID NO: 3050
  misc_feature (1)..( 3000): 2750-1469P.txt file - cDNA_ID_1807744; gDNA_ID_1620622; Annot_ID_47063

SEQ ID NO: 17088 - DNA, 3000 bp, Unknown; identical to SEQ ID NO: 3050
  misc_feature (1)..( 3000): 2750-1469P.txt file - cDNA_ID_1807744; gDNA_ID_1620622; Annot_ID_162354

SEQ ID NO: 17089 - DNA, 3003 bp, Unknown
  misc_feature (1)..( 3003): 2750-1469P.txt file - cDNA_ID_1807744; gDNA_ID_2926201; Annot_ID_141514
tttaatcgtgtataaaactatccttcttccaccttctcattatattcatttccatctttctaatttatctttccatttccgagccgttgagaattttttctgagagataatttaacaaatttcttcttcttcttctgtttctgaaccaccaaatctgcctttctcaattagctatgggcgtcgctgttctaaatccccaggattgcttgaaagatccattctctcacatgaaacaacatcgtaatcctagcgcatgtcccaacaggcagaagaagacggtctccaacaaccgtacacgccggagtcctcctcgtagtcaatcctccagatcttcttctcctcctgtagcgccgccgcttcctcctcctcgtgcggctgtctctgctttcgttccaaagggaacccttaagaagagtcttagcaataccgttgccgttagccaggtgagaatccttaagcgcggcgaagaaatccccaaggagacttcagatctggttgtggaaatgtcagatctgggatctactcgtcggattggaccagatccgggtttgattccgggtcagatccgtttatctggccgcaaatcgaaatcagcaccgttttacgccggtcctgtgaccatgacctcgccgcctcctagcgatgtcccgcttccagctttcttcacgaagaaggcaacaaatgatctcatcaggatccttcgcctagacatcgcctgacggtgtctgtcaccgatcatttttgattttttaaaaatctccgatgatccaaatggttaccaaagtgttacatttccgtattaccgatcgtccgattccgcctgaaaaccggagatctgcaacaaaatataatctccagacgatgatgaatctagaagatgaagaaacacacatcttcgttatgaaccgtttcgaatcttcccttattttttcaaggggcaagatcgaaatatcttcttaacaggtcttagtttctcttcttagggtttagtgtttgtgtaggagtatttgtgtatagactttttactagttttcgtatctttctctgtatcttcgggtttttaatttctgcttaatcgtcaggttctctgggtaaatcataggttggcttttgtcatttcgtctgtgtcttaagtggattagttggtcgtaagacaagttatagagatgtgtttacgggtaaagatgaagcttaggttttgatgtaatcttcttcggtttttcaattctctgtatttctctatctttttagtttatcaagtttaagttttatttggggtttcttcttcgtttgggtatctttctgtttttccttaaggttcttcgtttgtttccgtgtcgtctaggttaagtcaaagtaaagagatgtaattactggttagatgaatcttaaggtttccatgtaaccgtttgtactacaattctctgtacttctctatctttaatattatcgaatttaagttttatctttggcgtttaaagttcagtatttggacatttgatacacatcacatgagattaaataagatggttgacccaataaaaccataaacaaatgaacatacgatgggtttacgcaaatgatctcaatgaattgtaccttggaaaattatggaatttgtgactagtatatgttgagttgtattattgattagcaattctgtaatctcaaacaactcggagaatatggcgcacaaaaaaataacttgcacagatgtttcccgatgtaagagcgacagttttgatatgtgtgtgtgtgtgacaggcaaagacattgacaaattgatataatctctagtccagcgtataaacaaatcactaatgccaatttgatatcagaagttgaaagtgactttctctaagttgataagttgatattgtgctatctcaattatcatcattacaatgggtttaatagcaatggatgttattattgtttaggtgggtaattgatatttcttgctaagggtgtcattatctcaatatcatataccgtatgccacttgtttggtccaagttgtataagatataatgttctctcacaattagacagcccaccttagcccgatttaaggcccatgtatatatctcttcaaggctggacagctggggcttgaattctaaaaaatttcttagtcataaatctgctgcatttagagattcttctataaaagaaacataaggtaagatatataatcattaatgacagaaactcttttttactcatccacaatgtagcaacttgcctttacctattaacggcggtacacagtcgtcaattgttcattggtcaagcttagcaaaaccattgagccacgtcagtttttttttgttggttcctttgcaatactctacgaacatcataattgatgagagcataggaagattttctacctaacaagggaaaaaaaagcaaaacgaaaaagacgaaccctaaagtaattttgcctatttttaaaaatttattcttttaatttcagcattatgccaaatttataattttgcgagagaattttaatttggggaatctttacatatttttcacataccctttccccacacaactcagtttttgggtcccacctttcctttcttattttttttgtcatcacaaacaaaccattgagataaaaaaattaaatccaaatctgcaatccatccagccacagacccgatcttgcattttcgcatcgacattaaaatggcaataaaataaatcattttttttttcttttcgaaaagaacaaagaaaaatgagaaaaggaagaaaaaagagatagaggaataatttagagggagcctcgtatataacaccattcccatctctctctctctctttctcctctatttcgatatttcttcttcttctccttctctctcccttcgtcattatctctcttctgtaacttctctttctttccctctctctctttcgctgcttctcttctgtatctgattcccttttttacgggagctgtagatttgagtagtgtaagcgtcgatg

SEQ ID NO: 17090 - DNA, 3003 bp, Unknown; identical to SEQ ID NO: 17089
  misc_feature (1)..( 3003): 2750-1469P.txt file - cDNA_ID_1807744; gDNA_ID_2926201; Annot_ID_201856

SEQ ID NO: 17091 - DNA, 3003 bp, Unknown
  misc_feature (1)..( 3003): 2750-1469P.txt file - cDNA_ID_1807746; gDNA_ID_1621130; Annot_ID_56469
acaaacactttgtttcttttaactaactcagattcggtgagacatatcacagaagctcgcaaaaggctgtctgctagctttattcagtctttacgtttaacaatctatttttaattattcactataagatggcttcttttaaaaactttcttttttcctttatggaagctttagccctttgaacactcccttttttttcttagttatataggtaacccacttatgatcacagttaattccatgtagatcgtattaaagtagtctattgactaaatcactaaaatatcaattaatgaattaatgttgtatgatttgttatcgtttatacgaaagtaaagaaaaacaagaaaacatgacttggattaagtaactctatgttctgtcttaatacaggagagcagggaattcaagacgaccaccaggaagagcataagtacggttaaagcttgggtaagaagcagaaagagagagagaagtataattgttggcaaattaatataggtcttgtattgctgctagattctcttttcctttcatttgggatcgaatcttttaaatatgcgcaaaatatttgtgaccctacaattctgttttttttttttttaaatgtttgttttgttcctatagtgaagaaatattgagctagttaggggaggttttaaaaaaatgaagacactgattattaaaaggatttcaagaaagaaaagaagtatacgtacatgcaatgcaatcctgttttctcacgcattgcacgacttatattgggattatttctaatttgatccatcatcaaataacgtttagatgctttatttccttactcacattgtttattgggtacttgcactaaatgatcattaacatttattaagttaggtaaataattgtgtactccttttatgtgcaaaaacacaaaatgggtactattttattactaacatgctttcttatcaaatagcagtaccctatgttgttctaaataacatgctaattcaattcagatttggcagacaaaataacatggtattttagagagagcgcgcacaagtgtgtttttttaaaacaaatgaaaacatcataattacgtacctgattgacccttgtgtatatattcacgattagaaattgtagattaccaaaacactcgcacaaaatggttctatatatagacaatatatgattcttatcacatgttttgaatgaaaaaaaaagaattaagatggattttttttttgtaaagaacaattgtactttgaaagagtcttatccaatcattaaaaaaaatgtcgaatccattatttattgatgtattctgaaagcatatattcttccaaaggggcaaataaaagagatgtcgacaaagattggatacataagatattaataatttataaatgcaatggcatatatatatgatataatttgagctctaaatgccgaaatttgaaaaggagaatgtgtgtaatggttcttacaaataaaggagaccacaatgcttctttgtgttatgcttttttcccatcttttattcttttgttcttttgtggggttaactctaccactactcattttctcgctcttttttcacttattttccatatatttctaatttctaaattaattttactaatcttgaaatacaaaaaactattagacttagcttactaatttactacaccaccaacatacacactacgcaacatatgctaatatgtattaaaatgaaaagaacaaaaaatgagaaccggtattacaatttatcgtagtgtatgactagttatgagatgagaaggttcttgaaaaaagaattactaaccaaataatgtagattaattatttgcaaataaagaaaagcaagaatatatagcaaaatcatgagtttacggttcggctctataaaatcttctacaaccatccacgataaacttgatacatgaaatgtcttcttccattaaaacatgagttccacatataaaatggtttacaagtaactctcgaacatatgtgcatggtaaagcaaatatataataccattattttttctgtcttaattaagcaaaattaaacatatatataatatatgatccctacatgttcacttttaaagttcacaatttcaagagtttgaatatctttaatttgaattattaccaaacgcattagacagactaaacagagacataataatcaatcaacttctttttgtcttttttttttttttttttttgggcttccagtcttcataatcaaaagtaactgaagaccagtcttaaagctggaacatttgaactaaacatatacgactgctcctatcgctctagaaattttaattaacaattattcatagttacttaattacaaagacaacaataaaggtgaacgaataaattaaaggaaaattatgaaaatagtttaatttgtatgaaacttttcatccgcataccaaatgtcatatactcttatcttacatttttctcttgggacatatttttggagcgaacactttcgcatgtacgataaggttcagtggtctgagcttcgactacgttaaaatgatgattagggtttactaatttggaattaggagttacatttaaggttaaaagtttatgagtttcaagtttcaacgaagctttaaagtttaaacgatggttaaagttttatgattatggtgggctatgttatagttctttcaatttcgttgggccaaatgggctaaacgattaacgaccctatgaatgggcctgaaaaaatgaaagccacgtgtcagacccccacaatggactttgactcggtgcggctgccggagagaataattaattatcaactccgatgaaaagaaaacaaatacaaagttccaacaaaaatcgaaattcacaatttctcttcttctaaatccatggagtgatgatgatgatagatagattgaatccaaacacaaaccggatccgagattaaaaacaatccggattgtttatatttactttagatcggagaaagatg

SEQ ID NO: 17092 - DNA, 3000 bp, Unknown; identical to SEQ ID NO: 11273
  misc_feature (1)..( 3000): 2750-1469P.txt file - cDNA_ID_1807750; gDNA_ID_2214487; Annot_ID_133376

SEQ ID NO: 17093 - DNA, 3003 bp, Unknown
  misc_feature (1)..( 3003): 2750-1469P.txt file - cDNA_ID_1807757; gDNA_ID_2214535; Annot_ID_134361
agactgtggctttagtcgcctcaagctccttcaacacctctagcgtttcgcgttctttaacaattagttctctttgtagctcgaaagcttgtgctttgagtcccatgatatcaggttcttggatattttcctgccaccaatatcagaaagacaaactttaccttacatatcctaatttgaacaactatgatactttaatatatgacacacaacacaaaatcttcactgatgtgatgaatcaggttgcaaaatgtaggtaatgaacaattccttaaaatgaggtttaagttttcttcatcattgatgctaaacatgaaagggaaatcaagtatcgtcatcatcattatcttcatcataatgtcgtttaaggcataaaccaaacatcattaaacatcaatttcaaagtttgatgatatctttttgttgtttcagacaacaacagccaaacacgcttaatctaacaacagtaaaaccctaaatcatatttttcagagagaatttaaagaaaagactgcaagtgagggagatagagaaagggaaagaaacctgagaagcatctgggagtttattgagagaaggtctccagaaaccaaaaccgccgaaacgagtggctgcttctctcactgactcgaacggagccgaagtgtctatctcaggcttctcagctcgaccattcgatagatccgagtcagggtttacagtgcccggttctggaaattcggccattgaagcagaagaagacgagtcttcgatggggaagaagagagtgaagtgaaaaagagagagagagagagattagggaggaaccaaagtcttgtgtttgtgaattgaaactggtttgataaagacgtgtcggaacacgcgccacggtcgtctcgtgaacagtgttagaaagtcatgttttttttttgtctcaatttaaatttgaaattagcaaaaatttcgcgtcttttcccctcttggatcatataattgctaatctcaattcttaaattgggattaaggaataacctttaaacggctaaaactatctgaatgttttgatattttatcagattgttaaaaagtgatcaaaaaaaaacaaagcaatatatttatcttcacatgcctattcaatttaagtgacgtgttgttatttatcacaattaactgacagaattttgtaaaacgttaccatgtgactgtttttttttttttcttatcacaaacagaaaattatttccgttccaatctttcttgccatggaagaagctatgttagaaaatgagctctagcttaccggtaatagggaaaccagtcttgacaaccatcgagaagagggtgacaacgatacatgagcgatggatagcacataagaataaaatgatgaagggttcaagcaaaaaaaaacttggtaagagtttgaacccaaaacatcagatttgtcatcttttaggtgagacaaaaaagtcttgataacaatgtgtgccggacacagtttttttatctagaagattaaactttgatttttctcacctaaaaggtgacaataaagtgagctatgtagagtgtcgtcaattatttgtccatcttcttgtttgtttttttaatttcttctttttgtccaaccattagactaatattttcattttgtttctttctcttttgtcttcgctttcatcttgttttcaggaatgactaatgcattcgaatgttttttcttttccttttatgtgcattcctactttatgaaacaattagttttcaattcaatttcggtgatagttttagccatttctgtccactttggttgtcttagttagtttattgatgagaagaaaagacaaggagcaaaagtattagattaggttaaccaaaaagtctagcatatggactcgtatgaaattgatatttgtatgtattaggtaactttgttttctcagagattattgagcaaaatgtttataatttatcgattagtgaaggtggcttcggaggctacatttgcgttatttacgggaaatggaaggacaaaacacaagtgctttctagtttgaaaataaaatcaaagaaatattggttaaaatagaacacactttataatcactgatcacataatattacattattatgacttatacgatttacaaaaacaattcaggtcaaaggcactcgtcgatataacataaagttggacattgaaactgagaatacgttggcgttcgcggatttaacatatatttttttgtccatatttttataccgtatcgtctcaacaattctatcatcaacaagaacatgtcactgataaaaacatgtttatcgcagcatgatgatattatacatagacatatcttacgtttaacatgaatcaacaaccatatctttagcgaccctacacgaattcaaatttgatatcaatttcgtacaatttctatcttactactttgaaatttgtgtcgtttataattatttatcaaactcaatgatgcgtattctattctcagaaggagtcatgtatgtcttgaaataaatctagaaagaagtataggcgaaattgagaaccatctcttcatagaactatacgtcgattcatagtaagtaaaaagtctacatctgcaataaaaatgtatggagttagctagttttgaaaaatactatatacaattgaagtgaacatgaaaatcttaattgtttaattaaagcgcgcgaaaaaacacaataataagttaaattatgtgcacataatagatagcattgtcaaaaggatcggttaatttatgatttcactaatttttattatccttcaaccactctagtaaaatacatattgccttaaaacaaaacctactagtcttaaaacgaaaaaagaaaaaaaaaaaaaaaaaaactcaatacctaataatcaaaaatagtactcaagcttccctatataatgttccttcttggctttagctaattcaccatatacccacactcacaagtcacaactcaaataatctttgtcttcctcctacaaatatg

SEQ ID NO: 17094 - DNA, 3003 bp, Unknown; identical to SEQ ID NO: 17093
  misc_feature (1)..( 3003): 2750-1469P.txt file - cDNA_ID_1807757; gDNA_ID_2214535; Annot_ID_185061

SEQ ID NO: 17095 - DNA, 3000 bp, Unknown; identical to SEQ ID NO: 6454
  misc_feature (1)..( 3000): 2750-1469P.txt file - cDNA_ID_1807767; gDNA_ID_1621094; Annot_ID_55602

SEQ ID NO: 17096 - DNA, 3000 bp, Unknown; identical to SEQ ID NO: 6454
  misc_feature (1)..( 3000): 2750-1469P.txt file - cDNA_ID_1807767; gDNA_ID_1621094; Annot_ID_170863

SEQ ID NO: 17097 - DNA, 3000 bp, Unknown; identical to SEQ ID NO: 6454
  misc_feature (1)..( 3000): 2750-1469P.txt file - cDNA_ID_1807767; gDNA_ID_2926162; Annot_ID_139750

SEQ ID NO: 17098 - DNA, 3000 bp, Unknown; identical to SEQ ID NO: 6454
  misc_feature (1)..( 3000): 2750-1469P.txt file - cDNA_ID_1807767; gDNA_ID_2926162; Annot_ID_198820

SEQ ID NO: 17099 - DNA, 3003 bp, Unknown
  misc_feature (1)..( 3003): 2750-1469P.txt file - cDNA_ID_1807774; gDNA_ID_1620712; Annot_ID_49032
gtgggataggaatggtgagtaagttgaccccaaaataaaaaagtacaacgtgaaaaagagtttatttggttattgtaatgttatttcacggatcctaataaaaaattgaaatgataattaaaaaacatttatattaaaatcacaaaataaattgatgtactaaaaaacatttatattaaaagtatcaaaccaaaactttctataaaaaggagatggtaaatttttcttgaattttatttgaaggtgaacgcagcagcagcaacacaacaaatgatagatgtgttcagtgtgaaagggattgtgcattttgggattgctggaaatataaacaactcgatgtccataggagatgtgagcatccctaagcaaatcacgaatgctggcttgtgggattggctggtatatacaaaatttacatgcacaagttttgttattgataaataattgcttctccttcatattgtctgatgattttagttctgatcgtcaaacagaatccaggcaaagcaaaaggaaatgaggatgtagcgtacttagatgtcgggaactataatgttccacaaggaaacaataagttaggaactattggatacagttacgaggaattatattcagtcagtggtcacatcaattcaccaaagaaagtgttttggattaatacaactcaagagtggcttcatcttgcagctgatcttgaggttgttaagaatgacatatgattagattagaatatattttttctaacaaaagactttattccatggttgatggttgttgtatgaatgtagaagatggagctattgcagtgtgtgaatgcaagtctgtgtcttccaaataaacccaaagtagtagttggattaaaagcagccactgctgacatatttgtggataatgcagcctatagaaatttcttatacgatacttttggagtttcctcctcagacatggagagttctgctgtggccatggtaattattcacgtttctaacattgtgattcattcctttcactccattttttttttcattgaactttcacttaattttgtttgcatgtgttttggattcgaccagacttgcgtgtcaaatgggtatcccctaattgtgataagaggattatcagatttagcaggagtaggagataacactgttcgaaagtttggatctttggctgccactaacactgccaaagctgttttagagttcattaaaaagctcccaccgtcataattcctacgtgtaacctatcattatggatgtttgaatctgtattttccctagtttttctacgtacgttaaaaataaaattaataaaatctgtttttcttttctttaatcagcttcttgcatggaacactttaatttcagccttcaaaactagaattacaggtctctttgttcatatcaacgatcccgtgacagcaacaattcaaatatgggcaaaaatattttgtgtttataaaatagtatttttttggaaatttgtagagcgtgtattatcgtccacaaaatttattttagtggtattgtaggatatttgtcaaaaaaaaaaaaagtgcgcagccagcagcccctcatgtttaatgcatacacaaaggttatatcagctagtctagagacgagaagcacgtggaaagaagaaactatcaagttggacttggatgatatatatatatatgcagctgtggatttgaatcgtaaaccaaccaaccaatcagatggaccacactctttctcttcttccatttctcttcatcataatcatttcttccttccatgttttgcctgtttcacccacaccttcacacaaactaaaatccgccactaccatcagaaaactcaaccgcggaggaccttacatcggtctcgtgacggtcattgcgaccgaagaaaatgcttttctccgcagtgtcgatttcagacctgaccctactcatcccttcttggatctctctggtatccacttgaatcaaataactttttcaagttttctaacgtaaatagagtcttttgttttgcttaaatggaagttagtacttttgagatgaaaatattagtagtttctgatttaataaccttatgtatacagggagacgttttcgaatagggaagattcatggaaagaaggttgtgtatgttagatgtgggagaggaatggtgagtaaccacaacattaaattatccaaaacagaacaaaaaaaactacaacaaaataaagaagtttatatggctcttatttcttatctaaaagtagtatacaaaaagggaatgggcacacaccaaaatatcctgatccgtatacaataattgaaatgatgaattgatgataaaacttatattaagttttaatatagttagtaagtagtatagtatattaaagatgcatattagtaaatgtaatccatatgaaaagtagcaaacgaacacttatattaagacaaaagaattgcaggtgaatggagcagcagcaacacaacagatgatagatgtgttcaatgtgaaagggatagtgcattttgggattgctggaaatatgaacaactcaatgtccataggagatgtgagcatccctaagcaaattacgaatgctggcttgtgggattggctggtaagtataatagttacacaagtttgattgcttcttcttcttcatattgtctgatccatgcttttggttctgagtaaaacagaatccagacaaagtaaagggagttgaggatatagcgtacttagatgtcggaaactataatgttccaaaaggagatggcgacaatgagttagggagtattggatataattacgagcaactatattcagtcactggtcacatcaatgcacctcagaatgtgttttggatcaacacaactcaagagtggcttcatcttgcagctgatctagaggttgttaagagctatacaacatactgattagattatagattataaacaataacggttccattgttaacaacggtttttcgtgtggtatacggtggcagaagatg

SEQ ID NO: 17100 - DNA, 3003 bp, Unknown; identical to SEQ ID NO: 17099
  misc_feature (1)..( 3003): 2750-1469P.txt file - cDNA_ID_1807774; gDNA_ID_2926185; Annot_ID_140746

SEQ ID NO: 17101 - DNA, 3003 bp, Unknown
  misc_feature (1)..( 3003): 2750-1469P.txt file - cDNA_ID_1807786; gDNA_ID_1620642; Annot_ID_47516
tctaagacatgcgagtattctgttaatataattattactttttatataatagagaactccaattgttgaaacagattaaaacaaagatttggtgtagaagatgatcaaatattacatgaaagaaaattctgtagttcattcttgtatatttttataagatatttagttatattatttatttgaatgaagaaagaaacaaacaaaaatgtaatattttgagatgtctaaggagtattaagatgtccagactaactttaaatttttctccgaagatttattttgagattttttttcgttttaatatttttgatcagtttatgacgataataaaaataaacgaaacttttcttaaatctatagttgggaaagtgattgattttcgtaaaaaccattttccaactaatataacatatgataggaaagtagtcagaaaaatcttacaaaaatgtgcatggaaatggtggaatttacaggtagcattacacataatcatttcatcattaaatgctaagtttatccaccatattggcttggttacagagtctaaatagaaattgcaagagttacatcctagttttgtcaaactttggactacactattacagtttcgcctcttgtaaagaaaaatcgttgaagagaatttcgatgaccagttgtgaatgtcctggactaagttaaagatctcacttctagttgtagtcccggtaataaatacgaaatataggattgtattgtattgtatgttttctgactcgtatattacaagtatatgtaaggatttcttggaaattgaaatcactgggaaacagaatattagggatctccaaaccctaggacattgattccttcgagattactggtcttcttcgttgtaggcaaaaaaaaatggtatttattgttaatttgtatttttctgatcatgcttggacaaaaaaaatgactcgttcaggttagaatttaaaattaagtgtatgcgtcatatgacacaatgctctcgtcatcttgtgtctaacagagtgaaataaagaacgaacaattgtttgtatacacacaaatacaatcgcacctacatgtgcacatattttattacgcttatctatagaaaactgtttgatacattttttcattctaaagtaaatacacaatccaaaaaatactatgtcatgttaagaatgtttagtatatctatttattttaggacaaggaacatttaacatatagtaaacagttttaacaaaatttctctgatttgaaatatattttttatattatcagtaaaaagaaaactgtaaaggtaattatagtcgttgattaagattatacttagttttttaaaataacatgttttaaaaattttgcaaaataagtttttttttttacatgtctcataatttttgtcctcagtttatgttaaaaatattttgttattttgatactaacatcttccatacgctgaaaacatctttgagaatatttttcaaaacacaatatacaaaaatccacagtgactttattccacgatgaaatgatatcaagacatatatgttcttacctttacctttcaacgaaaatgagagaaaaaatatatatatatagtatcacttttagaaaatgtttttttttgctaattaattattatataaaaatgttgagagcaacttgatcatatatgtaataaagtcgcagtgaaaaaaaaaatgtaataaagtcgcataccgacgttgtgactcgtttttatgtaattgattagttaagtacagagttcgttagatgtatttgcattgttacaattacagaaaaccctacgcaacacaattcagtactttttacgtcagcaaaaatagaatctttcgttgaaaataataccagaatcgttcttgtctttaattttcttacctttttgtaattggatatgatttttgactatggaattattattattttattctataaaattatagtttttattattggaatcatttataaatgctattactcagtgttctttaaagtccatactaacgaattcaagtacttatttaacaaaacaaaacaaacaaatactaataaactaaaagtacaaacattactatgttattaaaaaaagcatatagctgcgtgattttaaaggtatatgtgacatataatacaacgacgccgtcgtattttattgaatttttttgtcacttttaattagtatacagtgaggaaataagcaaaaagaaagaaaaaaatattgttggctcggctagtacctataaataaaaacactagtatttggcccaggatataatcattgcaagtttagaactagttagctaatctaaaccgttagatcaaagaagcaatcttactaatcagaaaaacaaaattcaacaagttacaagaatgaaaaaaatagggataaaaaaaaggataattcatttacattcgatcaaaaggcgaatgcatagatcatagatgcaagacacttgtgagttgtgatataaccaaaaatttatttaattatatgtaatatatattcgaaaaatttatacaccgtatataaaatattcgaataatccttttctttgatttaaaaatattttctgcttgttttctcaactcatgtattaatttaaataataaaagtagctaccacctttctctgccccactttaagataaagctaaagcatggaaaaaagcatgggaaaaaagtaaatatatgatatacaatcaaataaatctaaaaaaatagaaaagaaaaattaaaggaacgaaaaaaagagggaggaaaaagacaaaattaaaaaacaaaaataaaaattccaaaaaaattaacatcacatgttatcaaatgagatcaaaatttaagttagttttgagttttctctctctttctcttctctaaaactacttaagctaaagaatcaaacacttctcaacgtttctccaaagcctctgattagtaaacacataaagagatctatagagagagagagagtagagataaaaggtgatg

SEQ ID NO: 17102 - DNA, 3003 bp, Unknown; identical to SEQ ID NO: 17101
  misc_feature (1)..( 3003): 2750-1469P.txt file - cDNA_ID_1807786; gDNA_ID_1971821; Annot_ID_176191

SEQ ID NO: 17103 - DNA, 3003 bp, Unknown; identical to SEQ ID NO: 17101
  misc_feature (1)..( 3003): 2750-1469P.txt file - cDNA_ID_1807786; gDNA_ID_2926195; Annot_ID_141226

SEQ ID NO: 17104 - DNA, 3003 bp, Unknown
  misc_feature (1)..( 3003): 2750-1469P.txt file - cDNA_ID_1807798; gDNA_ID_1621169; Annot_ID_57227
tacctgttttcggaatgataagcactcctatgttgaatcgaccatattttccccaaatacgggttccaaaccacgagcctagtgttgctgacctccttactcatcattaacaataagccatcgcaatgaaagacttgagatatctcaacatgattaaacttagctatttgctttatagatggctcaactacttcgacgttgttattttggattccatgaagatcaaatctcattgaacaaaccttagatccctttatcatgaaaccagcaaactgttgtctagcttctgctttacatatgacccgagctttagataaatcgttccatctcaatgctcctagagatattattgaaaccctagacagtatctcttctaccatatcctccggaagatcggatatcatcatcgtcgtcttcaaatgaaaatcagggttttttgacctatcatgtatttcctacagtttttcgatttgattatatatatgcgcataactttgggcccataactctaattttcttcttgcttcccgtttgtgtataacacaccttatatgccctcatatttcataaggaacattttgtagaagattattacaagattcacgaagagaaagaataaagacacaagacaaaacaaaaagatgcacctctctaaaacatctataaaacgctctatataatgtttatgtgtttgcgactgtgataaccacatctggcacatgcacatctcctagaagatctctactctaaaactcgacatacctctcccggtcatggtctcgtgcactgtctcggccacaatccatatggaattgcattgagaaagaaacccaagacataagtccaagtaaattgtttgaagctttgatcccaaattattttcacaattattacaaaaatttaacaattacaatcattctatagtactagaaatcttatttttagtccacgggagcaagttgcagtttgtcgcttctccttatgaacttattgcgaattttcttttctttttttaccctggaactttgctctaattcattgttcgataatagtaataattctcaacatcacaactacaaggggaaagcccggtacaagaaactcagtaagatttgttgatccataataattggtagtcttcaatcatatgatataaatgtatttataaaaaaccataaatgaccaatctttttcaaatgaaaacagaagaaatgaacgagaagaagatgatgaaagaaacaaataacgtactgtaaacaagactggctaataatctcgatcttttcttttcctcgataaccgagagttcttggccttgggtgattttcactaaactaggagcataagagactggtaggttagatggtatgaaagttactccgaaatccaatattctcaagtatccattatctccaatgacgtaagctatgttgcacctcatttgtttagataagcttctaccaaacactacggctaatttcttctcttggtcaatgaagaaactcgtaactaaaaacttaattctaaaatgagtaaatgttaagaagttgctccatgacacagcattgggttcaatcttagttgtcacccatatctccatctcagattcttcccaattattaaataacaccacaagatgttcctctctaacagaagatagagctacattatcatcaaacttagcaatttgaaatgggagaggaagacacgacacaaatctctctcttgtaaaatcaaaagaaagtaagcaaccagctagtccttcccctattttctcacctcgatagaaaaaataagtatttccctttattgacatgtcacgtacataaatatttgtatgcaagtcgggaatgatatcaagaaccttccatgaatcagatttaaaatcgtagatttcacaatttttcctattatacatcaagattttgtggttacggttgttgtcgtatccgagagcatacctatatttgaaatgctcagtatctctgcattggatcaacctggtttgtcccaaatacggattccaaaccacgatcttggaatctacctcatcagttaccaataacaacaagccatcgctgtaataaacttgaaataactcaagttcaataaatttatttatcttatttatagagagctcaactagttcaacgtcttcattttggatttcattaagatcaagtctcattgaacaaaccgtagattcgttcacatatctcgtgaaccctgtaaactgttgatttgcatctcctttacatacaatacgatctttggataaaccgttccatcgtttgcaagtagatctcactgctcctagagatgttatcggaaccctagacaaaatctcttctaccaaatcattcggaagatcagacatcatcatcgtcattttttcaaatgaaaaattagggttgaactatcacgtcttttccacacttttaagatttattctgagattgttcacagcataatatggattaatcttctaggaagccttatattgtgtaacagattaattgtacagatgcctttcatttgcagacttattaaagatgaaatgattaataagagcagatttgttctttttaatcatcagtcatcatcaatgtcaatattaataagccatcaaatcaatgaaagacttggaaaaatatctcaaacttacttacaccttcccacacacatttacggtcgattatatatgcaatagatgggccctaattttgggcccataacacttatcacaaaaggcccatcactttaaatcttcttcataattcactgctctcttcctcactacacagttttctattcttctagaatttgcttatgcagacattttcaatttcactcctccgtcactcttctccgttcctccgtcacaccgcgatttttcacggcggagttggagttagattcaaattccttcgcagcttttctcctctctcagcaagacgagataatcccgatgtctccagaaaaccccaaccgagcaaaaatatg

SEQ ID NO: 17105 - DNA, 3003 bp, Unknown
  misc_feature (1)..( 3003): 2750-1469P.txt file - cDNA_ID_1807798; gDNA_ID_1621169; Annot_ID_173923
aagataagtaattccctttattgaatgatatgcaacctttacgaaaattgttacccgagtggggaatgatattaagaaccctccacgaatgagatttaaaatcgtagatttcgtaatttataaaatacctcaagattttgtggtttacggttgttatcatatccgagagtatacctgttttcggaatgataagcactcctatgttgaatcgaccatattttccccaaatacgggttccaaaccacgagcctagtgttgctgacctccttactcatcattaacaataagccatcgcaatgaaagacttgagatatctcaacatgattaaacttagctatttgctttatagatggctcaactacttcgacgttgttattttggattccatgaagatcaaatctcattgaacaaaccttagatccctttatcatgaaaccagcaaactgttgtctagcttctgctttacatatgacccgagctttagataaatcgttccatctcaatgctcctagagatattattgaaaccctagacagtatctcttctaccatatcctccggaagatcggatatcatcatcgtcgtcttcaaatgaaaatcagggttttttgacctatcatgtatttcctacagtttttcgatttgattatatatatgcgcataactttgggcccataactctaattttcttcttgcttcccgtttgtgtataacacaccttatatgccctcatatttcataaggaacattttgtagaagattattacaagattcacgaagagaaagaataaagacacaagacaaaacaaaaagatgcacctctctaaaacatctataaaacgctctatataatgtttatgtgtttgcgactgtgataaccacatctggcacatgcacatctcctagaagatctctactctaaaactcgacatacctctcccggtcatggtctcgtgcactgtctcggccacaatccatatggaattgcattgagaaagaaacccaagacataagtccaagtaaattgtttgaagctttgatcccaaattattttcacaattattacaaaaatttaacaattacaatcattctatagtactagaaatcttatttttagtccacgggagcaagttgcagtttgtcgcttctccttatgaacttattgcgaattttcttttctttttttaccctggaactttgctctaattcattgttcgataatagtaataattctcaacatcacaactacaaggggaaagcccggtacaagaaactcagtaagatttgttgatccataataattggtagtcttcaatcatatgatataaatgtatttataaaaaaccataaatgaccaatctttttcaaatgaaaacagaagaaatgaacgagaagaagatgatgaaagaaacaaataacgtactgtaaacaagactggctaataatctcgatcttttcttttcctcgataaccgagagttcttggccttgggtgattttcactaaactaggagcataagagactggtaggttagatggtatgaaagttactccgaaatccaatattctcaagtatccattatctccaatgacgtaagctatgttgcacctcatttgtttagataagcttctaccaaacactacggctaatttcttctcttggtcaatgaagaaactcgtaactaaaaacttaattctaaaatgagtaaatgttaagaagttgctccatgacacagcattgggttcaatcttagttgtcacccatatctccatctcagattcttcccaattattaaataacaccacaagatgttcctctctaacagaagatagagctacattatcatcaaacttagcaatttgaaatgggagaggaagacacgacacaaatctctctcttgtaaaatcaaaagaaagtaagcaaccagctagtccttcccctattttctcacctcgatagaaaaaataagtatttccctttattgacatgtcacgtacataaatatttgtatgcaagtcgggaatgatatcaagaaccttccatgaatcagatttaaaatcgtagatttcacaatttttcctattatacatcaagattttgtggttacggttgttgtcgtatccgagagcatacctatatttgaaatgctcagtatctctgcattggatcaacctggtttgtcccaaatacggattccaaaccacgatcttggaatctacctcatcagttaccaataacaacaagccatcgctgtaataaacttgaaataactcaagttcaataaatttatttatcttatttatagagagctcaactagttcaacgtcttcattttggatttcattaagatcaagtctcattgaacaaaccgtagattcgttcacatatctcgtgaaccctgtaaactgttgatttgcatctcctttacatacaatacgatctttggataaaccgttccatcgtttgcaagtagatctcactgctcctagagatgttatcggaaccctagacaaaatctcttctaccaaatcattcggaagatcagacatcatcatcgtcattttttcaaatgaaaaattagggttgaactatcacgtcttttccacacttttaagatttattctgagattgttcacagcataatatggattaatcttctaggaagccttatattgtgtaacagattaattgtacagatgcctttcatttgcagacttattaaagatgaaatgattaataagagcagatttgttctttttaatcatcagtcatcatcaatgtcaatattaataagccatcaaatcaatgaaagacttggaaaaatatctcaaacttacttacaccttcccacacacatttacggtcgattatatatgcaatagatgggccctaattttgggcccataacacttatcacaaaaggcccatcactttaaatcttcttcataattcactgctctcttcctcactacacagttttctattcttctagaatttgcttatg

SEQ ID NO: 17106 - DNA, 3000 bp, Unknown; identical to SEQ ID NO: 3660
  misc_feature (1)..( 3000): 2750-1469P.txt file - cDNA_ID_1807806; gDNA_ID_1620655; Annot_ID_47836

SEQ ID NO: 17107 - DNA, 3000 bp, Unknown; identical to SEQ ID NO: 3660
  misc_feature (1)..( 3000): 2750-1469P.txt file - cDNA_ID_1807806; gDNA_ID_1620655; Annot_ID_163623

SEQ ID NO: 17108 - DNA, 3003 bp, Unknown
  misc_feature (1)..( 3003): 2750-1469P.txt file - cDNA_ID_1807806; gDNA_ID_2926209; Annot_ID_141884
cagttgcttcgagtaacattgcaatggctactctgggtgttggatccagtgaacggatcaactggaaacgaaagtaagtttttttcctttgttcattttttttttggaaaattcaagttctttaaatagcttgtgttgaattaggggtgtagtaacatgtgcactgacgattctgacgagttctcaagcgatacttatcgtgtggtcgaaacgagctgggaagtatgagtatagtgttacaaccgccaactttttggtgagtttcatagatgcattaaattgagtgtactgtatgtgttgcaagcgaggccagttttgtgtggtttttaatctctgaatcatgatgatatagtgattttgtttactctttggtggacatcaggttgaactctgaaatgtgcgttatctcttcttgctttgacaaggatatggaaaaatgaaggtgttactgacgacaacaggtagcgaattattttgttactcaatctgttgttatcagttttagagaaatttccatgagttttatatctaattcctctttgaacatgaccgtagatagctcactgaatttttcgttactgatacccaaatcctgtctctataacaggttaagcacaacatttgatgaagttaaagtctttccaattcccgcagcattgtatctttttaagaatttgttacaggtggggtgtcctgagtttgttatttttttctgtggctttggtcgatttttcttaacttatgtttttcatgttaatatgtctctaactacttgttgtgtcaccttttacgtggcagtattatatttttgcatatgtagacgccccaggctatcagatattgaagaacttgaacatcataagtaccggtgtcttgtacagaattatactgaagagaaagtaggtttttttaatcatccaaatggatttaacagcttccaatgaatagttgttctggaaatccatcagtgagctgtttcagtttccttcaattcttgcaagtgtgaactgctttgcttactatcttctctaacagattgagcgagattcagtgggcgggtttcattctattgtgttgcggatgcaccactgctcagttgaattcaaagtaaaactttacccttgattttcatatgaattctattaaattgagctttaacgattcttgcatatgatgcgtaacacacaaaagctcatatccggttcctgctctgtgaactttcaggtctctgctgatttttccaatatatgtctcatatttgaaattgcttttgcagttctgatcgtgttcttcagacatctcttcctggctggactatggcaattgtaagctgttagccccctttgcaagctaatatcaactaagagttgtgaagcagctttcatgtccacatcaattaatataatcactcgttgtttctaggtcatggctcttttaagtggtttcgccggagtgtacacagaggtgggatattaggactgtatactgtaaatactcaaagctgatttggtttcttttctctgtgtgtgtgtcaacactaatacagtataattggttccttccattgataaattaacttatgatatataaagcttataaaggttttgctttccattttggcaggccattattaaaaagcgaccttcaaggaatataaatgtacagaacttctggctatatgtctttgggatggctttcaatgctgttgctatagtgatccaagattttgatgccgttgcaaataagtaaatccaaaaaccatcctctttcatacttgctataaaatgccagaacatactagtactacacctctatatcctcggtgtcctatagttccattatattatactaactgcgtattatgctgttatgactcttctgttctggtattgaatgggatggttttccattttcaggggattcttccatggttactccttcatcacattactcatgattcttaaccatgctctcaggtaaaagctgcttaagaggccagacttttttcttaactctgatgtaagttagtgaagctaacaccaaaacactcttttattgtttgttttgaagtggcattgctgtgtcgatggtgatgaaatatgcagacaatatcgtgaaggtagtgtatttgcaaaaaaatgcacattcattcccctgtcactttttgacacagggtttaactttatcaatcggtatgtaggtttattcgacatcagtggcgatgcttctcaccgcagttgtctctgtattcctcttcaattttcatctttccttagccttcttcttgggttcaacgtaagttaaccacatttgcttttgctaatacaatcatctcaacttttgatatcaaaagtagccaccaacatttatgcacataagagccactgactgcgtaaaaggtgtctcataaaatgcattactgtgtttgcactttgcagggtcgtctctgtttcagtatatttacattccgcagggaagctacgatagtaaagatcttcacacttacatctaccaagaaaacaccattattctagtacagagataaagcttttgaacgattacgattttgtttttcgtgtaggtatattcacatttgtgcttctgtattgatttttttttccgtctcatgaaaccttctattctcatttgtacgataccaaaacttatcaagaatagttacaatttcagaaattttaagcctctacgtaattttttttataaaacacccctccggatattttaataatcattaactgtctgaacgtgaagctgtatgttgaaaattgcacgcttagaacaaaaggcttaaccaaaaatgatccaaccgtgaagactcggagaccggcgtacttagtttttaaattaatcattgtctttgcttcaaagccaatcctatgagactttgtcttgtctccaacttgtatataagctctattcctctactctgtttcacaccatctcttcttcttcttcctcttctctcagtgaacaaatttggctatg

SEQ ID NO: 17109 - DNA, 3003 bp, Unknown; identical to SEQ ID NO: 17108
  misc_feature (1)..( 3003): 2750-1469P.txt file - cDNA_ID_1807806; gDNA_ID_2926209; Annot_ID_202467

SEQ ID NO: 17110 - DNA, 3003 bp, Unknown
  misc_feature (1)..( 3003): 2750-1469P.txt file - cDNA_ID_1807822; gDNA_ID_1620742; Annot_ID_49627
aagcaggtacattcatcttttatgttctattaagcaggcatcattacccagagaatcaccaacaattggtaactcagtactgattctaattctgtttctggtggcaggatgtcacaaatgttttcatgctaaacttgtataactattttggaggcaagagcacaaagctgcctgaaatggtaattcagatatgggatatgtaaaatcgaattgatctccctatttctctccatagttatgactatgtctatttttggtgttaaaacctaaaagtgttctaatccctttttctttaatatctataacttttgcagtgcaaatatattgtatagttgtttatcttacaaagcaattaacttaatcttacaggaacagcttcagcttcctgtaaaccagagggctcgtaatttgcttgcagatgttgaaactaaggtgtcttttctgttttatttatttaagaagtcacgtttgcttgtatttaacgtgattgttcgcactattctaacaaaataaatggaaacttcttctcttgctgataacaatatttcgtccaatctgtttcagggtctgaaaaacttggctgaagagctgtttaaaagcaatggcacacaggtgacaaccacagtgaaacaaatcagtttgagtaaagtgaatgtgaagtcgaggccattgttatcaaggtttggtcactttgcttcactgtctctgtcttgtgagtttcatatgttgatataatagaggtgtgataaaggaaatgtgaatgcagggctgcttcagctaagtgttgatatggaagttttcctgatggcggtttggcttgcgggatgtatataacaaaactcttacttatacaaatggtctcgtgagccgtagaatgctctcttacatctattcgttggtttggcttttttcccccaaaacttgggtcttatgatattttggtttgcactttggaggtttttcctcgaattggagtttgtttattgacatgtgtagtgtccacttttgaactttgacgcaatttaaaataaagtacatgtggggaataattatattatacctaatcatgtgatgcatgtttgcaataaaagtggttaataggttaaaagtttatggtgtttccatagatgtatgtacagagttaaataatcaactatttctggatcaatacatttaaaagagggtgataaataactgggatgccgcgacatgacgggcaagtggagcataactgaaaccacttgtcaatgcaaaaagcgtggaactgatgtccacaatgtggcaacactctcacaatgtcactaaccatgtaatcctcaagacatatcacacatctactattacataacctcacaccacattcctgcgagaatgttaatttcgggagagacttcaaaatctccttcttcaagggttttgttttctgcctaaacctgcagttgcagtagtggaatagagacggtgtaaacgatcattccgattaagagatagagtggtaatgaatctggtgacttcaagaaaccaacgatggtcaggtcagggtcattaggcaaatctgctgctacggcggctgcaggggaaatagcgaagggagaaggaggggatgtcatgagtgtaagagtcctcgaagagatttgctgaaagaagcttccgacgaagagaagattacgatgttatcagggcgtacgtatgtatgtgtgtttgaccttttcttgttacagtctaaaataccttagattattgagaattatgtatagtttatatttcttaatggcgaatgcatacattctttgtttatggatttttttttataggagtttacttccaataccaatttgaagaaggaattgtgtatattcctattcattgagggaaaaacaatgtattatttttatacatattaggatcatgcataaaattgtgtatttgaattacgttaactctctattgaccattgttgagtagagtgacaccaatagagaattttctttttcatttaaaacctctcttcttaatgttatcttcttttgagtccttgttctcattaactttgtttttcttaagcaaattataaattattttttcttttattataaaacgacgtctattatattctataaggaagccaaaccaacacaagtctaagaatgttttgtttgtacgcagaaaaatgttagactacagttttattattcataattcatagtactaaagtaattttttgaagaatgattttctttaataaggtatcatcaacatatactaccaaaaatatttaatttatcccactaattttgaaggcatcacgattaataatacgtgcttaaaatcttaattccgtaataatgctacacttttgagaaatttgttaagtttatgatagtttgtatgatagccatcttttgactgatctagtcggacataaccaaacacccatttactgttattatcatctggaaacccaatgagaagataagagttttatgaagcacacaagtgagaaacaaaaataaggaacatatttggttggatctatcattaaaccaaagatagataagagggaaacgaaactggagtaataatcaaaatacaatctaccatgtagatagggaaaatactcggtggttttagttgaaaaatgtaaatagttgaaagttatcaaaattttctaatatttaaacaccaaagttgaccaagatggcaaaaaggcaagaaacaagaaaatgaaagacaactatcgttatgatacaaatttgaccaaaatgaagatatgataatgtttccaaaattctcgatgcaagtagttcgctcaattatttgataagaatgatttccccactagctcaataaaaaacaattaatccttgtacgcaagttatcatagtgaagcattgacactgtgacccttggcattataaattacgaatttaagataaagaagagaagaatcaagcaaaagttgtgtttctcataaagatctcaaagatattcctactacacatg

SEQ ID NO: 17111 - DNA, 3003 bp, Unknown; identical to SEQ ID NO: 17110
  misc_feature (1)..( 3003): 2750-1469P.txt file - cDNA_ID_1807822; gDNA_ID_1620742; Annot_ID_166488

SEQ ID NO: 17112 - DNA, 3003 bp, Unknown
  misc_feature (1)..( 3003): 2750-1469P.txt file - cDNA_ID_1807834; gDNA_ID_2214548; Annot_ID_134626
tattattaatttttaaaaataataaccaatcaaaatcaatatataagatttgatatctaaattttaattaatttaatttaatgaaaaaataaatacattattaattttcaaaaaagtaacttattaaaatcaacaaattagatttgatatctaaattatcatattaattttttattaattattataattcacttctcatctttatatgattctatttttgcgaaaaaataatatcatcattataaaaaaaaaattagagtttttttgcatatgccataatttgaatttttaaaaacgaatataaactgttcaatacatgaaaaaatattataacgggtgaaaaatagatttaagaaaactttctactgagtaacaggtcataatttgaaatatttatattcaatttcatacatattatattgaaaatttataatcttatatactataataattaataacatattagatttttttatgtgtatgatgtgattcaatttttaatacaagctggaaaatcctagaattgacgggtttagatcgatattaatacaagatggtatactacaggtgaaactcttaaattaacaatcaaactacaagtgtataatcttaaacactaaacaatatagataatatcaacaaaacatatacaactcacagtttactatacatttaaaatcaaataaaataatatcatatatttttaaatcatctttacaataaaagtttttagtttaactaaaatataagcgtacctgcggtatactgcaggttaatatctagattatagggcttattggatctaaagacgggtcatcaaagatttcctaaactgaagcaaaatatactaaatactcaaatatctatctgttaccaaattataaacaaataagttcgtaaaacaatttaatattttatatacaaaatcaattaaatcttaatcacataaaaattagcacaaaaaaaaatattcaacaattaaaaaattatcaaatctctgtgttatataagttttgatactatattcgaataaagtgtaatataccttttcaatttgtattctttaattaatttaagctaactaatatatttgctaatcttatacctatcaaaaccgactatcgtttcttatctctatagtatttttgcaagacttttttgatggatttgggtaaaagtgcatttgagtcatatggtacattcccttattaaaaaaatatggtgtactcctatttattagctaaaatgtttagattataattcagagtcatatcattaataaaattaatattaataaaataaatggctttttggcaagacatatttggagtgacgggtttttgaatcaacattaacaaaaaagtaaaatataattaatccaccgtttcaatacgggttaaatctttaatttattattttttaagacccctaatattaaacatatcaaatcatcctaatttagaaaagattatataaaaccgaaaatattatgtggtatgtataatgttagtatataaaattaaactataaaatataaatgtattagagaatgatacaatttgcaaaacttttatatataaaataattcttaaattttaaaaattactctttaaaaaaaaataacgggacgggtaaagaaattatagaacaggttttattttggaattggattatatggtggatctatttgaatcaatatttataaaattttaaaatattattaatatgctgttttaataggggttacaacttcagttttttaaaaattgtctcatggattcgtggtataacgttatttaataataattataaactgtaaaatataaatattttatacaaaataaaatttgcaaattttaatatatattacttttaaaaaataaatcgtcctgcgatataccgcggattaaaatctagtataagatatttaagatgattaatcaagagcagattagcagaatgatctggattttgatttataaagatattttcatatttaataatcgaatttatatgttttcatacaaaatttcgagtttgcttatattaaactggatccaataaaaaaatctgtgtttttatttgggcccattgaaatggcccacttctagttccgtacatgttcgaatcaaaactagtcattataaatttaaatgaactatataacactttttttgttgaaaatttatttttgtcttaatcttttgtatatttttatagctagaagcctacaatactttccatataataatatttcttaagttttattatcttatataagttttaggatttgaagacatacatatagacctatttatgtttcgtttaggtgcttcctttttcaatgtctaatatgaatatcttgtttcaacaaaaaaaaatattttttttgttgtattagtttattatatggagacacttatgaaaaacttgttgatatatcttttttaaagcaaaaaaataaaaaataaaaacgtggataacaaaagaattttttaaatatctgatgtgaaaaaagagaaaattgtttcttttcaaactgcgtttgaagaattgaacagtttctcgacattctatcaaaaccgccttaattttcgatgaacttttaatacgaggctttgttttgtttattgcagcagtactgttggggccggtttattaatgggccgtctcaatactacaaattgtcttgtagggactaatttttgaaataataaattacagggtgaataccatgaatagataatgaaatgaaggttcattatgtaaattaatattttacttctgatttcgtttcaacgcatcaacaagatttttgtgaaacaaaaacccatttttatcaaaaaccaaaccaaacccatagggttgtgttgttgctgttctgttcctatcgaccacggcggcgacgaggcggagaagaccgacaaagcggagaagccagcttcgaaaccctctagcatttattttttaaaagcgaaattcattttaagggttttggtcatg

SEQ ID NO: 17113 - DNA, 3003 bp, Unknown
  misc_feature (1)..( 3003): 2750-1469P.txt file - cDNA_ID_1807842; gDNA_ID_1621146; Annot_ID_56759
ttgtgttaggtcatttagttgaagtgatcgaaagcctaatatatcggtcagtggaaaagtaaaagagaataaaaatcacttccctaagtgagattgaaactcttttagagatgattttgatcatgaggaattgaatccagttgttcaggaaatggaaagaagagtaattttagagggatcctttcatctatcaatttttctgagtgtgagaaatggtgtattatgggagtcaagttttgtataatgttcttgtgtatttgtgagtatcctctagattgggctattctaagcatgagggctatgctttgctgccttacatattgtggcccacatgttgtggcgatgacactcacctacagtggttaattgacctagtttgctaggatgggaggtacgtctttgttggtggagaggtgtgtataatcaattttattgagacataatatttcgtcactatgtcaataaatctgtaataataaaaattttgtgacgattttgtgactaactgttaacggttgcaatacattcgtcacaaaattgttttctcggattgtttcatccgtggcaaagcgcgttgcgctcttaatctcttacctgcttgcggaaattcacccccaaaatatcattaaattcaatacaatgtgttaaacacgtatagtatatcgttagtattatttataggcttgcttataagtaaatttcgttacctatttatatacagataagccatacaaaatcttcactaatttacctaataattaattatttaccgcactatcatctactaagctttaaatgtgttaatttcttcatggaatcgagaagactttaagtatatgcagtttgcttataaacgcggccttgtaattttatgcatatgacatcttatcgtgcatgatctcagaaacagattaattggacatatagtaatgtgaatataaaacctaataaagaaaaaaaaatcaaatggtcacatttattgaaaataagatggtgacatgataatacaaagaagtttatctatttgtctatttagcgacctgtttatttaattcgtttgggcttcgttcaattccgcaggctatctttcacccgaagcaactaaactatagtattaaaagtatatatggaatagcttgtaattaggttttataattgctgctaattattactattatcgttattgaatattcaactgaatcgggccatgattagcgatgaggtacatgacaatgaaacatgcatgttcctcaaattccaattgatatgatggaagaaaacaatacaatgcccgacaaatttgaaaatataaattttaaaacaatgttaacaaaggaaataatataagaagaaaatgccaaaatagtggtttttgacgaaaatgtatgagttctaagaaccaatgaaaaataaaataagaagttatctttatagtaacgggaaattcaactaaaacatgttttgatgagatttaagagtttcgattcgagtttaattttattcctatttaaaacttagaaaattctacactattttctctaagttttctactttacactaactctttctatcaatcttcagcaatttattgattgtctcttttatccccctatactgaatatatgagcgatagttgactggtactaagatgtatttagacataaaactgactttgaatatgagaactggcccacctcctttgattatagatccacccctgtatatatgtttttttaataaagcaaccacgtctccgttccatgcatgtaaaacactcatctacaaatgttttaaatacaagacctttttcttacaataataaaacacatatcttatgattggtaacccttagaaaaaggaaaattaatggtgccaaaaaaaggtatgccaaaaacgttttagtgatatgaaaaagaaaaaaaaatgcaaattctatcaaatttggttaaaaaataattggaatttctaatgcaataaaaatcatgtcattgttattacttcaaatatcccaaattcagaaattattcatccttatatttatttatttcgtaaaaaataatctatagtaataagttcatcatagaaatagtctgatatccaagacagaagatcaatacaatcatagtaaaacttagagtgtatacttaaaatttagagagtcaaaattcatcactgtttaataataataatattaaccatgtaatcatctagttggtattcattgacgaaaaaacaaaagtaattgaaatcaaaatcaagaccgatacagaacatggagacacggaagaaaaaatgatgaatccattgttggtgtctattttcctttgttccctcaaaatattctaatgttggtggggttttttccgccatgcaaaaaacgtattgcattttattaaaaaaaaaatccctttttttttctctttactaacccgaaaatttatgtttggatagcaaaaacattccttttttacagttagaaataaataaataaaatcgtcaaatttgttaggaatttttcttctaaaaaaacaagcatacaattccgggtaatgagaaaatgtcacagatcttcggctataaatagaggagtagctagagagcatcttcttatatcaactaaactttgtattcatttccaagtatcactctaaatcatctttttcgaattcgcctcccaaggtccgtctagaaaactaaatcatcttttcgtttttgtatagatcatatcattatgatgatctcgatctctttttctgtccactcgtctacatgtgaccgctattatagttttcgatatccggttttttatgttaactccttcatatagctagattcaacgcatgtttttttatttgtaaagccggaattaattcgaccagtttcttgtatttgtttcttagagtctcttaggaatcggacatctaataatactcaactcaatcagataatcattttcttatctaaattctttgtgttattgtgttattggaacaaaaagatatg

SEQ ID NO: 17114 - DNA, 3003 bp, Unknown; identical to SEQ ID NO: 17113
  misc_feature (1)..( 3003): 2750-1469P.txt file - cDNA_ID_1807842; gDNA_ID_1621146; Annot_ID_173047

SEQ ID NO: 17115 - DNA, 3003 bp, Unknown
  misc_feature (1)..( 3003): 2750-1469P.txt file - cDNA_ID_1807848; gDNA_ID_2214520; Annot_ID_134046
ctagtgaccccaacaataatgtacttgtgagagtttgtcttcgagtttcatgaataagaagagaaggcaagagaagactctcaaggaatcagaaggtttgattcaaagttagaaaacttcaggcccatacgcaagaagcccatctcgtacaagtcgttgaagaggaagcacgcctgcagcattgtttccttttaaaggtttgtgtcgttctgtcctttgtagaagtgttcgaacaaaacaggaaaaacaggggacaaagaatcaaagatgcagagagtagatgagatggaatggcgtgtttggttgaatgtagttaatgagttgtgtatgtacaagctccagtaagagccaactgtatataaggactgattctagtggattccgggacaacaagtttcccggcgtgagtagggtttcacactgagacctgaacacgtaaaaactctctcttgcactttactttctctgcaatttctctgtttctactctgcttcaagtctttctttctaagtttctttcacacgagtgtaatggagagaaagagaggggtttatggtgataaaggtcgctactttaacacccaaaatctccacagtacttttgtcactatctgaattaaacttggttcttataacatgctaaatttcacaggcttctgactacaaccaattgagtattactctaggtccctttacactgcgatgaaactcgagaagagatcgaaaactcaataacttactaagtaaatagcgtaaaatatacaaaacgactatcaaccattagtgtaagagagttttgggcttccataatctctccatagcatctttaaagtacgattacttcaatggatatattttgcttgtaatgttattaaattatcgtctcgcaggatcagataaaactcttatgaccccaagaacatcttacaaggttcatgactacatacccgtataaattttcatcactcaaaaaatacaacttattattgcacaccataaacaatgtgaaaactatatccatcacttaaacaagaaatggatatcttcattatgttggcttttgattctttttccttttccttacatatacgattaactctctggatgtactagaagtatcttccacttcaactatttctttaccatgtgacacattttgagtcttctccattttcttcaaaagaaccaacatcaatctcaatcaataccaacattatcatcttcaaaaaaaaaaaactatctttatacaaaccttcttatttaagcgctgtctagacattaactcatagaatttccgcatcatcatctcttcttccacctataaacacaaatgtatgtaagattgatttcttgctcatattattcatatcaaaagtacacaaagtttcatcaaacaaacctcaagtgtttggagttcttgagtcatcgttttacgagtttctaaaagcaattcagtttgcttctccaaatggctgttgatgtgctaacaacggtaaatcattatacgcaatgcacacacgaaaaataagcgtaaaactgaaaacaaagacgcactttaataaatcgtcggtatattcaggatccatgctccacaaattgatcaacttcaactttatactgatcttgtgctgatcacaagtggatcaaaatgtcatgagaatataatagataaaaattacgtacaaagcacagtttgattaagaaaaaggagagtcttttatcattgattcattcacacacatatcactagagaagatatgattctaataatctaaagggtatgatcacaaattcgaacagttaacagcaaaaacataattaaagaaccaaacaaaaaaaaaaaagcagatttagagaaagaatatcttagttagacaattcgtcgagcaactggtgtgcatagtctcgtgcctatcaaatttttcacaatgccacgatacttaaatcagaaacaatcaattacgtctaatatatagataaatcatcaaaaaggaagttcttttacgtaccctttcgtcaaatttaacgattcttataactttcaccaccataaacacttgacgattctcttcttctctctctcaatctcacccaaaatcaagtcctctcttctacaatggagttgactgggctaatgggccggtgtgactaggctaatgggccggtctattgtgacccaaagagaacaacaaagataaataaagtttcgatttttatgtttatcagctctatgtgcttctcattagatgagagactttcgctaatattttatgtgtttgttttgttttttgaatgcagaagtccataaactttatatactagcgtaagaatatcctaacttaacattctaataaacataacacttatataggttgaactacacttggtatttgatatttgtagttgtaattttcttttagggttctttgaaccactccacgattttgatccttgattaaattttaaagtatgttgaaaagtagaaaatatgtgtatcgagaaacgatctctgacttctctgatgttatgctttcactaaccatctttatagaaaacatacaaaaagatttgattcgttttgtcctttgaataaatgttaccaagaaattctgattaccgcaggaaagatgcaacttttggattcgggtttatattttaacataacaaatttacaacacaatgggcaaccaaaaagaggagttcatgtgccaagcacttagaaaaaaagaaaaaaaaaaaaaaaacaagcgtggtgtttgggttttcgagccttgagaggttggtgggtgtgttgttgtgaatctctaagttttctctgtaaattatatatttgtttacatgtatataaaacaatgtttctttttaaagtgacccttttaagctttcttgaaaacaagattgtgcatagatctcttctaagatccttagctttgttttctcttttgtgtctaaagatcttgaaagtcttgtgtgcaataacttattaaagagatagaaaaaaatg

SEQ ID NO: 17116 - DNA, 3003 bp, Unknown; identical to SEQ ID NO: 17115
  misc_feature (1)..( 3003): 2750-1469P.txt file - cDNA_ID_1807848; gDNA_ID_2214520; Annot_ID_184584

SEQ ID NO: 17117 - DNA, 3000 bp, Unknown; identical to SEQ ID NO: 12504
  misc_feature (1)..( 3000): 2750-1469P.txt file - cDNA_ID_1807856; gDNA_ID_2214555; Annot_ID_134756

SEQ ID NO: 17118 - DNA, 3000 bp, Unknown; identical to SEQ ID NO: 12504
  misc_feature (1)..( 3000): 2750-1469P.txt file - cDNA_ID_1807856; gDNA_ID_2214555; Annot_ID_185683

SEQ ID NO: 17119 - DNA, 3000 bp, Unknown; identical to SEQ ID NO: 13736
  misc_feature (1)..( 3000): 2750-1469P.txt file - cDNA_ID_1807870; gDNA_ID_2214647; Annot_ID_136381

SEQ ID NO: 17120 - DNA, 3000 bp, Unknown; identical to SEQ ID NO: 3950
  misc_feature (1)..( 3000): 2750-1469P.txt file - cDNA_ID_1807874; gDNA_ID_1620675; Annot_ID_48222

SEQ ID NO: 17121 - DNA, 3003 bp, Unknown
  misc_feature (1)..( 3003): 2750-1469P.txt file - cDNA_ID_1807874; gDNA_ID_2926203; Annot_ID_141581
gtccaattagcttctcccagtttggtgatgattttttccaggaaacttcagatcaaacgatggaatcaaaatcaagagtcaaaaaatcttgccgcagaagtagacgtcaaataacaacttttctaaaaatataaactaattttgtcgaacttgtttacttggctctttgaactcgatcgttgaatttcacaaagcatgattttctatatatagctcaatctatttttgctctgagttaagaatatttataacgagtgttgatgatgaaaatgaatacttgtaatgagaataaagattaaaacacaataaatttcttcaagtaacacgaacaaaagattattatcaactattttaattaatcatgaaatttgctacttgctttttagtttcttacgttcttgtctttctcgttcttagcgtctgtaaaggtaatatataccagatattttctttcgattctgtttcgttacttgcgtaatatagaactatgacccttacaaattattggcaaacaaaattacagtgttgacattagaaaaaactaacaaaaatgttgttctagaacaatgttttttgttttgtttttttttttttgcattatcaataattgttttatctaaagagcttcaaccaaaaacaaactaacagttcttgttgtagaagtggaagccaaagaactgtgtaatagaatagaagacatcgatggaaattgtgactttgaaggagagaaggggtgcttgaaattcatgacgaataaatataagaaagaaagacatgttagctgcacatgtactaacctttacatgttacacaagaccaaacgtttttgcgactgtaaacatcgctgctcaggataaactcccctaaccaacattgcttttacctattttttagtttttactaatagaattgttatgagtgtttgtagtgttgtcattttcatgacccataaataagttatgttattctaatgtatctctctttttccacacaaatttttaataaagttatgagttacttctttctaagtagttagtatgagttttccaatcaatctattttccacgttcagttttccaaattgtattgatcctgttatagtgtaattacgcattttgtaattggccatggtactacaatactaatactatcatgttatctgcagacttcaatcttttatttttaaaaattaattattagcatttgtaatattgatgtaattttaatacaaactgtttattaatttgtttgaaaacttatgtggacaaataaaattagtatacagaacaaaaaaatatgtttcaataccaaaaaaagttcactccctaagcttttctgtctcttaaggataacatcctggatgaggtctctcgatgattccccccacatacaacataaccatataaaaaaaaaatcatcagccaagtgaagcctcgggaacagtagtgtgaacctttggatccttggcctatcgtcaaatgatcgacgacggtcgagttgattgatcctacacagtacacaacctgaatgttttcccatagcatctctgcttcatctattccttgctagtaggattgatcccagaaaaccataaatttgttttataaagattgaacgtttgtctatagattaattttcaatggattaaacattgtaaattaatggtcttatggattttgtgagtttagattatcaaggttagaactgtgtattttgaaaagaataggtgatgcgtcatcacaatacacgcaaaaaaaaaaagtgaaaaatatataatactagtaagtagatttacaaagaagaatttttccaaaaaagaaagagttgatccgtcgaactcgttaattaagaaggctcgttgaattttacaaagcaaattctaaaaaaagatgcatctatttttacgatatctcgaatatatttattatgagtgttgttgataagaaagataaaaaattcgagaggcaaacaatagttttctgcaactatagagataattaataattcttatcagcttttcaatcatgagatctgttatttggtttatagtttcttatactctcatgttactcgttctgagaggtggtaaaggtaatatgttgagttttttttgtatggacgtaactcgtatataataagatataaaacaaggatgttctttctaattgcaaaaacggtgttgtgattaaaggaaataaaaagcattgttacaacgttaacatatggtttaatagtgaacttatttggattgtcatttgtttattaatcgaactaaaattaacgtttttttttttttttttggtttgtgtggttgagaaaacaatagaagtggaagctgagaaactgtgtacaacgataggagacttggacggtaaatgtagccaagacggagaaaagttgtgcatgagatacatgactgatcaatctaaaaaaaagtttcttagctgcacatgtaataacgttgttatgttacacaagtacaaacattattgcgaatgtcaatctcattgtactccaaaacaaacgtaagctgtaactctataatcaatatatctctttacaactaaataagaattgttgatagagtttgtagtgttttcacgactcaaaaatacaaatgttgtgctgattgaagtatgaatttttggttcaagtcttgatcttgatcattgaaaaaaatcgtgaaaatattgatcaattgccaacgaaaagacgtaatggggtgaatcagatagtgtaggattatttggggtaattttgttacattctaaagtatagtgggtggggttaaattgatagtattaaaaaagtcaagggttaatacgaaatacaaatataatcaatagcgaaaaaccaaaaaataaataaataaatgacaatttgactcgaaaactttaagagaaaatggaaactgtgtctcaataaaccctagtaccctttttctctcttattcttctatcttcctcctcctctatctttcgctcgagccattgagcaattatg

SEQ ID NO: 17122 - DNA, 3003 bp, Unknown
  misc_feature (1)..( 3003): 2750-1469P.txt file - cDNA_ID_1807878; gDNA_ID_1621115; Annot_ID_56183
tttatagtgtgagcttgtagatttgggttttaccgcttcttaggtactggatttagcactttggtgtaaagtttccaaggaaattttaagagatatatgtatatgagcttatagatttgtattactgtttcttattggattttactatttgcatttctatggggatttttggtttcttatggatgttcatcttttatgtttttgtaggtttgatgatatcactttcgtaagaaccaaggaatctgctagcaagcagaattctactctggcagctgcaggcttggtggaagcgatactgtttgaggtgaagcagcgagatagagttggtggatcttttttcaaatctgaggacatgtgctgtacgccaaaacttgcggatgctggttcctgcaatcttggagaggttatgattagtgcagatcctaatgatcctgaatggcctaagcggattcccacttttttcaaaaggggtgaggaagaagtgaagatgtctccggaagctgtcattatcaagaaaactggattgtacactgtttacttcatgacatgtgatccggaattggatggcgcaacaatcagaggaagaacagtttggaagaacagaggtggctatttacagggagagaaagctcctttgaagaagttctacgcctccatgcttttggcttacgtggttcttggcctagtttggtttccacaagttgctcagtattggaaagatggaatccagttgcatagtcatatcaactttgtaattgcatttaccatgggtgaattggccttcctctaccttgacttcgtttatctcgactcagctggtacaagtcctatggaggttacagtatgggcaataaccctttcttccatgaggaaggcactctcccggcttctactgttggtcatatcttcagggtttgggatagtgagacctaccctaggtggcataacattgaagatgcttcttattggtgtcttatgctttgttataagtgaatccctcgggttggctatgcaatttgggaacatctctgaaaatggaatgaattacttaatgctctcttgggctatactggaaacttgctttatccagtggattttcagatccttgtcgaaaacgcttaagaagctcaaggtaagagaaacatacaatcctccttttcttttgattattgatataacaggttaggcacactgattgctacatgtttctaacatatcacttgtaaatatatctttcttgttaattgttgaaagttgcagaaaagccatttataaagatccatttcttcttagattattcatccctgctaatcccatatttttcttatgtagctgaataagaggaacattactaagctgcagctctacaagatgtttgcaactgtgcttgtaatcatggttgtgctcagttttgcctggatttatgtggaggtaacatctcaacagtctagtgataactctggggaatcacttgaaaaaagtcatatgattgtgtgactgaaattgttttctgaatcaggtatatctctacagctccttgagtcagttttggaaagtgaagtggattgttccaacactttggtacatcctttcttatgcaatgttggtactgatttgcctcttttggcctccatcggaaaaaccaatgaggtatggtatcaatctttctgtacttgccctttatcaatcgggtgcttatgtggcctgttttaagttccacactaagatcttgtctgttttgtactaacatgtttgaactttgtatatctgatcttctctgctgctagttacacatttttctgatgtatatatactggtttgaaattgcaggtacctatacgtagctgacatggaggaagagactgaagaagaagatgatctctccactgcagaaaccggtatgaacgcaacaaaggctgaatacgagaggagtgaaaggaagaccctgctggaagcattcatcctattgcttgggaatataccaggggagaagtgaaactccccatcttacaaagttaccgtccttttagcttaagctgcctacttctcatcctttttcagcttaagctactcctaatcatccttttaaacctacggctttaagtttttttttaactcatataatcttctgcagtagacttgacttaatcggattttctgtttcatgaacttgttggtagtgtggaacaaatgggaaaatgaatatttttggaacaaattgattttctgtttcatattaagttaaatcattctgtttccactgaaataaattgttttccaaaaatcactccgtttattatgtctttgtttttaagaaataaaagtgagaaaacagaataacgcgaaaatgtcgacatatttggctaagtatagacaagattgggaagctctgtttagttatgcgtcagtctctcatcagtgttcaactgccacggagcgaaccgattcctaattgcaacgtcccgagtccatagaatgtcgacactctttcactctttctccaagttgcctcctttgagtcctttctcatattttatagactcactttctgtttcttgatcccgaggaagaagaagaataaactcttgttcccatgatcttcgtcgatgttagtaccttgagattcgattcgtctctccgattctttataatcggaatttattggtttgtggaatctgattttgggttctcttctattgctcttataggttctttggaaattgtttcctctatactcgtttggatcaggaagagactctctctcaggtatttcatcgaacacttaccctacaatttagtgaaatttctgtgtgatgtagaattctctagattcttctaatcgagttttagctgagaaaattagtgaaatgaaatgagattttccattgattgctagattccaaaactttagcttgttgttctgaattgcacttatttgttgtgttgtatggaccatggaaacatccaaaagagtccattttgcagatcattcccgagacaatg

SEQ ID NO: 17123 - DNA, 3003 bp, Unknown
  misc_feature (1)..( 3003): 2750-1469P.txt file - cDNA_ID_1807882; gDNA_ID_2214571; Annot_ID_135065
aaaacggaaaatccatgattgaatcatttctctttcaaaagtcactacctttatgaaacttgtatgtttccgaagcatctatatgaatttgagtttagaccatctccatcaattgtttctcatttagaaaccacctaatataaaaataaaatgtaatcaaaaagtaagaaaaagagtgaagagagtctcttaactgagaaactatgagaaacccacaaagacacttgtttatcatgcattgatcaaattttattttaataattaaaatctaattatataactaatatttattaaaatactaatactgtttttttaagaaacccagagagtatctcactaattgagatgctcttagtttgtatctaatattatcgcttatgaaatttaaatgtgttctcatagttttaatcaaaaagtaagaaagagagtgaagagagtctcttaactgagaaactatgagaaacctacaaagacatttgtttatcatccattgatcaaattttattttaataattaaaatctaattatataactaatatttattaaaatactaatatatatttttttaagaaacccagagagtatctcactaatggaaatgctttagtttgtatctaatattatcgcttatgaaatttaaatgtgttcttatagttttttaaaagactcattcaggttttcttatctattttgtcaatctttgtaaaccggaatttcaatcttacaaattcgattttacaatacaatttaaatatctattttactttaatcaatataatttaattctatacattacattttattgttagttttccattttagttaagaaaattataagttaattttttagatatagacatataaattaaatatctagaaatatgtttatttatttagtttctttattttctttaggaaaaaagtaaaaaaaaaaaaaaaatctaacacatgtcaaaatctaaaatcttaaagattgacatgtgtcatgatattgtgagttactaacttttaaaaccgtactttatataataagattttatatatttatagacttaaaaattaatatatgtaaatttatttacttttttatgttttctatttttttaagaaaaaaaaagttcaatctttattgacatatgtaaacatcttgtcgttagatttactacgtgtcatgatctcgtgaattagtaacttttgaaaccgtactttatataataaattacatttgaattcgatttatacaaaatcttaaccgtaaatcacgagatcatgacacatgtcaggtatatcattgagatgttgacatatgtcaaaaaagtttcttaaccgtactttatataataagatgtgcaatttcgatattgaacctcatcaaacaatttacgtagctcgaatcaacccatacgattctaggcgcaaaagttatttcgctgtcatgctttgaacccaaaatttatcatctttagaggatagatttaataattgtgataaaacggaacttttgttaagttatgaatatattgtgtataatacatttatgtattaaaaaattaagattttcttgtcaagaggtatggtcattctcttacattaatttaaactcaagaattttttatatcatttataccaaatatgataaattttataaaaacaatgtaatttcgatatcgagcctcattaaacgatgaatagctccaatcaacccataggattctaggaggaaggctgaaaaacctcgtcgtaaaccctttatcacatgtagatcaatagttccatcatgaagttggaacagttaaaattacaggaacaacaattatttctgctgcctaaatttgaacccgaaatttatcatctttagaggaaaaatttaatcattgtgccacagtggaacacttgctaaggtatgaatatatcgtgcatatatacagttatgtattaaacttcttatgactcattattggttttaaaaagaatttaccaaaaaaatatgatcattctcatagattaatttaaactcaagaatctttgaatatcatatttaccaaataatacatatcctcaatcaatccacatagttttaagcgcaaggtcgataacccacggcttaaacccttcatccataattcatatagatctatagtattatcttcaagttgtaaccgttaaattacaccgcttgttctactaactcaggatcaagatccatcaaatctgcatctaattttggtatcgatctattaatagtactatatgtatattttctcgacataattaacttatgataccaatacttgtttaaattattaaagttccggccaaatacttatttatttaccatcttggaagaagcattaatgtgaaagaaataacacttcaacatgaacagaacaaacatctgtttaatccctaattgcaaatacaaattgcatgactttcctacactgcaagatctttctccttaaaatcaagaaaatagccaaacatctccaagaatttgcaagaacagtggacgatgttaaaatttgtaaaatacgtgcgggtagggtcgtgtaaactttcttcttttttattcacacttcacgtgttgtgtgtggaactatgttcacattagtttaacagctcgacacaaccatattcatacaaagtcttgataatattgattgcgttcgagccagaaccttcaaaactccattaaaaaaaacaaaaaaaatatatttgaaggaacaagaaaatttattgctcagcacagaaggttagggagatcattaagagtccattacaaaatttggaggctgaaacattaatattcttgactcgtacggattctctcatgttcatacacataaactagttatgtttttgtctttgtcaacaacctcaattaatatttagcagttgatggttggagaggaactttttatttactctttttatcttctgccttttaaagactacttgtttctcttcttcttctttattgcttatagcttctgagcatcaatg

SEQ ID NO: 17124 - DNA, 3003 bp, Unknown; identical to SEQ ID NO: 17123
  misc_feature (1)..( 3003): 2750-1469P.txt file - cDNA_ID_1807882; gDNA_ID_2214571; Annot_ID_186178

SEQ ID NO: 17125 - DNA, 3000 bp, Unknown; identical to SEQ ID NO: 4818
  misc_feature (1)..( 3000): 2750-1469P.txt file - cDNA_ID_1807890; gDNA_ID_1620734; Annot_ID_49449

SEQ ID NO: 17126 - DNA, 3000 bp, Unknown; identical to SEQ ID NO: 4818
  misc_feature (1)..( 3000): 2750-1469P.txt file - cDNA_ID_1807890; gDNA_ID_1620734; Annot_ID_166203

SEQ ID NO: 17127 - DNA, 3000 bp, Unknown; identical to SEQ ID NO: 4818
  misc_feature (1)..( 3000): 2750-1469P.txt file - cDNA_ID_1807890; gDNA_ID_2926217; Annot_ID_142251

SEQ ID NO: 17128 - DNA, 3000 bp, Unknown; identical to SEQ ID NO: 4818
  misc_feature (1)..( 3000): 2750-1469P.txt file - cDNA_ID_1807890; gDNA_ID_2926217; Annot_ID_203032

SEQ ID NO: 17129 - DNA, 3003 bp, Unknown
  misc_feature (1)..( 3003): 2750-1469P.txt file - cDNA_ID_1807894; gDNA_ID_1621129; Annot_ID_56432
ttactaaaaaggtgagttcaaattccagtaatccagagtggaatcaagtatttgtcttttccaaagaaagaattcaatcatccgtagttgagcttttcgttaaagaaggtaataaagatgagtatacgggtagagtcttgtttgatttaagcgagatcccaacccgcgttcctccggatagtccgttagctccgcaatggtacaagatagagaatagaaacggcggtagaggtaatggagagcttatggtttcggtgtggttcgggactcaagctgatgaggcttttgcggaggcgtggcattcaaaggctggaaatgttcacatcgaggaactctcatcgatcaaatcaaaggtttacttgtctcctaagctatggtatcttaggatatcagtgattgaggctcaagatgttgcaattatggacaagggatcaagtctcatgaggtttccagagctttcggcgaagcttcaagtagggagtcagatactgagaactgcaatcgcatctgcaatccccacaaagagcttttcaaatccttattggaatgaggatttgatgtttgtagttgcagagccgtttgaggattgcgttacagttgttgtagaggatcgtcttaatggtggtgcaataggaggacaaaacgatgtggctgttgggagggttcagattccgatttccgctgttgaaagacgaacaggagatacactggttggttcaagatggtttagcctagataacggcaacaataacaaccggtttggttctaggattcatcttagattgtcattagacggtggctaccatgttttggatgaggcaacaatgtataacagtgatgttagaccgactgcgaaagagctttggaaaccgcaagtagggcttttagagattgggattcttagtgcaactggtttgatgcctatgaaggttagggacgggaaatgcggtggaatcgcggactcgtactgcgtggctaagtatgggcctaaatgggtcagaacaagaactgttgtggacagtctttgtcctaagtggaacgagcagtacacttgggaagtgtatgacccgtgcacagttgttaccgtcggtgtattcgataatgcacgtgttaatgaaaataacaactcgcgggatgtgcggattggaaaggttaggattaggttgtctacgctagagacaggacgggtttacacgcattcgtatccattgattgtgttgcatccctctggagtaaagaaaacaggtgagcttcatttagcggttagattatcttgcggtaacgctgttaacatgcttcatatgtatgcgttaccattgcttccaaagatgcattatactcagccgttaggcgtccatatgcttgaacgtttgcggtatcaaacgctaaacgcggttgcggccaggctgagtagagctgagccaccattgggtcgtgaggttgtggaatatatgctagatcatgatttccatgtttggagtatgagaaggagcaaagctaattttttccgactggttaacgtgatttccggtttggtcgcggttgctaagttggttgaagttatgagaagttggagtaaaccggtttactcgacggtttttgttttggctttcttgtttatggttctgtttccggagcttctattgccgtgtttgcttctttacacggctgcggttggcgtttggcgtttcaggcggcggtctagatatccaccgcacatggacgcgcgtatctctcacgcagaaactgtgtttcccgatgaacttgatgaagagtttgacacatttccgacaagcagaggatttgatgttgtgagaatgagatacgatcgagttaggagcatcgccgggagggttcagacagtggttggtgacatggcaagtcagggagagagggtacaagctttgctaagctggcgtgatccacgtgctacgtttctcttcttgatgttctgtttattggcggcagttggattttacactgtgccggttaagttgacagtagctatttccggtttgtattatctgagacctcctcggtttaggaggaaacttccgtcgcgagggcttagcttctttagacggttgccgtctagagccgatagcttgctctagaacatgtcaagagtgtatttaactatttatcgtcttcttagattactagggactttagtttttggtacgatttattggttgtatgtatttattatgttttcggttaggttaacaaccggtgtttgaacacatgaatgaaagaccgaaccggttaaggcattgtaccgaacctgttgtgttaatgattaggatgctttgctgttcattacaaaagtttgctaactgcttgtagttttttcgtttttggtccccgcgtgatgaacttgttaagtgtgtaaaacaaattacacataagacataactcaattaatatacccctactgattcattaaatttaagaatttgccaacattgtatgaattgcgattcaatcctccttcgtgtccatgataagatatattacgaattattatagcaactaatttttcagataaatctcaaatattatttggatcaatcgaggaattatcaaaaattcaaaattatatattaggattacaaatagggttacagtgttctataagtttttatcagggtaaaaatatgaaataaagaaaatataagggtatgtttaaaattatgaagattgtgtttagataatcaagaacagggcatttccaattagagagaaaaaaaggagatccttttaatgtatcgcagaccatcctcagctatggcctcctgtttttccttttaggtatcttcgtagctcttcaccgtaaataatcccgacccatctagaggacggagccgccggcgaggaaattcaggcagattagatcggcgatttggccttgttttcaacgaagatcgtcttgttagggtttcgtccgcatctatggattctctgtcaaatggggtattgatatgaatttcggctttcgtgatg

SEQ ID NO: 17130 - DNA, 3000 bp, Unknown; identical to SEQ ID NO: 12280
  misc_feature (1)..( 3000): 2750-1469P.txt file - cDNA_ID_1807898; gDNA_ID_2214540; Annot_ID_134463

SEQ ID NO: 17131 - DNA, 3000 bp, Unknown; identical to SEQ ID NO: 12276
  misc_feature (1)..( 3000): 2750-1469P.txt file - cDNA_ID_1807898; gDNA_ID_2214540; Annot_ID_185220

SEQ ID NO: 17132 - DNA, 3003 bp, Unknown
  misc_feature (1)..( 3003): 2750-1469P.txt file - cDNA_ID_1807910; gDNA_ID_1620653; Annot_ID_47777
tcttcacttaaatcccccattggaggcacatcgctctccactgttcgtcgctttgtaagttgattctctattttggttttatggccttatctcgttttctccattcgatttttttgattggaagcgaaagtaaaattttgacactctttgttgttgaatagggagtaggtgttgttaggatgcaagctgttgatgaagatattgatttgaagcaaatgagagacatagctgctgctaaaaagcgttgggatggtttggtaaccatcacttacatcttaaaattggaacattggagtgattatggttcatgtttttattttcattgttattcaactgttctcactattaacaaatttattgtttgcatagttaagggaaggaaaagtgaagcttcttacaccaagagaagcaggctatgctatttctctttcaaacaaacctctccttgatgttcgtccctctagcgagcgcaacaaggtacattcttgttttttaagttattaggctgcttgtttacttatccatagatgatgattgtcttgtctaaattcacccttgaacgttattgcatagaatttggttcatgtatctcacctttgcatgacatgttagtaagttagttcaaactcttggcgactgtaatgttattatgaaatcaaaactatagtgtgttactgatgtagtcttctccttcgatttttttcttttcttttctataaaggcatggattaaaggctccacttgggttcctatcttcgacaatgatgacaaccttgacgctggaactctttccaaaaaagtcactagttttgctatgggtacttctccaccattataagttataacctgttgactatagtgacattggatcaattcattattattccctactattatctatatttctattgtatatcattgactaatcccatctaggatagagactagaacacttgaatacacgcatttattaaattctttttggttcttgtaaaaaattttggttttgatttcaccatgtttccacttgtacagggggatggtggagtggagcacctacactatcttttaataggtatgtctgcgagagtaagctgaccttcttctttgccttttggcatacttacttgcttcttggttttctacttcgtttgcaggctcttcttgtcaaaggttgaggagaaattcccaaaagactcagagctgattgttgcttgccaaaaaggattgaggtacttgaaatatagatagataatgagtgactaaccatgcttgaaatatgtggttactttatattataatgagtaagtggctggttaggttctctgcctatatattatatattcatagaattgcatggtgatttatccaggttttgggttgaagaagtatcattatcaaatggtctcggttcttgtggaatgaaaattagtcttatattgaaagttagtatgttgatagtataactgtgaatcacagggttcatattgttggatgatcctcaaatttatgcttgactcgtaaatattgtcagatccttagctgcttgcgagctactatataatgcagggtatgagaatctgttctgggtacaaggtggtttagaatctgctcaagacgaggttatacgattgttttaaactttcggttttgtgctttatactttttcagtttcgtttctgaattgcaagattctacaacatcgataactaattcattcattatgtgatagcaggatctagtgacagaaggtgtccaacccttgaagcttgctggtattggaggtttttcagagttcctcgggtaattctctcttttgctactcagactttctcatagcttgaaaagtaaaagtctcaaaagacaatgaggagaataatggataggcctgtatttatttataatgactgtaagtcaatagcctagctctatcttgtacatcattagcagcatttggtattatgctcatacatctttttacttgcagttggacagaccagcaaagagctcaagctgcgaaagaaggttgggggtaccgtttggtatatactgctcgtctggtgagtttttttaatcaaaatctcttgtagcttctttcttttgtgaatcatgttcctcatgactgcttctctcatgtcatgtttgtagtttggagttgttctggctgctgatgctttgttcgttggggctcagcaactaggccattatattcaggagttaagaggccattaggatctctctttaaccacgctccaagtggctatatttctcttcaacaaaaaaaaattgaaaagttttggaaggtagagtagttgaaatagatcaaaaatacatctttgaatcctgaaattccaatggcaaacttaccctttgctttataccaagatccgtattatccaaagaataatttgcttatataaaaaagaaaattcgttgacgaaaaaaaaaagaaaaaaaaaagaaaaaaagaaaagaaaattcggcttaaacttctagtagacaaagttaaataatctaggacaaaaattgcgactattcgagtttggtccgaaatcgtaagtaagagagtttggtcgggacgaaaaaaagaagaagagagtttggtccgaaaaaaaagttaattagagagtggaatattcgacccgcggaaaaaaaaatctttatccaatttaaatgcgtgtcgttttactagaaatatgaagcacttcttgttgtttcatcgtctggaaagtggaagcatattctctctcccatcaattattgagccaacccaactatggttaaatccagcacagttccaactaacccaggttataccggttgattacacgtggacggtggagatttttctgactgcttctctatcgcaatttgctattcctctgcttaaaaactagggttaggctacgattctgtttacaccaaaaaagcttttcgtcatcgccgtttggctttctgaaacaaatcacaccgtttaagattttctctgattctgagattatg

SEQ ID NO: 17133 - DNA, 3003 bp, Unknown; identical to SEQ ID NO: 17132
  misc_feature (1)..( 3003): 2750-1469P.txt file - cDNA_ID_1807910; gDNA_ID_1620653; Annot_ID_163532

SEQ ID NO: 17134 - DNA, 3000 bp, Unknown
  misc_feature (1)..( 3000): 2750-1469P.txt file - cDNA_ID_1807910; gDNA_ID_2926186; Annot_ID_140783
tcacttaaatcccccattggaggcacatcgctctccactgttcgtcgctttgtaagttgattctctattttggttttatggccttatctcgttttctccattcgatttttttgattggaagcgaaagtaaaattttgacactctttgttgttgaatagggagtaggtgttgttaggatgcaagctgttgatgaagatattgatttgaagcaaatgagagacatagctgctgctaaaaagcgttgggatggtttggtaaccatcacttacatcttaaaattggaacattggagtgattatggttcatgtttttattttcattgttattcaactgttctcactattaacaaatttattgtttgcatagttaagggaaggaaaagtgaagcttcttacaccaagagaagcaggctatgctatttctctttcaaacaaacctctccttgatgttcgtccctctagcgagcgcaacaaggtacattcttgttttttaagttattaggctgcttgtttacttatccatagatgatgattgtcttgtctaaattcacccttgaacgttattgcatagaatttggttcatgtatctcacctttgcatgacatgttagtaagttagttcaaactcttggcgactgtaatgttattatgaaatcaaaactatagtgtgttactgatgtagtcttctccttcgatttttttcttttcttttctataaaggcatggattaaaggctccacttgggttcctatcttcgacaatgatgacaaccttgacgctggaactctttccaaaaaagtcactagttttgctatgggtacttctccaccattataagttataacctgttgactatagtgacattggatcaattcattattattccctactattatctatatttctattgtatatcattgactaatcccatctaggatagagactagaacacttgaatacacgcatttattaaattctttttggttcttgtaaaaaattttggttttgatttcaccatgtttccacttgtacagggggatggtggagtggagcacctacactatcttttaataggtatgtctgcgagagtaagctgaccttcttctttgccttttggcatacttacttgcttcttggttttctacttcgtttgcaggctcttcttgtcaaaggttgaggagaaattcccaaaagactcagagctgattgttgcttgccaaaaaggattgaggtacttgaaatatagatagataatgagtgactaaccatgcttgaaatatgtggttactttatattataatgagtaagtggctggttaggttctctgcctatatattatatattcatagaattgcatggtgatttatccaggttttgggttgaagaagtatcattatcaaatggtctcggttcttgtggaatgaaaattagtcttatattgaaagttagtatgttgatagtataactgtgaatcacagggttcatattgttggatgatcctcaaatttatgcttgactcgtaaatattgtcagatccttagctgcttgcgagctactatataatgcagggtatgagaatctgttctgggtacaaggtggtttagaatctgctcaagacgaggttatacgattgttttaaactttcggttttgtgctttatactttttcagtttcgtttctgaattgcaagattctacaacatcgataactaattcattcattatgtgatagcaggatctagtgacagaaggtgtccaacccttgaagcttgctggtattggaggtttttcagagttcctcgggtaattctctcttttgctactcagactttctcatagcttgaaaagtaaaagtctcaaaagacaatgaggagaataatggataggcctgtatttatttataatgactgtaagtcaatagcctagctctatcttgtacatcattagcagcatttggtattatgctcatacatctttttacttgcagttggacagaccagcaaagagctcaagctgcgaaagaaggttgggggtaccgtttggtatatactgctcgtctggtgagtttttttaatcaaaatctcttgtagcttctttcttttgtgaatcatgttcctcatgactgcttctctcatgtcatgtttgtagtttggagttgttctggctgctgatgctttgttcgttggggctcagcaactaggccattatattcaggagttaagaggccattaggatctctctttaaccacgctccaagtggctatatttctcttcaacaaaaaaaaattgaaaagttttggaaggtagagtagttgaaatagatcaaaaatacatctttgaatcctgaaattccaatggcaaacttaccctttgctttataccaagatccgtattatccaaagaataatttgcttatataaaaaagaaaattcgttgacgaaaaaaaaaagaaaaaaaaaagaaaaaaagaaaagaaaattcggcttaaacttctagtagacaaagttaaataatctaggacaaaaattgcgactattcgagtttggtccgaaatcgtaagtaagagagtttggtcgggacgaaaaaaagaagaagagagtttggtccgaaaaaaaagttaattagagagtggaatattcgacccgcggaaaaaaaaatctttatccaatttaaatgcgtgtcgttttactagaaatatgaagcacttcttgttgtttcatcgtctggaaagtggaagcatattctctctcccatcaattattgagccaacccaactatggttaaatccagcacagttccaactaacccaggttataccggttgattacacgtggacggtggagatttttctgactgcttctctatcgcaatttgctattcctctgcttaaaaactagggttaggctacgattctgtttacaccaaaaaagcttttcgtcatcgccgtttggctttctgaaacaaatcacaccgtttaagattttctctgattctgagattatg

SEQ ID NO: 17135 - DNA, 3000 bp, Unknown; identical to SEQ ID NO: 17134
  misc_feature (1)..( 3000): 2750-1469P.txt file - cDNA_ID_1807910; gDNA_ID_2926186; Annot_ID_200619

SEQ ID NO: 17136 - DNA, 3003 bp, Unknown
  misc_feature (1)..( 3003): 2750-1469P.txt file - cDNA_ID_1807922; gDNA_ID_1620686; Annot_ID_48458
tatatcctggaatgctatgatatctggatttgcacaaaatggattctctcatgaagctctcaagatgttcttatccgcagcagcagaaacaatgccgaatgaatacactttcggaagtgtcttgaatgcaatagcttttgcagaggatatatctgtaaagcaaggtcagcgttgccatgctcatttactgaaattgggtttgaatagttgtcctgttgtttcaagcgcgcttcttgatatgtacgccaagcgtgggaacattgatgaatctgagaaagtctttaacgagatgtctcaaaagaaccaatttgtttggacatcgataatatcagcctattcaagccacggtgattttgaaaccgtgatgaacttgttccacaagatgattaaagaaaacgtagcaccagacctagtcacttttctctctgtgttaacagcttgtaatagaaaaggaatggtagacaagggctatgagattttcaacatgatgatcgaagtctacaatcttgagccgtctcatgagcattactcatgtatggttgatatgcttggccgagctgggagattgaaagaagcagaagagcttatgagtgaggttcctggaggaccaggagagtcgatgcttcagagcatgctcgggtcttgtaggctgcacgggaatgtgaaaatgggagcaaaagtggctgagcttgcaatggaaatgaaaccggaactgtcaggttcttacgttcagatgtataacatctatgcagagaaagaagagtgggataaagctgcagagatcaggaaagcaatgaggaagaaaaacgtaagtaaagaagctggattcagttggatcgatgttggtgacactgaagggtctttaacgatgcaaggtttctcttcaggggataagtctcatccaaaatctgatgagatttatagaatggtggaaattattggattggagatgaatttggaggggaaagttgcagtttaggactcttactcaaagttctaaagagttgtagttatagatcaaaaattagaaatgttagctatagatttacatgaactcactgagtgtatgattacttttatttttgcacctacatacgtgcacattgattttgtaaggaccatggtaaaccggtaaagcatggttctctgattttgaccttattgaccggttcgattgattaatccaacgctacgatcaaaatagacgactctaacttttctaggtcaaccgtaaaatatatatactttaatttctacaaatagtatcttgaaactattaaactatttattaggttcgaatttggttggtattattcccaatccaaaggctaaaatcaaaaaaaaaaaaaaaagtcaaaataacaatggattttaactacaaaaagtttcaagtttatgggccatttcaagtttgaaacttttgttgttttttctatctaacgaactcaaaaagagaatatgatggctttaaggtatgagtttggtgttgtactcttactcacgtctctttacatttatcattgtataacaaaataagattttaatagtaactttgaaatgattcttaagcaacttaaaaagcgagagaagagaatgtttacgtcgtcgataacctcataatgcggattattcttcctaacacgttaccctctacgtaccccacttgataagccagtttacactttcccttccaatttactttttctaataaaatacttttgtcttccgtcgtcaaacaaacaaatgtatgacttaataagttctatcaaaatgaacgttcatatactcagctgattataattgacgcaacttaaaaaaaacagaatgaagactcatatattgtaacatggcttgtatcaactataaataatatttgtctagaataaagactccgatggtggttgaaacttcaaactaaaccacccaggacacagcttaacgtatcattataaattaaagataggatagtaccatactagttagtaatttgactatttattaactacacaaatttttaacagatttagaacttgagtgttatacatattgaaagtacctgtaacttgattttatcaaatcagattttaagtacttattaaaggctgaagcatatgaaaatataaatcaatttatatatgacttgttgaagcttttaaattaaggagcgtatcaaaaaacttaaaacacacaattaacgcgcgtgtccacgctctaagcaaagcgagtgaaacatattaatttacacaatcgaaccgtcattaatgttatgggttgtctcctatttctggtttaaaagagatattaacttaaatcccacgtcaccaaatattaaaaataaaataaaaataaacaaattatataaatttcttaacgcacaatttgttgttttccataattccatttacccgaaaccctaatccccaatttctctttcaagttttcgatcacgatctctggaaaattaagagagaaattcaaaaacttcgggagttcaaagtctcattcagacattccagaaggtgatctcttgtttcagtttttctccctttttgttgattgtttcaatattggtgttttatccttcgatctctatgaaagttgtttcaattggatcgagattcttcgctgtttattgattttacgatacccttttcaatcgtttggaagtttttttggtttgtcctaattcgaattattcttgctgtctgaagaatctgtttggaagtaaatttggattaatcttgcttagcttgtatctcctgtgattgatcgcgattacgttggttcttctttctgtttacgcataattttactgattcatctaaattttgttgcggctttcttatgatctgtgttccagagtttgtggattattacatcaaactatatgtttttagagttgtttgttttattaagaatgtatgatcttctgctttggatgtttgctcacatatggatatttctcttttgcaggtattctagtcgactgagtaaacaatcatg

SEQ ID NO: 17137 - DNA, 3003 bp, Unknown; identical to SEQ ID NO: 17136
  misc_feature (1)..( 3003): 2750-1469P.txt file - cDNA_ID_1807922; gDNA_ID_2926202; Annot_ID_141553

SEQ ID NO: 17138 - DNA, 3000 bp, Unknown; identical to SEQ ID NO: 6995
  misc_feature (1)..( 3000): 2750-1469P.txt file - cDNA_ID_1807926; gDNA_ID_1621121; Annot_ID_56297

SEQ ID NO: 17139 - DNA, 3000 bp, Unknown; identical to SEQ ID NO: 6995
  misc_feature (1)..( 3000): 2750-1469P.txt file - cDNA_ID_1807926; gDNA_ID_1621121; Annot_ID_172093

SEQ ID NO: 17140 - DNA, 3003 bp, Unknown
  misc_feature (1)..( 3003): 2750-1469P.txt file - cDNA_ID_1807934; gDNA_ID_2214482; Annot_ID_133285
cggcagcgcaaacgtcgtcgtttgattgattggtccatgccaccctaaatccctgccttttttgcaaaagctacacagaagaaactgcaattcccaataagcccgcaatcaacggcccaaatcgagtaatcagtcaaccatcccatacaaccgttctcacatgaaccttgtctttaacaccggtcaatctaaacaaccaaccaatcataattcaccacgtcatcacgtcgttataatctgtctctgtgtctctctcttcttctcactctccgagtggggtgatagtgtgactctgtaacgagaaagcacaatcatatcgattccttcttcaaaagctcttttgcttttttcatctccttttccctttctcttttcttttgtaattttattaattatgataagtgaaaagggctcctctttaaaacccttcgaattcgtccatctcttggttctttgtggtggcgatggcattggcagaggagcagcatcagaattatcatgtggctgaggcgattccgggtacgcctgggatccatgatgtcaggattcaacccggttctgagaattccgggttctgtgttgatccggttggtgtttctaatgtacctggaattaggagagttgggttgagagctgaaatcgatacttctcctccattcggatcggttcaggaggcggtgactcgattcggtggtcgtggttattgggttcctttcaagcttgatgacactttcgtaagttttgttctttctcagttttttcttcaatgtcagatcagtgtaatatacaaacacattaatatgcattgcatactaacatttgatgctttgatggtgaccattttccattgttctttacagtcgaatctcatgacttctgtggaagtatgtaaaattgagttcatgacctttgtgcaattcagtagcattacaatattgagattgaatataactcgagtctagaatttcataatcgaggttttagcaacatatatgtaagttgttgaaagcatcaagatcgtttaagctgttgttctgtctctgagatcatcatcaccattaagtgttgatcgtcgagtgtaaaatgcacacactgattttgtaacaatgaatctcggagtatctgtgtcactgtgtgaggttggattaggagttgagatatgattttcattttcttttggtttttgtcaacgttcagaatggtgaatttgacattaagagaatggaggagcatgcagcggagcttgagaaggatctgattgtgaaagagcttgaaactttggatgttttagaagctcttggatcaaccaaaaggatcgttgaagatttgaagcggcagcttcagcaagaagcactgagatgctctgaccaactcagttcagatatcaaagagatgaacgatgagcattgccatcacaatcccatgtcatctcctgatttgatcttgatggaattgaagcaagctaagatgaatcttggtaaaaccatggacaaccttgtagtgatccagtcctctgttgaatctctgaataagaaaatgaaagaagagaaagacttccttgagaagacacgggctaagctaacgtatgggtttggtggaccggtatctctagctgaggagttgagtcggattaaggtaaaaccacaggttcaagatgaaccgttaagggagcaggttaagatggttgctgaagccgatgaaacgggtttaaacctgcagaacaagaacagtctgagaactgcagagatgagattggttgctgctaggaaaatggaagaagctgcgaaagcagcggaagcacttgcgattgctgaaattacaatgttatcatccaatggtgaaagccaggacgatgattcggaattttgctttccagagcctccaagatctcctgtgacaccaagaggactcaggattgataatgacttctccacggataagagttcaagacgagggattttgaagaagcttgaggaagctactgaaggagttaaacaaagtaagcaggctttagaagctgcgttaaaccgagtagagatcgctaatgtgaagcaacttgcagctgaaaatgctttccgcgggtggacaaaagactcattgaaaggcgataactttacacctttgaatcatacccgacgctcctttttcagccatttgaacaagcatcacgagccacttgacattctcccaaagccagtgttaaagtctaatatctcaatgcgtgatgttctaaggcgtaagcaagttccaaaggaagatgttgttgctccccaaagacagagccttgaagggcaaataccgaggcgaaatgtgaatttgagccaaatgttgaaggaactaaagcaggatgtgaagttttcggcacggggagagaaagaggaggtacatgaagagaaacagtacgtcacgcagaggagaaagtttgggttcatacacattacacttccactgcagaagcagagcaagaaaaaatccagcctttaaaaacaaacacctcccactatttctatttttagtccttattaatgtgtttgtaattggttttcattttggtttgatatggtgttgattgcttttccggtcttttatatttgttgattttccaaaaaataaatatacaatcttagtctttaaataaaacataatgctttgaatctaatgagtaaacaacaaatttgatagtgattgtaaaacaacaatgaaaactgcagaaatgtgattactggataaaagctgtatcttagcaatgaaaccgaaccaaattgaaccaagatgattagaataaaccaaacaatgacgtggcagagatagtagctgactaggcaacgttgaatccacgtcagcagatctcttatcatcaaagttttttctatcttcttcgttcgaagacgttaaccccatctcgttgaaagagagaagatgctaagatctcaaaacagagtataacaacaccttgacctcgttgaagaagcctttgagattgtctcggggatctgaaaaatg

SEQ ID NO: 17141 - DNA, 3000 bp, Unknown; identical to SEQ ID NO: 6659
  misc_feature (1)..( 3000): 2750-1469P.txt file - cDNA_ID_1807951; gDNA_ID_1621100; Annot_ID_55833

SEQ ID NO: 17142 - DNA, 3000 bp, Unknown; identical to SEQ ID NO: 6659
  misc_feature (1)..( 3000): 2750-1469P.txt file - cDNA_ID_1807951; gDNA_ID_1621100; Annot_ID_171331

SEQ ID NO: 17143 - skipped

SEQ ID NO: 17144 - DNA, 3000 bp, Unknown; identical to SEQ ID NO: 6659
  misc_feature (1)..( 3000): 2750-1469P.txt file - cDNA_ID_1807951; gDNA_ID_2926168; Annot_ID_199253

SEQ ID NO: 17145 - DNA, 3003 bp, Unknown
  misc_feature (1)..( 3003): 2750-1469P.txt file - cDNA_ID_1807959; gDNA_ID_1620782; Annot_ID_50369
gattttttctgaagtcaacacataattgatgattttaatcacaaggtataaagtttatgttttaaagcaccgcaaattgcgaagtcgtgatttaaatgacatttttcccattataaaaaggaccaaaatgattttgattacgaatgagcaggaatcttgatttatcagtcatccaaaattaaaatggttatccggtttactcggattctttattttgaagaattgaaactttaaaatgtttccaaaattataaatattttaacattatgataaagttaaaatctttataattttaaaaactttttctaaagtttatctttaaaaaagatttaaatttttttataattttaaaacttatgaagttttaaaaattatagattgaattttacaagaaatttaaacattataaatatatatatataatatattaatacgggacgatatattacaggagaaatcttaaatataacaatcaaaattcaatgatgaattttgggtcgatattatatttttttgaagtttttcaaattttataatattaaaatttataagaaaatgataaaattatgtttaattttacggaactaggttatatggttggacggatttgggtggataataatatggaatggtatattacgattgtacaatgtccgacgttgcttaaaaaattggacaatggttcaaagccatagtataaaaaggaccaaaatgatttcgattacgaatgagcatgaaatttgatttatgaggtgtccaaaattataatggtttgttaactagggttctttattttaaagaatgaaactttaaaaagtttcaaaaaattataaattgaattttacaagaaatttaaatattataaacaatataaaagatattaatacgggacgatatactacgagagaaatcctagatacatacagcgagagaaatcttagatataacaatcaaaatttaatgatgaagtttgggtcaatattaatcttttttgaagtttctaattttataattgaaatttataataaaatgacaaatttgtatttaatttcacgggatggggttatatggtgggacgggtttgtgtggataataacacatttgattcttttataagaaaattaaatattataaatgtttatattttaaattttatactacaagtgaaattctagaattgactggtttgggttgataataatttgcgatagaactaggagtgaaatcctagaatgacaatcaaaatataattatataattaaatattaccacgggtaaaattctagaattgacggggttgagtcgatattaatatgggatggtgtactacggatgaaatctgaaaaacaacaatcaaaatacaattatacaatattaaatatttaaaaaaataaacaaatacaacttaaaactttaaaatttgagttataaaattttgtctcgcggtgtatcatacatttaaatcaaacaatagcataaatttaaagatcatcctaaaaaaaattcaattattttttatttaatgaaaatataggcctgcggtataccgcggattaatatctagttgtataaaaacaaactgaactatgtttccctaataaataaataaataaaaaaaaactgaaaaaaacaattcctgaacaattttacatccaattcatagtataacgacatatccaataacacaatttgaattctaatagtaatctctaatacacacttttttatttatcggaatatttttaaactaaattttaatagctacacgagataattgatctattgaagtattaactactaacatagattttaaggtctagttatttcacataaaaactaagttgtccaactactaacgcaattgacaaccacaaccaacaccaatattaagtatgattaccgaccaaatttgaattttataaacatatagaattttttttgccaactcataatcatatttttatatgtattttaatataaggtgaatgattatcttttgtttcatgtcatattgggcataacaaaactagtacaacaaagttgtgtgaaccactccttttatatagttttgttgttgtcttttcttccaaggaagattactagacttagacaagtggattatatatatatatatatatatatatatatatatatatatatatatattaactaatctttcaacacttgtggattgataattattcatacttttaataaaaattccatagttcaatgaatctgtaacaaaaccaagaagtgacgtgatatacttttggaactataatcatattgtgagctcaatggataagaattgattgtagtaaatgatgtcggcagttacaagtgtagttagatatatgcaataactcaaatcggacatgaactcattttaacttatctaaagagaccaccgacgaatcattttgggttcacaaaattgtacttcgatttctaagcctgaatgtgaacgcacgtttttgaatatttcaacacgtgtttcatatttcattacatgcattataacataaatattacatctttgagtctttaactagttgaccaacaaaaaaaaaaactttaactaagtctagctagttttgttactacatatataaaaacaaaaccgaaataaatatttaaaatttataatatatttgtgtggctaaatcaatcaacgtgtcatgaaggtctaattcaagttggtaaggaaatcttttgtttatgtccatttcccacgtgtcactatttgtatgacggctagagaaagacatgttgaattaactagtgactccggattatataagcaagcatctactaaaaagataggaacaacacaatttgattacactgagcaacacaaaactggcgaaccaacgtgactctaacgaagaaaccggcaatggccagtatcactacaatgccgaagaaataacaagaatcataaacgagccagaatattatcccccgggttacaacttgtctaccaccgcaatttcaaacatg

SEQ ID NO: 17146 - DNA, 3003 bp, Unknown; identical to SEQ ID NO: 17145
  misc_feature (1)..( 3003): 2750-1469P.txt file - cDNA_ID_1807959; gDNA_ID_1620782; Annot_ID_167988

SEQ ID NO: 17147 - DNA, 3003 bp, Unknown
  misc_feature (1)..( 3003): 2750-1469P.txt file - cDNA_ID_1807963; gDNA_ID_2214509; Annot_ID_133811
cgtttatagattttgttgccaatggtccgtttaaaagatttgaaatatatatattttttttctactttttcttttcttggtttataacctttgaatatctatatttgaaacacacattgaagatcactaactcgaaattcaaaaataaaaagagagacaaatatagcaatccataatcaatgcatagagacttcaagtgacctactaggatcccactaaaaaataatatgctgttttttgcctattccttttgcatcattcttgttatagtaaaatggtaaaagaaattatggaaaataagaaaatggggtcattgaatgtcaagagggtaacattttcagacgataaggcgcaatgaccccacacctcacatgaagctgcagtgccatttccaaaagagtgtgtggatatgaatttgaacaaagaaacattggtgatgaaattaaaaaagaaaaggaaagattactacaaagtgaaaagtatgaaattatgaagactacccgatcttctttgcctccctttccgtatttggcatgcccctaaccactaccacaacctcttcccttcggaactttgtaaataaacattcactgtttttttttttgctttttaaatagctgttaattgtacaaattcatttacatggcttactgtttttcaaaaggagatactaaatagtatatagtactataattttgtccaccatgttctatgaaactcgtccaaacataaaaaggtttttatatcatcaaacgtacgactttcctttgttattttcttggattggacacaacgagattggtttggtcactgtccgatctagttattgatatatatatatatatatatatatatatatatatatatatatatttttttaatataatgtagatgtagcccactaacttttgataagctttcatttttctatactttcatttttctataatgtaaaaagatagatgaaaatgaaactactagattacaactttttaacaaaaaataaaaaactactagattacagctcttgattggttgataacttgatatcatatatcgtgtttgtagttgaagatgtaaagatttatcatcttgtatttgaattttgcacaatatataatgtgatgattctatgtttgtttgtaaacttatgtgcaaatgggcgataactaaacgttcgtaaaatagttacatgtactaattaatcgaagcacataaatattatatatatatatatgtatatatatgaaacgattcattgattttaagtatttaatttattttttaagattttagttgtcttaacctcgtacgaagaagaaggatatatactatttaactcgtggagatgatgaggttcggatatttttccttaagaccacaagacactgacacgccgactgatcgataaaaaaagttaaggcctacaatacaaaagagtagcagattcccttacacgtgtttcatttatgatctgttaattaactccattgagcttcaatatctcattagccgaaaattaacttgacgttttccattgaactgtcgaaaaaatttgtagaaaaagtgaaatgtcccctatttaacttccaagtttaaaacctaaaattaattagttaccgttttgatgaataacgttgaaagaatcgtcaacatatcaaatgatgcagatacaacaagggacaaaaacatcaaaaaattgattaaaaataatcattcagatattagcaattaaactgtaagtaaatgattgcatatatatatatgaatgaatacatatatatgtatcaaactgtaagtaaataatacatacatatatatatatatatataggaaaatatctcatttttcaatcattttcagaggtaaacatttttaaagacaattttacctaacccaacatcttactatatttaaccagctctgcgagagcttcaaaacaatgatgaattttctgccccttttcattgaccaaataaaagttcacaaatttgtaaaaccaatcagcattaatttcgcacgtagtttacttcgtccgattttagatcaagtagacattttaaccaaacatattgaatcacggttcaatcaagatacatggttgcgagtataatatatcaatccttcaccgcattagaaaaccaaattttctatttaatttagcgtgttcttttaatgaacgcagcgtcagcgacaacaaagaagaaaaacagatctgcggcgagaaaaaatacattgattagagaagaactgccgcaaaagatgtacgatgatgaagattgacgtgacgctgcttaatttcagcgattcatttgatgcaattgcaattcatcggctatcatcggcgactcatccgaaattgttattttcaagctttaatgtcgttttacttacctactacttctcatgacacgtcgtttcagtccgctattgccgctggcgcagcatcaaataaaagaacacgctaggatagcttgaaaagggtacaataactagttatagaagaacatgagccataacatttggaaacaaaatgagttagtttgaatttgaaacatcgcgctctatgtaaaaaaagcaaaaaagaaaagaaaagagtcctaataattaaaaagagaaaataaaaggaattttcaatggtccgactgttacaagtagatttccatttttaggaatctagctataacgatgaagacagagttatcattttgttccatcaaatatatgacgatatttatatttaatttcttcaacaacaaatatctcatttgttggtgccactttcacatacttaggacgactaataattaattaaaaaggatttatgtaataacgcaccatattaacctgtaacaagaagaattgaaagtaatacaagtttatatatatagcaacacatttatcgtgtacgatactttattccttttatctattcttgaaaaaaagttaccaattcttgagaagaagaagaaatcagaatcaagagaaggagagagaaagatg

SEQ ID NO: 17148 - DNA, 3003 bp, Unknown; identical to SEQ ID NO: 17147
  misc_feature (1)..( 3003): 2750-1469P.txt file - cDNA_ID_1807963; gDNA_ID_2214509; Annot_ID_184204

SEQ ID NO: 17149 - DNA, 3003 bp, Unknown
  misc_feature (1)..( 3003): 2750-1469P.txt file - cDNA_ID_1807967; gDNA_ID_1620837; Annot_ID_50818
ctcttcgtcaaccacaaacgcgtttcactcttcgttcacgtcggggaatttaaaaaaatctccttcgtaacaaaaaagagaaagatcaagaagattgtcgtgatggctgccggatccatggacggaatattccgcaacatctttgaaggttgcatctctagctgtgactcttccatccaacgacgtccataccacaagaactgcggttgtgcccttcacgagagatctcgcggtggaggttcagcgactccttgtcgtcatggaaggtctgaggtcgttatgttccctatccaacgatcttggagtgaaggaaacagtttggctctgcatcttgcctcatcttcttcttcctctaacctccagtcactttcgtcgtcttcgtctatttctacccttgcatcgttatcttcgaccgtgtctgatattgattctcccatttaaggcatgaactattattagttcccattcattaattttttgtcttttatttgtttgtttcgaagagagtcaaattatgtttggtgtgtgattggaaaggtttcatgagtttccttggatatcaaaggaaactaattcaaatgttgtaatataatggtcaattgtagggaggcttttctataaaatttgtacagaatcatgtatttgagcgtaattatagttttttttgtatgatgtaaatttatacataaaccgtttgtaacatcgagagatgaaatttggattggaatgcgagaaaaataattttattttaatttttgtaatatgatcttcaagctatttcttcttattttatgttcttcggttaccactgtcttcatattgttttgattatactacgctatcatttgcccaaatctcttgacattctaatgtagagttgttgagcgacttgctaagattgttttccaagaaaaaaaaaattgtgtattccatacgtctaagagaaaatatttgtttactatgtgacttaaaaaatatataaatttaattattttatagttatatttggtaatgactaatgacattcaatccgaatatctgatcattgacattcaatttgaattttggctcaaatagaggttagcagagataatccgtctactggattagctatactggaggagaatgtttttttttggttattgttctttcattgatcggtatttggagaaaaaatataatttttcaggatattgttcgaaagattaatataacgaaacatcaaatatgagtttgtcttcaacggagcctacttccctgcatacaaatatagaagcattaatttgggcgaagtaatgtctaacggccaagcagaagaatatagtttctttcgtcacgaacttttatgaactcataaaaatggtgacatggtgtacatgtcttcaccaaaagagtggcccatattttcgtcatatctcgaggaaatcgtaaagtgtaagtaaaaattttctcttgtttttctgtttcatttgtttcttatcgagttaatgctagaataggcacatgtacactagcataaaatgtccgcactaatccacaatttgatcatgcacgtaaatattgttttctcaggttgcctacctacttttgtttgttatatccttgataacattatcatgttctaacattttcaaccttgctactattgtaatatggtacaaaagaaattgaaatattttatgcatgagatgagacaaccaaaagaaaataaaaatggttaataaaatatgaaaagaattgttaacaaaaaaaaagtaaaccgcaataccttttttcgtctagtaaaatagtaaaactggagaattctctttctttttctctagtaaaccgtaatagtaaaatccgtcccaccatctaatccagtttggtaaaattaaacattttttttttgttctaataatatttttattaaaagaattataattcaaatcaatttaaaaagttttcttttgaaatggttatttaattttatagatttcatatattatatatattctaaacgtttttcgttaaatattctaaacattttagaaactttaaataactataatatttatctttaataaaatcctaagattttttctttttaaaagtaattaaaattgatggagatatattaaataaggaaatgctaataattaggaatattatttaaatgataataattaatgttaatgacattccttgtaaataagttccaacttgaggatttatttacaaaaatggttgcaaaaatatatatgtagataacatgtagataacatgtatttttatttcagttgtctttgatgtcagattgaataaccagtttgagtttttgtctcaagaacagtggttttgtaagatatttctttcataataaagaaacagtaaaaaagaaaaaccgcaatacttttcaaaaaacaaatatgaaaagaattaaataaagatagtaaactgaaagccttgtccctattgcattttgccatctccgtccgattggtgaggtgtgatggtgtttgtacttgtgtctctggttttagcatcctcttgattttctctctgtcggtttgctactggtttgacttcgatgtaaggtctatccaattttattggtgcttccgacgttcacattaggaaagtttggtgagagtttctgatccttttgctcatttttagtgcttaaatcttgtttttctcatagtttttgaccttcattagaattttgtctcttggtttgatttctttgatttaaattagttttcccatatctgttgggttttttcttccctcttttggattgagtttctggagacaatccattgatccaccgatttatatattttaacttgtatcctactttggtttttaataaaatttagaggacaacaaaaaaatagtaaactgcaagcccgacccagtaacctattaaggtccaaaacgacatcgtagaacatagcaagtaaaagaagaaaagatatagagatagagacaatgatatcatcatcatcatcatccaacatg

SEQ ID NO: 17150 - DNA, 3000 bp, Unknown; identical to SEQ ID NO: 11501
  misc_feature (1)..( 3000): 2750-1469P.txt file - cDNA_ID_1807971; gDNA_ID_2214499; Annot_ID_133627

SEQ ID NO: 17151 - DNA, 3000 bp, Unknown; identical to SEQ ID NO: 11501
  misc_feature (1)..( 3000): 2750-1469P.txt file - cDNA_ID_1807971; gDNA_ID_2214499; Annot_ID_183921

SEQ ID NO: 17152 - DNA, 3000 bp, Unknown; identical to SEQ ID NO: 13578
  misc_feature (1)..( 3000): 2750-1469P.txt file - cDNA_ID_1807975; gDNA_ID_2214638; Annot_ID_136163

SEQ ID NO: 17153 - DNA, 3000 bp, Unknown; identical to SEQ ID NO: 13578
  misc_feature (1)..( 3000): 2750-1469P.txt file - cDNA_ID_1807975; gDNA_ID_2214638; Annot_ID_188181

SEQ ID NO: 17154 - DNA, 3003 bp, Unknown
  misc_feature (1)..( 3003): 2750-1469P.txt file - cDNA_ID_1807979; gDNA_ID_2214704; Annot_ID_136935
ctaattgatatttggctaactacattcaaattatcaactattattttagtaaatgttacagtgatattcaaggttaaaagactacaaaaaacatgcaggataacaatgattatagtaatatgacgaacatgaaaatctttcttatcataaagctgctatgtgtaagcaatctcatcgtacaaggacatagaagccgggacaaagtgtgagtgtgtgacagaccagaagtacagaacggatctaaattcttgatttcataacatgcatatggtgatgattagaaaattttataaagtataatgattagtgagaaccaatcatcattcatatatttggttgttggcaacaatttgtagagtggctcattcaaaaagaaaaaaacaatcttactttttggtttggttaatgagaatatgatagcaaaattaaagtttcacatgctaaaagcctaaaaattctgaattaaaggaagacaatgctatgaatatagaaaaaaaagcaacgcatgtgaataattgacagataagaaacgaaattaaaagtggatgtacgattagagagaagtaggaccatggaagttagggaagtaggaacatgtcatagataaggcccaccccaaatatgtggtcgtgcttcatcttagaacctcgtggtgtttggcttagctacgtcgtcaaatcatccatcagaatccagtttcagttttgtcttccaatcatgtttatacacgtgttcctatcgtctttaaagatatctcacgtctcttacattgcctagttgccctaataattttctgccggtgcgactagttttataagactatttgtagtttgaatgtgaagattcacaaaatgggtcttcataaaaagttaaaaacccttaccagttttcgtgatttttctattttgatgtaagtttctgtgaatcgatgtgataatatgtcatgtgagtcttttttctccggctgacatagtaacatgtgatttgataagaaaattattttagtatcgtgataaattttgtgaggtgtttaactttttgtttaaatcttaatgcaaaaacttccaaaccctagatttcttttttgtaattggttttgcatcaaaacacaatatccgaatgtaaaatattgaattagctaaacagtagatgtccactagatcatgagtaggcgatatacatataaatttcattaattcagagagaataataattaaattttgtaaaaaggtgctaaggcaaggtcttaatacaagtctaaattattcagatgaaaaattcatgttaggaaataggttggaccataagaggatggtgctatcaatctattaacaaaagtacaaataccctgagctgtattgccgtctagtttcaatcaacaatttcgatcataatggttaattacatccagaggattgacatataggattgtggtttattttggtttgattcggtaagtagaaccaaaatgctattttctgattaaggatatgcaatttctacacacctgaattcaaaaaaggcattggagctaattctagtcagatcatatccatgatatacatttagtaaaatgcaaaaaaaactcaaaattttttacctaatatatataagtaattttttttactaaaaactcatattgcaaataaatgtatatagttgctcataggtttttttttattttgcgagtttatattattatgtaattatgcggtgttacaataattaacaacggtcccgacctcacagcggctaaaccgaggggacaaaggctaagaaaagatgcaactagaaaacaaaatgaaccacaaattaatacgaacagtttgggccaaagttggttattatttgtcaatagcccaaaaagtccacgtcaagtttccctaatcacgcttcttccaattcacacaataatgtcgtcttcttaggaaacgccagacgagtttagcacatttcgctgtcatttgtgcaaatctcttatctgttatatatggttggggaggttgcatggattcggatagaggcaacggtacgaaaccgtgactagaagaaatatagcttgatggaattgaccaagaaaagaaacaatcaacacacgagctgagatattgcttagcttgatcgagaaacttaacttgttattgcaaagcccatttgtttcataattaagaagcccaaccaatacattgcacataaacatatgtgtcgactctcaagtctagccgcatgtgactttatatggttatcacactatactccatgtgaagcttgcaaaatttatttataaattccaaaagtgggagagttgtttcaactaaaagagcaataagaggattaagataagatgaagtttcaaataagaggattaagttttaacaatagattttgaccccaattttagtactagattctttttgttgttgttgtagattgttactagattcattgtggataaaatcatgttttttgtatttgacagctaaaccattaatttgtatgccagacaacatgaccaaaccgtctggtctacaaaccgaaccaaaccgccaagtctacaaaatatcaaaaccaaacctatcaatcaaacaggaatattcttccaccaccataggccatagcccacatcccctactaactagtgagaatgtagatcataacaaaacccaaatctatcaagcaaaccggaatattccaccaccacatagcccacatcccctactagaatgtagatctttatgaggtcatgtttgaatggtataatgaaatctcatagtaggagaaacccggtttaacacatttgtagaaaaccaaggattcaatcaataaccggaatcttgagatagcacctgtctagcgttgacgacaccaaaattgaaaatttggcatcatttgcgaaacagagagagatccattcaattccaaaaggattctcttttgggaaaaccctaaatcgacccaccaaatttggagactgtgattgagcatgagcgtcagaagttgatg

SEQ ID NO: 17155 - DNA, 3003 bp, Unknown
  misc_feature (1)..( 3003): 2750-1469P.txt file - cDNA_ID_1807979; gDNA_ID_2214704; Annot_ID_189785
gtaaatgttacagtgatattcaaggttaaaagactacaaaaaacatgcaggataacaatgattatagtaatatgacgaacatgaaaatctttcttatcataaagctgctatgtgtaagcaatctcatcgtacaaggacatagaagccgggacaaagtgtgagtgtgtgacagaccagaagtacagaacggatctaaattcttgatttcataacatgcatatggtgatgattagaaaattttataaagtataatgattagtgagaaccaatcatcattcatatatttggttgttggcaacaatttgtagagtggctcattcaaaaagaaaaaaacaatcttactttttggtttggttaatgagaatatgatagcaaaattaaagtttcacatgctaaaagcctaaaaattctgaattaaaggaagacaatgctatgaatatagaaaaaaaagcaacgcatgtgaataattgacagataagaaacgaaattaaaagtggatgtacgattagagagaagtaggaccatggaagttagggaagtaggaacatgtcatagataaggcccaccccaaatatgtggtcgtgcttcatcttagaacctcgtggtgtttggcttagctacgtcgtcaaatcatccatcagaatccagtttcagttttgtcttccaatcatgtttatacacgtgttcctatcgtctttaaagatatctcacgtctcttacattgcctagttgccctaataattttctgccggtgcgactagttttataagactatttgtagtttgaatgtgaagattcacaaaatgggtcttcataaaaagttaaaaacccttaccagttttcgtgatttttctattttgatgtaagtttctgtgaatcgatgtgataatatgtcatgtgagtcttttttctccggctgacatagtaacatgtgatttgataagaaaattattttagtatcgtgataaattttgtgaggtgtttaactttttgtttaaatcttaatgcaaaaacttccaaaccctagatttcttttttgtaattggttttgcatcaaaacacaatatccgaatgtaaaatattgaattagctaaacagtagatgtccactagatcatgagtaggcgatatacatataaatttcattaattcagagagaataataattaaattttgtaaaaaggtgctaaggcaaggtcttaatacaagtctaaattattcagatgaaaaattcatgttaggaaataggttggaccataagaggatggtgctatcaatctattaacaaaagtacaaataccctgagctgtattgccgtctagtttcaatcaacaatttcgatcataatggttaattacatccagaggattgacatataggattgtggtttattttggtttgattcggtaagtagaaccaaaatgctattttctgattaaggatatgcaatttctacacacctgaattcaaaaaaggcattggagctaattctagtcagatcatatccatgatatacatttagtaaaatgcaaaaaaaactcaaaattttttacctaatatatataagtaattttttttactaaaaactcatattgcaaataaatgtatatagttgctcataggtttttttttattttgcgagtttatattattatgtaattatgcggtgttacaataattaacaacggtcccgacctcacagcggctaaaccgaggggacaaaggctaagaaaagatgcaactagaaaacaaaatgaaccacaaattaatacgaacagtttgggccaaagttggttattatttgtcaatagcccaaaaagtccacgtcaagtttccctaatcacgcttcttccaattcacacaataatgtcgtcttcttaggaaacgccagacgagtttagcacatttcgctgtcatttgtgcaaatctcttatctgttatatatggttggggaggttgcatggattcggatagaggcaacggtacgaaaccgtgactagaagaaatatagcttgatggaattgaccaagaaaagaaacaatcaacacacgagctgagatattgcttagcttgatcgagaaacttaacttgttattgcaaagcccatttgtttcataattaagaagcccaaccaatacattgcacataaacatatgtgtcgactctcaagtctagccgcatgtgactttatatggttatcacactatactccatgtgaagcttgcaaaatttatttataaattccaaaagtgggagagttgtttcaactaaaagagcaataagaggattaagataagatgaagtttcaaataagaggattaagttttaacaatagattttgaccccaattttagtactagattctttttgttgttgttgtagattgttactagattcattgtggataaaatcatgttttttgtatttgacagctaaaccattaatttgtatgccagacaacatgaccaaaccgtctggtctacaaaccgaaccaaaccgccaagtctacaaaatatcaaaaccaaacctatcaatcaaacaggaatattcttccaccaccataggccatagcccacatcccctactaactagtgagaatgtagatcataacaaaacccaaatctatcaagcaaaccggaatattccaccaccacatagcccacatcccctactagaatgtagatctttatgaggtcatgtttgaatggtataatgaaatctcatagtaggagaaacccggtttaacacatttgtagaaaaccaaggattcaatcaataaccggaatcttgagatagcacctgtctagcgttgacgacaccaaaattgaaaatttggcatcatttgcgaaacagagagagatccattcaattccaaaaggattctcttttgggaaaaccctaaatcgacccaccaaatttggagactgtgattgagcatgagcgtcagaagttgatgaacaaagtcgacgaaatcgaggatttcagattcgaggatctcgaaatg

SEQ ID NO: 17156 - DNA, 3003 bp, Unknown
  misc_feature (1)..( 3003): 2750-1469P.txt file - cDNA_ID_1807986; gDNA_ID_1620689; Annot_ID_48523
tacaacgtcgtcaatgttagattttgccgttagtttttattttattttgttttcagttgtcataaacttatttcagttatcagttattataactaattgttttttgttcctcttttcctgctaagtgtaaacctattgcacaaatttcttgcatgcgtgttcaccgtatatatgtttttaattcctctttcgttattgggtttttaatgatgaaataaaacggaactcaactagggacagtacagttcatgatcatattggatacatgtattagttcatttaatttaattcaattatatacacaatagtttatttaatttctctctaaatgattgatgatgattgacgttattttcacggttttggtaccgtataagtttagtaaagtgtcaaaacgacattgtttgtgaaacatatggagtattttttcaagagttaatttgccactctatcatatcgtttctaaaaattgaaatcatttctagttttaatcctggtttagctgtagtgatactattatgctcctcattctcacaatttatttctactttgtttctttaccttcacaatttctgccaaatgagatcaatatagacgtcttcaacatcaaagtttttgtttataaatacaaaatttaaaataataattttggtcagagtcgatggttataaggtgatgggcgtgatggcaaagcatgtgacaaagttttatgtccactattctcttttcgcctaacgcaaattcgtgtacgttacaactccctaataataatgcgttaattactctgccaagctcattttcatttattactttacatgttttttttgtttaaagcattgtcatatttattgtcattatgaaacccaaaatgaaaggagttaattagagatcattgttttcatctagagcagagctctgaaactggaaccaattatttggagtcttgatgcaaattcatgtagccttggagctctgaaattgttcttctatatgtttgctgatcaaattgttaaaataatggtgagactgagactcatggtttaaatactagcaaaaatggtaaatttaaaatcccccttagccacggaccttgagcaaagagtctagtgtatgtgtctatatatggttcaccttttggataagaaatcaatttcaagctcatctttctacatagagagaaacttggatcttgtactttttaagatggaaacatccataaaaaggtaaagataaagctgatatggcaaaacgccaacaaaatcctacaagtaaataaatcttgggccaactttaatgttcctaaaagaaatgaacttagctacaaagttactagtcacgtctctgctgccaaaattcttgacacattctttacacttcttcgaacaaagagaatggtttgatccacaaaggatgcaatgcgcaccgcttccacaacatttgatctgtggcataaatcaatcttgcaccataagggcttgaaactttcagcttttgccactaacactctaacgcaaacttgtgttagactgcaaccaaatgaaatatttgagaagcaccagatccattaacagcaactatgagcccattacaatgatttgcctccatcagtgtcttggatcgctaacactatccaataaccagcctagctggtacttagacagaatttttttttcttctggatctgtgaaaataaatgtaacatgagccattgactaagatctagctctaattaactcagtcaaaacgacgatcaaaagattgaactattggaaatggaaggggccgcgcgaacgcaggcccccaaggcaacaaataatgacgcaggatctcccacttggggtgacctttggcttagcgcacctcaagtgcaggaagccaccagcctaggccacggatcttcatgatcacccgtaaaccccgtccaggtaagtaatttgcaatcctcgaccatcttctttatttatactatgctacacacgagtgcccatcctcaaacttccgatgagggagcatcaacattatctcgtatctactataggcaggctttcgttgtttgattagcccaagttttatttcttgataggccgcaatgtctatattccggtccaaatcaaacccaacagattttttttttgtcggctatttgtcacagatttctttttatatacgaggaacaaggttaattatattgaactaaacattaaaaaaaaaaaagaattttacagatgcaggttgatatttaacgttattgtgggtcaactcaactcataagcaaagttgatatgatactatttaaattgacttcaccacatccacttgacactaataaattgacttctccatccctatccacacatatttgaatcttccaataaggttccacgaaactgctaggaaaacaatattttctaaggcaatagtcccactttggttaatcataaaattgtcaaatccactatgtaatttgtgatccataataaattaaaccagttattcatcatctaagtcagacactattttaactctagaaaacttgacaaagtacatgaaatgtttttgaagtgaagtaacaaaattccaacatgtacaaaatatatatttttttttttaaacgaaaatatatacactagagacctcacctatttttcttaataatatcaaatctcacatatttgatgtacacacaaaattaaatttatagaaaatgaaatatattattttagaaaaataaggagaaactttgtggaaaaaatagaaaaatatttaaattattgtttttataaattttattttgggttcgaactcttcaactccctgaacacaagtcgcataaaacgaaggaacaatctagaagaagaacgataacatccaatctctctttatattccttccttccattgtggcaataagtaacaaaccttgccctctacttcattccctccttgttttgatttcatcgtctttgttagctctcctctgtttttttttcttagtcaatcgatg

SEQ ID NO: 17157 - DNA, 3003 bp, Unknown; identical to SEQ ID NO: 17156
  misc_feature (1)..( 3003): 2750-1469P.txt file - cDNA_ID_1807986; gDNA_ID_1620689; Annot_ID_164685

SEQ ID NO: 17158 - DNA, 3003 bp, Unknown; identical to SEQ ID NO: 17156
  misc_feature (1)..( 3003): 2750-1469P.txt file - cDNA_ID_1807986; gDNA_ID_2926182; Annot_ID_140623

SEQ ID NO: 17159 - DNA, 3003 bp, Unknown; identical to SEQ ID NO: 17156
  misc_feature (1)..( 3003): 2750-1469P.txt file - cDNA_ID_1807986; gDNA_ID_2926182; Annot_ID_200349

SEQ ID NO: 17160 - DNA, 3000 bp, Unknown; identical to SEQ ID NO: 8598
  misc_feature (1)..( 3000): 2750-1469P.txt file - cDNA_ID_1807990; gDNA_ID_1971820; Annot_ID_58311

SEQ ID NO: 17161 - DNA, 3000 bp, Unknown; identical to SEQ ID NO: 8598
  misc_feature (1)..( 3000): 2750-1469P.txt file - cDNA_ID_1807990; gDNA_ID_1971820; Annot_ID_176129

SEQ ID NO: 17162 - DNA, 3000 bp, Unknown; identical to SEQ ID NO: 8598
  misc_feature (1)..( 3000): 2750-1469P.txt file - cDNA_ID_1807990; gDNA_ID_2926158; Annot_ID_139601

SEQ ID NO: 17163 - DNA, 3000 bp, Unknown; identical to SEQ ID NO: 8598
  misc_feature (1)..( 3000): 2750-1469P.txt file - cDNA_ID_1807990; gDNA_ID_2926158; Annot_ID_198557

SEQ ID NO: 17164 - DNA, 3000 bp, Unknown; identical to SEQ ID NO: 13234
  misc_feature (1)..( 3000): 2750-1469P.txt file - cDNA_ID_1807998; gDNA_ID_2214606; Annot_ID_135675

SEQ ID NO: 17165 - DNA, 3000 bp, Unknown; identical to SEQ ID NO: 13234
  misc_feature (1)..( 3000): 2750-1469P.txt file - cDNA_ID_1807998; gDNA_ID_2214606; Annot_ID_187244

SEQ ID NO: 17166 - DNA, 3000 bp, Unknown; identical to SEQ ID NO: 5138
  misc_feature (1)..( 3000): 2750-1469P.txt file - cDNA_ID_1808002; gDNA_ID_1620766; Annot_ID_50110

SEQ ID NO: 17167 - DNA, 3000 bp, Unknown; identical to SEQ ID NO: 5138
  misc_feature (1)..( 3000): 2750-1469P.txt file - cDNA_ID_1808002; gDNA_ID_1620766; Annot_ID_167336

SEQ ID NO: 17168 - DNA, 3000 bp, Unknown; identical to SEQ ID NO: 4817
  misc_feature (1)..( 3000): 2750-1469P.txt file - cDNA_ID_1808006; gDNA_ID_1620734; Annot_ID_49448

SEQ ID NO: 17169 - DNA, 3000 bp, Unknown; identical to SEQ ID NO: 4817
  misc_feature (1)..( 3000): 2750-1469P.txt file - cDNA_ID_1808006; gDNA_ID_1620734; Annot_ID_166202

SEQ ID NO: 17170 - DNA, 3000 bp, Unknown; identical to SEQ ID NO: 4817
  misc_feature (1)..( 3000): 2750-1469P.txt file - cDNA_ID_1808006; gDNA_ID_2926217; Annot_ID_142250

SEQ ID NO: 17171 - DNA, 3000 bp, Unknown; identical to SEQ ID NO: 4817
  misc_feature (1)..( 3000): 2750-1469P.txt file - cDNA_ID_1808006; gDNA_ID_2926217; Annot_ID_203031

SEQ ID NO: 17172 - DNA, 3000 bp, Unknown; identical to SEQ ID NO: 12081
  misc_feature (1)..( 3000): 2750-1469P.txt file - cDNA_ID_1808010; gDNA_ID_2214530; Annot_ID_134258

SEQ ID NO: 17173 - DNA, 3000 bp, Unknown; identical to SEQ ID NO: 12081
  misc_feature (1)..( 3000): 2750-1469P.txt file - cDNA_ID_1808010; gDNA_ID_2214530; Annot_ID_184900

SEQ ID NO: 17174 - DNA, 3000 bp, Unknown; identical to SEQ ID NO: 13806
  misc_feature (1)..( 3000): 2750-1469P.txt file - cDNA_ID_1808014; gDNA_ID_2214653; Annot_ID_188699

SEQ ID NO: 17175 - DNA, 3000 bp, Unknown; identical to SEQ ID NO: 13806
  misc_feature (1)..( 3000): 2750-1469P.txt file - cDNA_ID_1808014; gDNA_ID_2214653; Annot_ID_136460

SEQ ID NO: 17176 - DNA, 3000 bp, Unknown; identical to SEQ ID NO: 4313
  misc_feature (1)..( 3000): 2750-1469P.txt file - cDNA_ID_1808018; gDNA_ID_1620698; Annot_ID_48722

SEQ ID NO: 17177 - DNA, 3000 bp, Unknown; identical to SEQ ID NO: 4313
  misc_feature (1)..( 3000): 2750-1469P.txt file - cDNA_ID_1808018; gDNA_ID_2926180; Annot_ID_140542

SEQ ID NO: 17178 - DNA, 3000 bp, Unknown; identical to SEQ ID NO: 5001
  misc_feature (1)..( 3000): 2750-1469P.txt file - cDNA_ID_1808026; gDNA_ID_1620753; Annot_ID_49847

SEQ ID NO: 17179 - DNA, 3000 bp, Unknown; identical to SEQ ID NO: 5001
  misc_feature (1)..( 3000): 2750-1469P.txt file - cDNA_ID_1808026; gDNA_ID_1620753; Annot_ID_166836

SEQ ID NO: 17180 - DNA, 3000 bp, Unknown; identical to SEQ ID NO: 7174
  misc_feature (1)..( 3000): 2750-1469P.txt file - cDNA_ID_1808030; gDNA_ID_1621130; Annot_ID_56446

SEQ ID NO: 17181 - DNA, 3000 bp, Unknown; identical to SEQ ID NO: 7173
  misc_feature (1)..( 3000): 2750-1469P.txt file - cDNA_ID_1808030; gDNA_ID_1621130; Annot_ID_172452

SEQ ID NO: 17182 - DNA, 3003 bp, Unknown
  misc_feature (1)..( 3003): 2750-1469P.txt file - cDNA_ID_1808041; gDNA_ID_1621146; Annot_ID_56734
tttttttttttaatttcaaatctcatgggacatcattttgatcatgaacaagttgaccacaaaggttttgtgtagaggttttggagtaaagcaaagaagtgaaaaagcacatgacttgtgctttaagcatagatgtatagaaaaacaaggccttatcttcatgtacttttaagccaagccaataaaccccacaaaccccattaattactctgcatataaattcaacccgaaaccaatcatctctaccaaagaaataaggaatctcattagtaggcactggatttaataatcaacaggaatcttctcttggcgttttgattgaagcatatgatggataagctcttcattctttctcttctaggtctgttattggtaactgcttatggagctgcagggaagatggtgtacacagatcttgacattcttgacgagcttgagaactttgatgtactggtagatgatgatgatgatacaaagctcttggattggccatcattcacaagccggcattctggtaaaaatctggtgaatgttgatacattcggtgcagctggagatggagtttctgatgatactcaggtttgcttattccataaaaatgacaggttatctagatacctaaaacgctatcagttctatgtctggaatgaaacaaatccccaaacttgaaatcatggggaaaatttctaaacaaattgtttgcattgtagacttggcctatagatatttacggaggtctagttagatatttttctgcatctgatctgtgcaatgctcttcccaaatcaggcattcgtaagcgcatggagcaaagcctgcagtacatcaaaatctgtgtttctggttccagaaggacgtcgatatttagtaaacgcaacaaagttcaatggtccatgtgaacaaaagttgatcattcaggtcaagttatcttcagtaggaaaacagaaactagaccataactatatatacaagtatgtcttatacaattcagaaacttgtctttgtttacagattgacggaacaatagtggcaccagatgagcccagcaattgggactcaaagttccagagaatttggctcgagttttcaaagctcaaaggggtcgtgtttcaagggaaaggagttatagatggttcaggcagcaaatggtgggctgcttcttgcaagaaaaacaagtctaatgtaaaatcttctatacccaaatctatctttctttatcacaaaagataagtgcctcgagttttcgaatagaatcttacacatctttcttgctcttttacagccttgcaaaagcgcaccaactgtaagaaaccattaccttcatcatttaccagttattattccttacaaatggctgcttatttggtttcgttcaacaatctgtttttgttttcccctgcaggcactaactatagaatctagttcaggtgtgaaagtaagtggcttgacaatccagaacagccagcagatgaatttcatcatagcaaggtcagattcagttcgagtctccaaggttatggtctcttctccaggagatagtcccaacactgatggaatccatatcactggatctaccaatgttatccttcaagactgtaaaatcggcacaggttttttttcttttgaccaaacctttatgcaaatgaaacattttacacttcgactacggttgtaataatcccttaagactggattaaacaggggatgattgtgtctcgattgtgaatgccagctcgaatataaagatgaagaacatctattgtggacctggacatggaatcaggtacatcatcaaatttctagattacatctgttccaaatcaaattataattagttggaatttcttgcagtattggaagtcttgggaaggataatacgacaggcattgtaacacaagttgtgttggacactgccttattgagagaaacaactaatggactcagaataaaaacatatcaggtacacaaaaaaaaaaaagcttcactatttagtaaaaacttcgatttggctagatccacaacaattttatttcattgtttctcattcgaacagggaggttctggttacgttcagggtattcgattcacaaacgtagagatgcaagacgtcgcaaacccgatactcattgatcagttctactgtgattctccaactacatgtcaaaaccaggtttccttataatacaacctcgtgattgagattattcaatcaaaatgaaactcaaagatgaaaactcagatatgtttttgttcttttttttggtataaatgcagacctcggcggttaaaatcagccagataatgtaccggaacataaccgggacaaccaaaagtgcgaaagccatcaaatttgcgtgcagcgacacagtcccttgcagccacatagtcctcaacaatgtgaatcttgaaggcaacgacggtcaagtcgaagcttactgtaattcagccgaaggttttgggtatggagtgattcatccatcagcggactgtctctactcgcacgacgacaagggcttggaccagactcacaagtcggaggaagccgagactggccacgacgagctttgatggtgatgttcaaactgttgttgtagtgagagatgatatgtaatatagttttctgaagcatatgatacagtaaaaaatgatattgtttttgtgtttataatcaaccatagttaaggttgttgttaacagcatttgtccaccttttacatcaaatgattttttttttcttttcatagaaagtcatatgcttcatctattgagcaatggccatcactttgaaaacttacgcttataccataaaccgggttctatacgtaaccaaatttcaatttctgatgggttaataataaaccgggtttataaattgggttatgattacacagtataccagaagctaacaaaaagctcaacgattcgtctcaaagtttcacactttcgtgaaattcttgttctcgaatctcgtttcatttgatacatttgaagaaatcggcaatg

SEQ ID NO: 17183 - DNA, 3003 bp, Unknown
  misc_feature (1)..( 3003): 2750-1469P.txt file - cDNA_ID_1808049; gDNA_ID_2214508; Annot_ID_133790
aattcatggtacaaacatcgaatatatatttttctgcttacacacaccaattaacgtggatagaccaattgaaatattttgttacgacaaagcaaaacaaaacaaacgtcatgtttcgctgtttgtttgtcgtcccgttaatggtaatctttcagacacatacagtacccaaacaagtaatttgactaaaattttctctctgtctaaatttcagaagaaaaaaaaactttaggatatattgccaaaagatcttaaaaatgggtcatatcattttgatcatatagaatccaacgacctttatcttttcgccgaactatacttttttgtgtccatttgtttgactttctttcacacacacatccacaaagaaaaaaggaccattcttctccttcttctagtcacccctcgtgcctctctttaacaccaaacccaaaactcccttctctttcttccttcctctccgatctccgttcacatctctctctcatctttatcttcttctttttttgccttgtgggttgaaagtttctatattttctctttctcttctgtttacataatccattttcagctcaagcagctgaagaataacgatcaagaaccaaaaaagaagaaaacgaatctgttcttagctttgatgggttcttgcttcagttctcgagtcaaagcagacatcttccacaatggtaccatctctctccaactatcaattttcttgcaatctggaattatgcatctctctgtttttaattcatggagatttccgattttgattattgtaaatggtcaacatgtgtgtctgtgtaggtaagagcagcgatctttatggtctaagtctctcaagtcggaaatcgtcttcgactgtagcggcggctcagaagacggaaggggagatattgagttcgacccctgtcaaaagcttcacctttaacgaactcaaactcgccacaagaaacttcagaccagatagtgtgatcggagaaggtggctttggttgtgtctttaaaggctggttagatgagtccactctcactccgactaaacctggaaccggtttggtcatcgccgttaaaaagcttaaccaagaaggttttcaaggtcaccgtgaatggctggtactgtgttttcatttccccaaacttaagagtcatgtgttatatatgtgtgaatgcgtgtctgatctgttgtgttgtgttgtgctattcagacagagatcaattacttggggcaactgagtcacccaaatctagttaaactgatcggttattgcttagaagatgaacaccgtcttctagtctacgagtttatgcaaaaaggaagtcttgagaatcatctattcagaagtgagtcccatggatcatctttatctttgattaaatctgttttcttttgtttttggttctgatggaaaatggttttaatataggaggtgcatattttaagccactcccatggtttctacgggtcaatgttgcgcttgatgcagcaaaggggcttgcttttcttcacagcgatcccgtcaaagtgatataccgagacattaaagcctcgaacatcttacttgatgcggtatgtagagaaatatacacattcaaagaattagatgtcttcatagtactttcctgatgactttgattcccttaaacaggactacaacgcaaaactttctgactttggactagctagagacggtccaatgggtgatttgagttatgttagtacaagggtcatgggtacttatgggtacgccgcgcctgagtacatgtcatcaggtaaaaatctatcaccttaaatatgaattatgactaggttgatcaaatgttttagagcataaggataattgtttttaaatcctcgtatcatttcaggtcacttgaatgcaagaagcgatgtgtacagtttcggagttttgcttctagagattttatctggtaagcgagcgttggatcataacagaccggctaaagaagaaaaccttgtggattgggctcgaccgtacctcacaagcaaacgtaaggttctcctaatcgtggacaatcggctagacacacagtacctacctgaagaagccgtgagaatggcaagcgtggcggtgcagtgtctctcatttgaacccaagtcgcgcccgaccatggaccaagtggtccgtgccttacaacaacttcaggacaacttgggaaaaccgagtcagaccaatccggttaaggataccaagaaacttggttttaaaactggtactactaagtcatccgaaaaacggtttacacaaaaaccttttggcaggcaccttgtgtaggtcaagttgataactgaattccaggatggacatttttccggcggtttacttgaaactgccgatatccgttttcgacggattgaatgcggttctggacaaaccgtgcaggtcaagactaataaaggatacattaaattttccggttacatgtcccatacccaaccttagagaacatgtgtagcctttagcttaggcttccttgtgtgctgttatattgagtatatatgaggtaatttttgcctcttgtgttgtaacacttgtatttttgttcctttaacatttgatgtagagatttttcctatatcttcagttttgaaacccaaatttattgcaagtcaaaatatgaaaattctaatcaatgtgcaatgaataacacaaatccgaattgtgctttgttggctgcagacctgcagttaacacaaatcttataaatttgaaatgtcgttcaaactccaaaccacaaaaaggggaagcaaaacgcaaccgtttcacgatttttgtctagtttggtccaatttctcaattacggttttgtgaaatgcgtgtcggtctttggttctgcattcgaactgtgtggcgttttgtgtaacttatccacttagtgagcaaaactactcgactcgtagtagttgcagagaggttttagccgcagaagaaaagggtttactctgtcttcttcagacttctcagtgatcgaagctatgatg

SEQ ID NO: 17184 - DNA, 3003 bp, Unknown
  misc_feature (1)..( 3003): 2750-1469P.txt file - cDNA_ID_1808049; gDNA_ID_2214508; Annot_ID_184175
atatatatttttctgcttacacacaccaattaacgtggatagaccaattgaaatattttgttacgacaaagcaaaacaaaacaaacgtcatgtttcgctgtttgtttgtcgtcccgttaatggtaatctttcagacacatacagtacccaaacaagtaatttgactaaaattttctctctgtctaaatttcagaagaaaaaaaaactttaggatatattgccaaaagatcttaaaaatgggtcatatcattttgatcatatagaatccaacgacctttatcttttcgccgaactatacttttttgtgtccatttgtttgactttctttcacacacacatccacaaagaaaaaaggaccattcttctccttcttctagtcacccctcgtgcctctctttaacaccaaacccaaaactcccttctctttcttccttcctctccgatctccgttcacatctctctctcatctttatcttcttctttttttgccttgtgggttgaaagtttctatattttctctttctcttctgtttacataatccattttcagctcaagcagctgaagaataacgatcaagaaccaaaaaagaagaaaacgaatctgttcttagctttgatgggttcttgcttcagttctcgagtcaaagcagacatcttccacaatggtaccatctctctccaactatcaattttcttgcaatctggaattatgcatctctctgtttttaattcatggagatttccgattttgattattgtaaatggtcaacatgtgtgtctgtgtaggtaagagcagcgatctttatggtctaagtctctcaagtcggaaatcgtcttcgactgtagcggcggctcagaagacggaaggggagatattgagttcgacccctgtcaaaagcttcacctttaacgaactcaaactcgccacaagaaacttcagaccagatagtgtgatcggagaaggtggctttggttgtgtctttaaaggctggttagatgagtccactctcactccgactaaacctggaaccggtttggtcatcgccgttaaaaagcttaaccaagaaggttttcaaggtcaccgtgaatggctggtactgtgttttcatttccccaaacttaagagtcatgtgttatatatgtgtgaatgcgtgtctgatctgttgtgttgtgttgtgctattcagacagagatcaattacttggggcaactgagtcacccaaatctagttaaactgatcggttattgcttagaagatgaacaccgtcttctagtctacgagtttatgcaaaaaggaagtcttgagaatcatctattcagaagtgagtcccatggatcatctttatctttgattaaatctgttttcttttgtttttggttctgatggaaaatggttttaatataggaggtgcatattttaagccactcccatggtttctacgggtcaatgttgcgcttgatgcagcaaaggggcttgcttttcttcacagcgatcccgtcaaagtgatataccgagacattaaagcctcgaacatcttacttgatgcggtatgtagagaaatatacacattcaaagaattagatgtcttcatagtactttcctgatgactttgattcccttaaacaggactacaacgcaaaactttctgactttggactagctagagacggtccaatgggtgatttgagttatgttagtacaagggtcatgggtacttatgggtacgccgcgcctgagtacatgtcatcaggtaaaaatctatcaccttaaatatgaattatgactaggttgatcaaatgttttagagcataaggataattgtttttaaatcctcgtatcatttcaggtcacttgaatgcaagaagcgatgtgtacagtttcggagttttgcttctagagattttatctggtaagcgagcgttggatcataacagaccggctaaagaagaaaaccttgtggattgggctcgaccgtacctcacaagcaaacgtaaggttctcctaatcgtggacaatcggctagacacacagtacctacctgaagaagccgtgagaatggcaagcgtggcggtgcagtgtctctcatttgaacccaagtcgcgcccgaccatggaccaagtggtccgtgccttacaacaacttcaggacaacttgggaaaaccgagtcagaccaatccggttaaggataccaagaaacttggttttaaaactggtactactaagtcatccgaaaaacggtttacacaaaaaccttttggcaggcaccttgtgtaggtcaagttgataactgaattccaggatggacatttttccggcggtttacttgaaactgccgatatccgttttcgacggattgaatgcggttctggacaaaccgtgcaggtcaagactaataaaggatacattaaattttccggttacatgtcccatacccaaccttagagaacatgtgtagcctttagcttaggcttccttgtgtgctgttatattgagtatatatgaggtaatttttgcctcttgtgttgtaacacttgtatttttgttcctttaacatttgatgtagagatttttcctatatcttcagttttgaaacccaaatttattgcaagtcaaaatatgaaaattctaatcaatgtgcaatgaataacacaaatccgaattgtgctttgttggctgcagacctgcagttaacacaaatcttataaatttgaaatgtcgttcaaactccaaaccacaaaaaggggaagcaaaacgcaaccgtttcacgatttttgtctagtttggtccaatttctcaattacggttttgtgaaatgcgtgtcggtctttggttctgcattcgaactgtgtggcgttttgtgtaacttatccacttagtgagcaaaactactcgactcgtagtagttgcagagaggttttagccgcagaagaaaagggtttactctgtcttcttcagacttctcagtgatcgaagctatgatgacgacaacaaccaatactatg

SEQ ID NO: 17185 - DNA, 3000 bp, Unknown; identical to SEQ ID NO: 11110
  misc_feature (1)..( 3000): 2750-1469P.txt file - cDNA_ID_1808053; gDNA_ID_2214478; Annot_ID_133183

SEQ ID NO: 17186 - DNA, 3003 bp, Unknown
  misc_feature (1)..( 3003): 2750-1469P.txt file - cDNA_ID_1808061; gDNA_ID_1620740; Annot_ID_49581
tatatatgtctccaatcaaggccttagggtcgaatggtgacagcgtatttggcagtgcgggaaaagcggatttatactgcggtacggtccaactgcggtacatgcgggagaaatatatttgcggtacaagtgtggtttttatagcataagcggtacggaataatgtttgattggtaagaaaataatttgcggaatttgtttgattggtaaatagatatttaagataaataattgataacaaaatatattagtaatataaatttaattataactatataatttcatttattgttaatgaaataatattttcatctactatttttttagaaatttgttatagctaaacctataattttcttttaaactattgagtaaaaattgactaaaatgattattttacaacttgttaattgttaatttagttctaataaactgttgtatcaaaccactcaagtattaattagtggttgttattaagcatttttctattttcataaatttaataaaaaaaaaattactttttttctttgtcaagtgcggatttttatttgaaccgctgcttattacttgctggataaataagtgcgttttcattgattaatgttcttactttaaaaaacgcaacattactttttttgttttctgaaaaataacgcaattgacaaaataactgtgattggtgacatattgaggttttccaaaaaagctattgaaatacgcacttatatatgtctccaatcaaggccttagattggtacgttcgtaggcgttcttatggaattttagaattttgttttaaatatataccctataatttgataagtatttttgaattaacttagatatttgttggaacaaaatgattttaagtgttgattagactcttgtgagtggtggttcaagttgaaatgaggatatttattttctttatttaaattttaatgaaaatatcatagaagagcaacattctcgaaagtttaaatatcttgcaataggtgtcaagttcgaaagagcactcctatgccttttgatctcttttactttaaaatcatcactttttacatggtcatttcaaaaacttctctttaaatcgttgaacaatttttttcttttcaaataataaatatctggacagtcagtgaatatggaactttctttatcaagtatgatatatgaatatgagaatgatgcattgatgctttgtatggttggttattgataggaataccccaaatacgaagtggtattttgatagataagactaaagagatcctaaagaaagaaagagatcgaaaaagaaaaaggaaaaagaaaaagaaaataggtattattagttgagtttaggaccaaaagtgcaacacaccaatacgaacccgtatacactactacgcgtacggctcttccttcactccttgtatgggtccctcgctgagcttctatagtggaagctccccaaacccaaccatgaaattggctcctcatcacattcacacctttaaaattccaatgtaatatattttctttctctggagacaaaacttattttcaatctagtctattagtttgagttattatttggagtttaaaaaatatgtccttttcttttatttggtatttctatccgagaacactttggctgattctctggcaaaggctagtcttaaatcttgtatcatctcctctagtgatagagagtttgagtaatcttaacgtccctaaatgcataaatatatgcattttgattaggatatttttttcttgttttttttttgtttgcattttgattaagatttatacacgatggttacaattttacttaattaattattatggcttttgaccccgaaatcgtatattattatattcaattcagaattttgtatctaaacaccgttagtgaaaagttttttttttcagtattattacaaagacaacgtttctcctaacaaaggagaaacaaattacaacaagatcatcacaatcatccttacatataaataatcttcgtttaaaataaccttcttatcataaaacaatgcccaacttagagtaacaagaaagaaccagcaatggatgtacaccaacgacgaccgcagagacgccaagagctgccgcaccgcttttggcagaatcagcagagcctgtaggcgcattgtcgtacgaggagtcacttcctagaggaccagccactgcaacgtcaccgtcaccaggagtaggagctgcatcgtcatcggtggttccgatttggtcatcggtgactggagcctcgacatgatcggttttggaggcagctggagctttggagggagacgctgaaggagatggagaggaggcagctgcggcaaggccaatgatggccatgaagacgagggcaaccacgacgacaatgttttggcgacccattcttctctctctccttcttacgtagaactcgtttaatttattttagggtttgaggtttattgattgtgatgatttccgaagatgagtttgatatgtatatatagttgtgttttgtgatcaagaccaaaaataaaatagaaaacgtttgaactaagatgtaggattaccttacaatccaatgtaaatctactggagtacctaaaaatggacttgttcagatatagattttgattggtgaacatgcgaatgaatatgaaaccattcgttcaacttcaaatcgtcgtattaacgagtgtcttattaaagaaccaaattatgatagtattgccatgaacattctattcatcttatatcagatgggctttaaacccataagcccaaacgtcttgttaggcccatgaatcaattccgatttacgattctgccatcaacagcgagttagggttttacactcgaccactttaagctctcaaatcttccagacattcttcttctcgcttttttccccatttcaacttttttttttcctctccagtgcactaggaaacaaaaaaaacccaagatctatagttcgatcggatcgagagaagctcgaaaatg

SEQ ID NO: 17187 - DNA, 3003 bp, Unknown; identical to SEQ ID NO: 17186
  misc_feature (1)..( 3003): 2750-1469P.txt file - cDNA_ID_1808061; gDNA_ID_1620740; Annot_ID_166409

SEQ ID NO: 17188 - DNA, 3003 bp, Unknown
  misc_feature (1)..( 3003): 2750-1469P.txt file - cDNA_ID_1808065; gDNA_ID_1621200; Annot_ID_57652
atcgctgagtgatgacgatgatgataattaatttcgaaagcgataacgttttgggagatttggaggagcttaccgttgtgtgaggagcgtttgaggtttttggaagaagctctctcgatgtgttccgcagagaaaagctaaagaatgtgaccttatcggtaatttgtttaatagttcaaattattttcacttttactcctctatttctttagtgtttctttttagtgccttcaaattttgaaaactaacaaactcaaccccaaaccaaatccagttaccaagttgcagcattacacttcatattttcatggaagactacattaggtggaacattgaattagcatagcgtcacgggagctcaagcgattctctgaacctttcttcgcttgtaagtcaaggaaaacaaatggtcactattggcttctcgagcatgattgtcttcgctcaggacccccagcggttttctcagagccttggcttccctctgaaagttattactagacgaaatcctcttgctctctgttgtttcagagcctctgtcaacagtcctaggcttaaaaccaggagacttcaggtggtaccggacatattcttcttgctttagaggtatattctgttctgtgatggagtaatttgaaacacggagagcactgggaacagtgtgtgttggatcatgaaacaccggttctgtaccttggattgatctttgtgtagtttccaaataggttaagaaagggtctgggatagaacagccaagagttccgtagggtggtttctcaaatgtcgtacctaagtatggagacgctgcaaatctagtactctttgaaccggtttcatggatttgcaggagattgtttcctggagctacatagggtttcctgaggatggcagaagaagatttagggactaatttgagaacaccctttggcaaagtctgatgatgatggccagcagaaactaagctggaaccttgataccggaatactccttccttggttatctttatcttgagactgttcttggagctgccactgcgagggaaggttaaacttttcgatctatttctttccacgggtttcactacattgggagttttgaatctacatgtagcactatccatttccttagatggaactctattgaggtccagtagcttgagattaccggtttgagttcgtcctgaccaaatgaggagccttgagtaattgcccaatttatttccatactgaacccacaccctttgcatttcggtaaatgtcctgatcagcttttcatgatagaactttaaagagtagtaatactttctcctcttgacaaacataacaccttctttgaaacaagctacctttggagtaaacaatccacctagcaaattcttgtaaaacttatcctctggattcccaaaatataaattggcaccatcaagaagttcctgcatcgtcaaactgaaagtctgtggatccatatctggcagaaaacatgagaggaagaatctttcttcttcagtcagaagtgagttccaagtctcaacagacaatattcccgttaaatctggtagatcgtagagctcgtatggtatgttacagagctgaccttcaaccaaagctagctcacagtttacttgcgcaatgtcgtaatcatcagagtcatcatcttcagagtctagcccaactgtttgattcttattcatctgtagttaaccacttactacccttaaaacacaagtacttcaaatctccaaccacaaactcagtagaaaggaacacaagcaggagatacctagatagaaaatgttaaagactcatcatcagcaattcacattacaagaattctactacaatacaatggacagcgagaagctgagtatgttactaatcagaaatcaaacgaacataaatagcattttactcactgatttcagcaacaacaacactaaaggctatataaaacacgaaatatacattgtgagatcaatgaagcactcaaaaagaagaagatacacaacaccagaaaatctcccagatcggatcagctacaaagcttaaacgtaatcgatcgcgaactcaatcaataaccaaaatcaaaagctccaacaaggcaaataactagagagcgaaaacccttggatttgacaacaaaaatgtgcagacaatttgaataaaaaacaagtatcatacaaatctcagcacaaatcagctccaatgagtttcaaaaacctaccggaactaataaaaaaaaagaatctcgagatattcagagaaatcgatcggaaagcgtaaaagacgaggagcttaccggctctaaagacaggtgaaattagcagattagggtcgaagaaaccatatccctttggctacagatacgaacttcatcgccttcaaagattctctgcttcctttctagagatttctatggcttttcgatcgatgcgacagtagagtagagactagagagactaattactgttacacttgtattttgatttctttaattaaagccgcctaaagtaactaatgccttgattactttaattaataatcatttttaaattgtgatttataatcaagttagacattacttcacaaatagtttgggcctggaaacgtataggcccatgtaaactttaataaaagaatcaccttgcaggtaagtataatatcctgatattattatttacttgatagaatgggcctataataaaagaaatcaccattaaagaattataggcccatgatatcaagtaaatatcaagaaatgatgattaatgatcaagttagacatcattacttgatattttggtaagtaggatcaatcaacggtcaggatccttttagtaaaatcatgtgtcattttcagtttgtctaaaagataagcctttcactttctctctctgtcttattagaaaagaaaatttgtaccgtttccaaagtctgagccaatcattgtgttgattctggaattctttgtgggaacgagaaatttgtacaagggagattcatcatg

SEQ ID NO: 17189 - DNA, 3003 bp, Unknown; identical to SEQ ID NO: 17188
  misc_feature (1)..( 3003): 2750-1469P.txt file - cDNA_ID_1808065; gDNA_ID_1621200; Annot_ID_174886

SEQ ID NO: 17190 - DNA, 3003 bp, Unknown
  misc_feature (1)..( 3003): 2750-1469P.txt file - cDNA_ID_1808072; gDNA_ID_1620642; Annot_ID_47522
tcaagactttgtaactttttctattcaataatgacgttaagagaaaaagaatttattttcagttcctcttctcttactagtttctttttatagaaaccaaaataaagttactgatctaatttttaaaaagggacaattgcatgggaatgtcaatatgattacgcaaacaacttctgcagataaaaatggtttgcagaaaatggaaagcacctatccatcatagctatcttggaagtctcgttatttcaaaaatatttctctcctttttattttcagctacttattaattccataatatttttatattaatatatttcaaaaaaatccagattttatttctatttttagaactataaatcaagaaattatctatgtaatgttaaattcctatttttttttagttattatagaaactgaaaatggtctaattcatacgaagtcgatttttctcacggcatattatgtaaaccatgaatgtattttattagtgattcgtaaaccctaagtttcatatacaataaaaacaaaaatggaacctaaattacgaataacctttatcactatacgataaagtataaaacactaataaatggaccctattacgaccaatcgtaccaatatttggtcgtatctttcatttttatttatttacagatttgtaaattttaaaatagacacttttgtgttggtcaataaaaaaatagactaaaataaaaaatgtatttacaagtgaaaccaaactaaaaccattatgagaaagaatctcacaaaattgaccagagtaaagagagagacaaaaatgggtcgagcaacgaggtggttcaagggtttgttcggaatcaaaccttcctcttgttccggcaccgactccggcactatttctaaccgccttgaccgctctttatgcgacagctacgagactataccacctaacatctccgagaaagaagctgcgtggctaaggtccttctacgcagcgggagaggaggaaaaagagcgtagaacgcatgcaattgcggttgctgccgcgacagctgctgcagctgacgcagcggttgcggcggctaaagcggctgctgcggttgttaggctccaaggtcaaggcaagagtggtccgttaggaggtggcaaaagccgtgagcatcgtgctgctatgcagatccaatgtgcctttagaggctacttggtactaacacaatttttcaatttttctaatcatttcaatatttttaatctttatgtatttgagccgttacatttttgtaacgtaaaaggcgagaaaagcgttgagagcgttgagaggagtggtgaagattcaagctttagtgagaggttttttggtacggaatcaagcggcggcgactctccggagtatggaagcacttgttagagctcagaaaactgttaagattcaaagagctctccgtcgtaacggaaatgctgctccggcgagaaaatccacggtaacacttacttttccggtttggccgtaccgagtttatttatttatttttatattaagcatacttagcaatcaaatctgtttagagttccataatttgatatatcaaacatagagatcattttaaataattttctcgggtcaaaagaaaataatcttaaaatgtaaaaagattgaaactgtttaacctttatgtaaaaagttgaaatcttcttaaactagtttgtaagcagataaacacttttttaactaggctgtaaaagtgttgatgtaactttttacaggaaagattctccggatctttggagaatcgaaacaacggcgaagagacagctaagatagtggaggtagatacagggacccgacccgggacttacagaatccgagcacccgttttatccgggtcggatttcttagacaacccgtttcgacgtacgctttcttcaccgctctcgggtcgagtcccaccgcgtctatcaatgcctaaacctgaatgggaagagtgcagtagcaagttcccgacggcgcagagcacacctcgtttttctggtgggtctccggcgaggagcgtgtgctgctctggtggcggagtagaggcggaggtggatacagaggctgatgctaaccggttctgtttcttgtcgggggaatttaactcgggttacatggcggatacaacgtcgtttagggcgaaactgaggtcgcatagtgcaccgagacagagaccagagagtaatgcttcagctggcggatggaggaggagtatcggcggcggtggtgttaggatgcagagacagtcgtgttcgggtgtcagagaagctgtggtcgggaatatcgagaggcgtaggatgcgttggtgattcttatttccataattattatccgtttagttttggttaattaggggagtaatgttattaatttaatatagtttgatattattatagttttctaagtttcactgacaaaatttaaaattgttgtttcttgtatgctacatattctatttctatgtaagttttttgctacggataatttacatttttattagcttaactaaaattatccgagtttttttatattcggtgttgagaaaacggtactgatcggttagtaaacaattattggttcggttaaatataccaaaccaatattatcggctacaacgcatgcaagagactattttgtaaacaaccacttaaacataaacacgtgttaacgcgattcacatcaacgcgtgtggaaaaaggaaagttgcttccttcgttcttaatcccttctctgtgaacacaaaaacgcgaaataacaaacaaaaaccaatacaagtgatttccattatttctcgtctacgtatacaattgatcttcccccatctccaattcagatttggacagaggtattttttgatccgattcttacgaatcctgaatcttcctcgtagattaatcgatcgatcggttcttaattcgcggaaaattgtttcagtaacctgtgatcgtgtcggttggggtagaagagatcgaagtgggagcaaaatcatg

SEQ ID NO: 17191 - DNA, 3003 bp, Unknown; identical to SEQ ID NO: 17190
  misc_feature (1)..( 3003): 2750-1469P.txt file - cDNA_ID_1808072; gDNA_ID_1620642; Annot_ID_163080

SEQ ID NO: 17192 - DNA, 3003 bp, Unknown; identical to SEQ ID NO: 17190
  misc_feature (1)..( 3003): 2750-1469P.txt file - cDNA_ID_1808072; gDNA_ID_2926195; Annot_ID_141232

SEQ ID NO: 17193 - DNA, 3003 bp, Unknown; identical to SEQ ID NO: 17190
  misc_feature (1)..( 3003): 2750-1469P.txt file - cDNA_ID_1808072; gDNA_ID_2926195; Annot_ID_201376

SEQ ID NO: 17194 - DNA, 1587 bp, Unknown; identical to SEQ ID NO: 4185
  misc_feature (1)..( 1587): 2750-1469P.txt file - cDNA_ID_1808099; gDNA_ID_1620689; Annot_ID_48548

SEQ ID NO: 17195 - DNA, 3000 bp, Unknown; identical to SEQ ID NO: 4726
  misc_feature (1)..( 3000): 2750-1469P.txt file - cDNA_ID_1808099; gDNA_ID_1620724; Annot_ID_165886

SEQ ID NO: 17196 - DNA, 1587 bp, Unknown; identical to SEQ ID NO: 4185
  misc_feature (1)..( 1587): 2750-1469P.txt file - cDNA_ID_1808099; gDNA_ID_1620689; Annot_ID_164724

SEQ ID NO: 17197 - DNA, 3000 bp, Unknown
  misc_feature (1)..( 3000): 2750-1469P.txt file - cDNA_ID_1808099; gDNA_ID_2926184; Annot_ID_140693
taaactttgagcccttcttcttccttatcaagaattgttataataaagcacgttagtgagaaaagggcgtacctaaaaaactcctgggaacagcaacagaactctccggcctctggttgttcctccttgctacctttccaaaactctgtggagtagatgaccgaggaagaagttgattctggtcgagagaagaagagtcagcatgctcatgcctcaccttgatgtgagggtaccttttgcagagaccagcaatatcatctttggttaaaagccaacaaccttggaggtcgagtgttcttagcctgttaggtggtctaaacttctcaagaccattgctggtcaaaactccatctcggactccgagactgactaggtttggaagagaggagagatggtggagtgtggaatctgtgagggatgtgcttgttagggacaaatgtgttaatccagtaaggctacttagaccggaaagagctttgtcacccaggtacggatgttctagactcagggtttcaagggaagttagagattgtagtgctgctagtgacttctctttttcttcttgtggagatattagatagtagaatcctgaaaaaaatagagtcgtagggttatgatagggttaataatcactcgttagatcttagaaggctcatacatacctagggtgctgttcatgcccaagtcaagggctttaatgcaaggcatcgtggtgctgataagcaagatggaaagatcgtcgacaaatgtctgggacatagataatgtctcaagttgtggcacatgtccagcaagattcccgaccccagaaggagtgatttgtgtatccgagacattaagattctttagattctcaccaacacatgctacaaacccaacagaatcatccccgaaagctgtggagctcagatcaagatgttctaggttaaacatagtttctaagaagctgaagtttttgagggaagtcttggaaacgtctaagtaggttatacagcttttgttggtaaaggacaaggactctgtctcggcactgaaattagctcccgataaaactagctttttcaaggaagctaatgagctatgagtttttggttcggagacaatggtgcacgtgttcatgtgtaagcattcaaggtgcggaatgtttggagtctgtgtgatgcttgtccacgagaggtttaggaagctcaagttagaaaatttgagaatactgacagctccttggttggttacgttgcttccccagatgtcaaggtactctagctttgtcagtgcctgagcagcaataaagaaaatggcggtcagaaaaactaaaaaaagattgatcgtctacatattaaatgttattacaaataggcatgtttttcagtgacaaaaataaaataaaaataggcatgtttttaataagtgaattcgggcatacaaacatcttcacgcaagaaactatattgaacatacacttgaacttcatttgtagggattaatgggtttaataaccaggaaatgatatttgaattttagaatcctgaagactaaatagtttctgtgcacattatactctatactcaacatagtagtagtacctagaactttacaattttagcagagctctctaacaaatttaactagatagatagatgataactattgaactacacagttcaataacatacatcatgcaattaaaacaacccctaatgactacaataaagaaagagcacaggtaatacctggagagaaatcaagttctgatcagttacaggtaagccgcccaaatccaaaagagacaattttttaagtgaagcaagaagagaaattccaacttcagtgacacctgtctgtgaaatccacaactttttcagatttacaacagattggaggtgcttcataccagcatccgtaaccttgaaacatcttgaaaggtccaactctgtcaaacttgttaatcctgaaaatccaatatcacatattaaacacttaaatttctcttaaacttccattccaaaactcggagtatatcactcaacatacctgtgataggccagagggtggaactgttgattctctggcaatctgaaagatttagagtaattagattaacgaagcctccaatgtaagccatccattctgcgttaactgagcttttgcctcggagatctatattctctacagaatatttgaatcctctgcacagaaaagagtcttgtttagttgtgtgatacagatacaatagttcagtgtccatgcaatcattgcattttccgcaacgatgtaccaagaccaacacaattctacagctaaacacttcaggaataattatttcaacatgaatacagaaaaaaaaaaaattctaatcaaatttaaaaactaagatcccaagcgatcactcaatatctcaaatcgaagcatatatatatatatatagctcagcatttcgagatcagaaatcagattcatattagaaacgatcagaactatgtaaggaagtgaagagtttactcgagtaacgaagggaaaagaagccgctttttgaggaggcgacggaggagagcatcagcaaggtgaggaggcagactctcaagactacgccgctgaagtcgccatcgttccaccgcatctccgctcttacaagcttcctttaagcatagacgcaccaaaggactctccatctccaatctccaaatcgctgaaatctctgatcttagctccaaatttcacaaaccgatccaacctttatataataagaataaaaaccctaaataaaatagaaaatcaaagaattaaaaaaatccgccaaaaacaaaaaacaaaaagttgttcatccttattgggccactaaagcccaaacgtttctagcttatatggcccgttgattcacgtgtatcagcacgtgccttcttctattgaacgttgtcgagtgtcgactatatcatactaatcttagctccaattctgcagattttactctcatcctaaataaacctctcttcatcgaaaatg

SEQ ID NO: 17198 - DNA, 3000 bp, Unknown; identical to SEQ ID NO: 17197
  misc_feature (1)..( 3000): 2750-1469P.txt file - cDNA_ID_1808099; gDNA_ID_2926184; Annot_ID_200474

SEQ ID NO: 17199 - DNA, 3003 bp, Unknown
  misc_feature (1)..( 3003): 2750-1469P.txt file - cDNA_ID_1808107; gDNA_ID_1620636; Annot_ID_47373
accaaaagaaagcttactgagatgaatcgagatgggtcaggaagccaaggctcaactaaagctgcggcgtggaaaacgatatcgcaaccggagcaagcatccgttagagaacggtaatccgttacgtctccataggcgagctcaacttctggaggtaagtcagagagatcgctggtgcggcggaccaatgcacgtacggagtggccacgacggaggagaacgtggcagagtcgtgcgcctaagtaaccagtagagccggtgactaatattttcatattttctgtttctgtgttgggcatctttgggcccatcgttgcttttctaagccaagaaacctctaattggttgagagggtttaattaattaatatttaatacaaacatcattgtctgaaagctggatcaaccaatagcaagattcttttgtgttttgttttgtcacatactacagataacaaagaactagtaagtttctcatttgagtgaaacaaaatttcaaattacagacagatccacgaaaatacaagatgacataatgagtaaagaaatctcaattcggtgatagctagttcgaaacaagattagagcacgaaccttgaaacaagattacacctctcctctgtatccatcagagccaaaatggtctttcctagaactagatatagctacactcttctgatgttcaaattttggacactgtagaatccgatgcccgagaccaccacaataagcacaacccttgacaccgcttgcattagcaatggtttctgtttcttccattggaccattaagctcagcaaggacaggtggaatcctctgtttagcttcttgcaacaagtgtttcaaatcgagcagcgtgatttcgctttggttcttgtttataaacgtagttgctatcccagttttcccacagcgacctgttcttcctatcctatgcacgtagttctcaatctccccaggcatgtcgtagttgattacatgttgtatatcagggaaatctaaaccctttgaagcaacatcggtcgcgaccaaaacgtcttttttcccagctttgaacaaagatattgcgtaatctctgtcttcttgatcttttcctccatggatagccactgcttccactcctttcagtaacaagtactcgtgaatatcatcaacatcagctttgttctcacagaatattaaaaccggtggagtggttttctgcagacactccagaaggtaaacaatctttgcttcttgcttgacgtattcaacctcctgtatgacatcgagattcgcagctccagctcttcctacattaacagttacaggtttcaccagagcacttgtggcaaagatttggatttttgcaggcattgtggcagaaaacaaaagtgtttgacgctgagacttaaagtggtcaaagacatgtcttatgtcatcttcgaaacccaaatcaaccaacctatctgcttcatccagtgtcaacaacctgcaagcatctaagctcatctttttcttggcgaggatatccttcaaccttccaggagtagcaacaacgatgtgaacacctttcttaacaacgtccaactgtgatctcatatccactcctccaatgcatagcaacgacctcaaccgcgggtatccatcctcgactaaagatgccacaaactgttcaaccacatcgtaagtctgcttagcaagctctctagacggacaaataacaagcgcaatgggaccttctccagcagctataggcatcattatctcctcctgcagagctaatatgatcataggaagcacgaaaaccaacgtctttccggaaccagtgaacgcaatcccaatcatatctctgccagacaaaacaacaggaagaccctgaacttggataggagtagggtgcattattcctttatccttgagcatacggagaagtggactcggaaatttcatatccatgaagtttttgattggaggaggaatatcttcaccgttaactgtaatatgccattgcttcctaatcaaatccatctgtttggttgacatcttcctaacgtgcagagggggtttccaccatgttgagagaggctctgtataagtgatacctctggctaattcaccaacagacataagcttcttcttgtcagataaatgctccatcatccccttctcttgtaaaataatggcctcggtagcactgacttaaggtacatgtcgcttgagctgagttgcttgaacaagtaagctaggtttagcttcttcagtgagctttaccttgccaggttcttccaccacctttcgcttcatctgcgctagacgctcctctactggaacatactccacgtaaccatcatctacttccatgattcaaaatccactcgccaactttttcaaagatcgaatccaaaccctaatcagcagatctctcgactttcaaggaagatcacgcagatagatatgaccgacacggagttttggttaaaccggggttggggaatgatcgggtgtgttgtgttttctgattataagcaaagaaaagaaaagctacaagaagagagtctcaattagaattcgtatgttgacaaggagctaggtaaaaggtagtttttcaaaaatttaatttccatttttttcatatattggattgaaaaatggcaatgacatgaatcataggattatcaccacatttaaagatgtagtatttacataacaattgcaagaaataatactacaaaacttcctatctagtatagacgctgccaaagaaatacatacgacgtttttatccacacgcattgatgagattggtatatatctctgtctctgtcgagtgaaaaataaattaatagagtaataattaaaagctctctctctctatctcccacgatttcctttttccgccggaagaagaagcaaaaaaaaaagaaatcgaatctctctttcaagtgttcgatttaaagcaaaagtgtaattataatcggaagcgagatcttgagaaatggtgggatgacggcggagggagatg

SEQ ID NO: 17200 - DNA, 3003 bp, Unknown; identical to SEQ ID NO: 17199
  misc_feature (1)..( 3003): 2750-1469P.txt file - cDNA_ID_1808107; gDNA_ID_2926204; Annot_ID_141646

SEQ ID NO: 17201 - DNA, 3003 bp, Unknown
  misc_feature (1)..( 3003): 2750-1469P.txt file - cDNA_ID_1808111; gDNA_ID_2214519; Annot_ID_134026
attctcctccgacaagttcatatgcaatcatctgatgagcatgtactccaagcttggagattttccttccgctgttgcagtatatggacgtatgcgtaagaagaattatatgtcatctaacatactcatcaatgggtatgttcgtgcaggcgatttggtaaatgcccggaaggtgtttgatgaaatgcctgatagaaagctcacaacttggaatgctatgattgctggtttgatccagtttgagtttaacgaagagggtttgagtttgtttagggaaatgcacggattggggttttcgcctgatgaatatactcttggtagtgtttttagcggatctgctgggttgaggtcagtgtctatagggcagcagattcatggctacacgatcaaatatgggcttgagttggatttagttgttaatagttcgttggctcatatgtatatgagaaatgggaaattgcaagatggcgagattgttataagatcaatgccggttcgtaatttggttgcatggaatacactcatcatggggaacgcgcaaaacggatgtcctgaaaccgtgctttatctgtataagatgatgaaaatctcaggttgtaggccgaacaagatcacatttgtaactgtgctcagttcttgttctgacttagcgataagaggtcaaggtcagcagattcatgcggaagctattaaaattggggctagctctgtcgtagctgtagttagttcattgatcagtatgtattcaaaatgtgggtgtcttggagatgcagctaaagctttctcggaacgtgaagatgaagatgaagtgatgtggagctcaatgatttctgcttatgggtttcatggacaaggcgatgaggcaatcgagctgtttaatactatggcagagcagacgaacatggagataaacgaggtcgcgtttctgaatttactttatgcgtgtagtcattctggcttaaaagacaaagggcttgagttgtttgacatgatggtggaaaaatacgggttcaagccaggtttaaagcactacacttgtgtggtggatttgctcggtcgagcaggctgtttggatcaagccgaggcaataataaggtctatgccaataaaaacagacattgttatatggaaaacattgttatctgcgtgtaacatacacaaaaacgcagaaatggcacagagagtctttaaagagattcttcagattgaccctaatgactctgcttgttacgtcctgcttgcaaatgttcacgcctcagctaagagatggcgcgatgtatcagaggtgagaaaatcgatgagagataagaatgtgaagaaagaagcgggaatcagctggtttgaacacaaaggtgaagttcatcagtttaagatgggagatcgctctcagtctaaatctaaagagatctattcatacctgaaagaactgactctggagatgaagctgaagggatacaagcctgatacagcgtcagtattgcatgatatggatgaggaggagaaagaatcagacttggtgcagcacagcgagaaactagcggttgcatttgcgctcatgatattacctgaaggtgcaccgattagaataatcaagaacttgcgggtttgcagtgattgccatgttgctttcaaatatatatcggtgatcaagaaccgagagatcacgttaagagatggtagtagattccatcatttcattaacggaaagtgttcttgcggcgattattggtagctgggcagttaaagtatgctatgactctctgcttcagagtctttctggagtcttaagcactcagattggatcgggaagccatctgggacgaaagcattcagcagcaagggtaaaattacactgcgggtagtagctttgtagtctaccttgagattgctcctgcctgtgttattcttgagtcaggaacatgaagtggtttgctgtcaactttacttactcaagccatctccgcaaggtagaaactatggttcgcgttatttcgtatgtaccatgtttttggtcgtttgtgtagtttctaaccttccacacccttggcttgcgattctttccaaagcagagatgttagatcagaggatggagtgggttctcaagtagaatgcacttgcgaatccctcagatcagatttttcataggtaaagttcgttaacttcaacaacaccactttagtaaacatgtgataatcaatcgtcataagcatcttcgattcatttttatcttatgcaagtgtttgctttattatgatttgttaagttttgcataaatacggacgttgaagcacttcccagaactcatgagtgtttttataaactatttattaaaagttagtataagaaaactataacataaaagtaaaatataatttagacaaatgtagcgattggtccagttactcatccaaaattccaaatgaatcttccaccgttgataattctattccattgttttcttctgtagaagaccatatattattaagtctctagtccattgtcaataaatggaaatacaaaaaaaaaaaaaaaaaaaaaaagaagaagaagaaaaagacagcatttaatgaacgaaaataatattaatgaatttggaagaaggaacgaaccaacgagaaaaatcaacgaaataatttagacaaatgtagcgattggtccactacccatccaaaagtccaaatgaatacttcaccgttgataattctattcaattgttttcttctgtagaagaccatatattattaagtctctagtccattgtaaataaatgtttctttcaaataaatggaaatacaaaaaagaaaagaaaaaaaagacagcatttaatgatgataacgatttggaagaaggaaccaaccaattagagtaacaaaccaaggaggcgactcacatgaaagcaaaagctgacatggcagtgaattcagttttataaaaaaggcttcaaggccgagagttcgtagtacaaactcttctctcagtcatcacagaaaataaaaaacaatg

SEQ ID NO: 17202 - DNA, 3003 bp, Unknown; identical to SEQ ID NO: 17201
  misc_feature (1)..( 3003): 2750-1469P.txt file - cDNA_ID_1808111; gDNA_ID_2214519; Annot_ID_184551

SEQ ID NO: 17203 - DNA, 3003 bp, Unknown
  misc_feature (1)..( 3003): 2750-1469P.txt file - cDNA_ID_1808122; gDNA_ID_2214543; Annot_ID_134521
tttctaatattattaaatattatagatggtatatatttttaataccaagtgtctggtagctcaattggtaaagatcatagatgaagtttagaggtcgccggttcgagtgacgcttggaacgaaactaagggggtgttattagttaatgaattttaatagaattaaaatccaacactaatcaactgttattcaactaatgattctaaatccagttttaaaatctagtgttattggaactcatctttgtaatcatgcttaatagattttaaaatttagtgttattcaattaagattttaaatatttcattaaaatccagtattattcaaaacaaaaaaacttgtaaaatccttgtatattagttcatttgaaatgaaatctctttggagtttcatgagtaaatcattagaatcaatattcaagacatattgcatagattatattgcatagattttgaaatttatacaaacatatttttaaaagcaacatcagaaaacaaatctaaagcttaaagaattgactttaactccataattgaataacaccacctaatattacatgctgtagttttggatctggaaaaattacggatttcggcctagaaccttcttatattaaaaaaaaaaaaaggtatatatttttattgtcacgaagaatgtgtgtatacacgaacgctcataatccattgaagtcaatttcttgcgataaacgtagtttatttcttgcacacaatcaaatctagttacgtacattagcaaacactgttttagattggtccgagtgattgtttgactttgatcgaaaataaacacacaattttaattaattacctttgaaaatatgtaattacaatgctcatattagtgcaaagaaaaaacaacaaatataatttgaaccaatagtttgttcactagcaatatattatatgtatagttgactctagtacattagtatcaatctaaaaatctaatctaactcgatattaggccatatgttttaacaccaaattagatttgaaaaacatggcaatggaaacacaataatatttttaagtcacatcagagaagaagatgcatagaatatacctagaaaatattcaattcgccaaggagatcaatgattaggtcataggagtaataaactatagaataaaattatgtggaaaaaataataaataaaattaagaaaagaaattgggttgtcaaaaacacacatgtatctaagctgtcaccactcgtgatactctgttcgaaaaggacatctttagattcggcatcacattctggcatctttgccgccaaaattactttattgtataaacaatattttcctcttgagtaagaataatccttcacgagaaagtaaaaattaactttgatcttgcgagcaaaagtagtttacatgtttaatgtgatatatgcaaaataagtgatatattattaaactgtaattggtaattgatgcggatcaccacactaaacatatttgatcattgttcatgtgaaacttaaaatatttttaaaaagtcgagtatgagtaggtgtcttttggagatgccatgttctgatggtttgatttagcttcaagagtgtgattcgacatttgaaaaattaaataatgcatcaaaaaatggttagaaaaactctctcttcaagaatatatatgtcttaatatgcaggttaagaagcacatgaactatttagtctatttcacgtgcaattaagatgtagtcatattccaagagacatgttactgttgcaatcttaggtcgaaagcatcatcttttgtcgaaacaaaagttccaagagtccaagacattaagttacaatatgcatatgatgcgagcaaatcatcacccatttgcacaacttctttcaaaaccgcataaaacagtttttttttttatctcgcttaagagaagcaatttttagaattagaaaaataccttcaaatgacaatgatccatatcttgaaagttatttttgttgcttcagctctattcaagcctcacatcttattcgaaatatccgtaaaactcattgaattcaacaaccacaaaccgtacttcatctttcgagatcctaaaccgtataaatcacaatccttgtctcaaatgtagaatacgatctccatacacaaataattgaaaaaaaaaaacttgcacatgaataatccgtttgtttgaaaaacaaatatctaattttttacaagaatctttccaaaacataaccaatccaacacttaaaccaataagcctaccagttgacacatggtcactagctagagtttataatcttttcaatgaaccaaaaaatgtttcttaacgcggttttaggtttcgaaatataatcagaatattgacaaacatatgttcttctaatagcaataaattttagtatatgctctatacaaaataaatgaaagattataagatttaaatgcttatagatatatacaacacacacgtaaacatagttttttttttttgacataatacaatgatatatatttcttttaacagaatatttatttccttaactattgggaataatttcttttgaaattgatgacaaccaaaaaaaaaatcttatttgaaatttcaaatagaaggtgctgattcttaaagatttatgaatttattaaaaataaaaaatagtaaagttgagttttttgaattaaaaaaggaagaggaaagaaaagggatgtgtccatgattgattgaatggtgtgatttagtttttgaaaaatattattataagtttagttttttagttttctctctggattttcgctggtccgtcaatggtgatctgagacaatttcacgaatctaattggtttcgatgtgtgacagagagagacaacgagacgaatttcaaatctagggtttctcattttttgctcctctgttctctcttcttcttctcaatcctttattgtcgcgaggaagaggacgacgttgaatacaaggagaggacacaaggaaaagaaaagagacgaaagatg

SEQ ID NO: 17204 - DNA, 3000 bp, Unknown; identical to SEQ ID NO: 5045
  misc_feature (1)..( 3000): 2750-1469P.txt file - cDNA_ID_1808130; gDNA_ID_1620758; Annot_ID_49939

SEQ ID NO: 17205 - DNA, 3003 bp, Unknown
  misc_feature (1)..( 3003): 2750-1469P.txt file - cDNA_ID_1808137; gDNA_ID_1620775; Annot_ID_50271
ataaattccaatggattaattataatcgggattttataaacaccttgacgtgatccaacatatgtctattctctctcttgctgcattaagattattgaaacacatgcggaccaaattaaaagtattatagaataaatactatgaatacaaggcatatatactaatcaaacatgcagaaccatgatagtgtagcagaaataagactttaatgcagtatttacttatcgaaattatatggaccataaaaagtgtcaatgtgtgaataaaatccagttaagactctaaaatctaaattatgattttaaataacgaattttcaaggttttgaatatgatgcattaattgttgcaaaaagaggacaagaaagataggatgcattggatggagggaaagcctgaaagcactccgcaattaaatttattttcatttctttaaagttttagttatgtttttttttttttttttttatctttataaacattactgtatccttctttcgtaaaaaaaatctatttaaaaaagaacattcgcatgttatgctttttagccattaccaaaatagagccgaccagaaaagtattataagtttataacacaatatacagagtatttataaatcattttcgttggtataaaatgtattttcaacaattttgctttacaaattgatattctgcttgtttgttttatatcaatcatattgatcattttaaaaacactagtcagtactcagtagtcatgtatatttttgtatgtattaaacccatgcactagatcagtagtagatttttttatttttttttcacaccaatcatagttagttttagggtgaatctgctgtataaccaaaatccaatctaaaattaataatataacatcatattcaaaaatattaaaaaattaacaaattagagtagtgaaaagacaaaattattcaacggtgaaagatacgcgctaaagaggacgtgatgagatatgtggaagaagagagagaataatctaatgttataaaaattaatattaccccaaatgattttaattgttgaattagtgatataaaaataactgattaaattttgcaataggtttataaaaacatagatttttttttgagtataacatgattaaaaattttaaaatctaatataaattatttaaaatagtggataatgtttgtataaaacagacaaataaaatagtatagaataaaactaaatagtatagaacaaaacgtagacaatccaaataaccgaattaaaccgctttgatcaaaaaacactataccctaagatacaacattgacaacccaaataaccaaggtaaaccgtagcggtgacgttgacgatggtaagattctgacaattttttttacccattcgttaatcaatagtttaaatagacaaacaaatcgaaatcgaatgaattggtttgtttgtttgtaggataagttaatagaattacataaacattttctgggcaaatcaaagaaattggaatctttaatagactaaacattgatgtcaaggatatgagtgattgtccgttggagattctattgccttggtgatgcaaacggatttaggagagagagagaaagagagagagaggaattgtgacagttcgattgtgaacagtgaggggaagaagaaaagtggagaaaaaatatcgagaaagagagggggagagagaaaatgagaggagaggcaaaggggcaaaattgaaaatagtatatcaaatatagaatatatcatccatcttttttgttgatgtgattttcttaattataatatttttgtgcgttagttctgcaaattctccttagttttaggcaagtttgcaacacttaaactctaataccatctccattggagttttttataagagtttctcacaataaaaaaaaaaaataatgaaaatgacggaaataaagtgtagaaagttaattctgagatactctttacaacccatcatgacatttctcttctcactattggttcaaatttttaacaatttttttttttaaatcaaataattaaattataatataatattattattttttgtctaaaaaactttgtgggtttctcatagatggagatgccgtaaaacatatgagaaaacaaaagataacctctgacaaaaaaaaaattgaaaacagaagataatgttatcaagatgcattattatattggacctaaaacgagattatcaaacaaaatagattggtgcataaagcttgtgcatgttaataataggctacaatcttaaattcttataaggaatataactttttaaaatatgatttttggtaaaaactttaatttaatatttttctttggaaaataacattgggctattaaatttaatagtggtgaaagattcaatgcaagaatggcaccggatatgaggagattttcatatttacgtgcctaattaataatgtgaaactgattagccaattaagaaataaaatttgtattggggattttttttttgtttaaataattaagaataaacaaaaagagagaaagcaaagagacacacatgcaagcacgtgatgagtgcatgtctcgcagagtctcacgccatgcacatttcatcatatcaacttcgttgactccttctcagtatgtctttacctttttcctcttatcaattcaaattattcaatacatgttgatgttttaatttaaatgggctataatgaagtttatcagcccaataaggcccacttatagattggtttattttttaaaatttacaattgttatattggcccgttttaagcccattaagaatcacatcatcaagaaatccaaaatctgaaaagtatgtggctatgtggaagcagaggctggcgcgtgccttatctgcttctctctctccagtggtctcaaatctctctgtgtgatcccacttgtcatcctcctccacaacataaagcttgagaccataaccctttagcgttttcggctaaagctttcgctgactactacaacaatg

SEQ ID NO: 17206 - DNA, 3003 bp, Unknown; identical to SEQ ID NO: 17205
  misc_feature (1)..( 3003): 2750-1469P.txt file - cDNA_ID_1808137; gDNA_ID_1620775; Annot_ID_167685

SEQ ID NO: 17207 - DNA, 3003 bp, Unknown; identical to SEQ ID NO: 17205
  misc_feature (1)..( 3003): 2750-1469P.txt file - cDNA_ID_1808137; gDNA_ID_2926205; Annot_ID_141697

SEQ ID NO: 17208 - DNA, 3003 bp, Unknown; identical to SEQ ID NO: 17205
  misc_feature (1)..( 3003): 2750-1469P.txt file - cDNA_ID_1808137; gDNA_ID_2926205; Annot_ID_202143

SEQ ID NO: 17209 - DNA, 3003 bp, Unknown
  misc_feature (1)..( 3003): 2750-1469P.txt file - cDNA_ID_1808145; gDNA_ID_1620653; Annot_ID_47776
ctctctctatctctaaaagaaagagaagcaaaaaagtaaggaatgtttcctcgcaatcatcatcatcatcaccatcttcgtcttcttctttgaaacctccagcgacttcctcgtagttctctcacttatacacttactaatacagagtaacagagagagacagagtggactcttcttagagtaagatgggaggtgtgacttcttcaatggcggcgaagttggcgttttttcctccgaatccgccgtcgtacaagctggtcagagatgaaacaacggagctttttctaatgagcccttttccccatcgagaaaatgtcgacattttgcggctgcccacgcgccgaggcaccgaaatcgtggccatgtacatcagatacccaatggccgtcaccacccttctctactctcatggaaatgctgccgacatcggtcagatgtatgagctcttcatcgagctcagtattcacctccgcgtcaatttgatggggttagtaaatctcccagatcagatttttctttctatatttagctcaggatcttgctcagaaagtcctcgccttttttggttttgctctgttttctggatttgtgcaagtagatttgaagcttctagatgcagaattttggtcttagtgttagagagaagtggactttattaagctgtggatttgtgattcacaaagcttttgaaagtttaagttgcagactcataaaatcttggatttttgctggaagagtttgtctttagggtttgtctgaatcaggatctctactgatcctttatcaaagagacaaaaagtagttttgaggttgagatgtttgagtttgattgttgacacttgacaacaagtggtcttgggcaaacattaccatttctagaaattcaagatctgttattgtttctgtttctaaaggcaagtactgaatacccaaaatgtagttctttgatgtaacaactttttggctcattcaggtataacttgggattctgggatagattggtttctcaaattagtacgctatttttttctgtcgtatcttcaagtgaacctgaaattagtagaatttacttctgtaaggttatgatttccatcttatgacattggaaaatcctctaaatatgttgtggtgtttataggtatgactattcagggtatggccaatcatcagggaaggtgagtaaccacagatcctaaagctctcttagttctgagattcaaatgttggtccatttacactgtgaacaactgaacataaatctccattttgttgcagcccacagaacaaaacacttatgctgatatcgaggctgcttacaaatgtctggaagagaattatggggctaagcaggagaacattattctctatggtcaatctgttggtagtggtccaaccgtggacctagctgctcgtttgcctcgactaagagcttccattcttcatagtccaattctttctgggcttagagttatgtatcccgttaagcgaacttattggtttgacatatacaaggtgaacataatacccttttgatttctctacatgatgttgctgataaacattcctccttcttgacaccgttttgtttgatcttcttcagaacattgacaaaattacgctggtgaggtgtcctgtcctcgtgattcatgtaagtttccgtgatcaaagattattgattggaagaattgaagttaataaagttgaacagatttgcaagatccgttcattcttgtatgaatccttgtctaataatcctcagtgttagcttaaaggtgaaagcttttcgatttgcagggaacagcggatgatgtggttgacttctctcatgggaagcagctttgggaactctgccaagagaaatatgaaccgctatggctcaaaggtggaaaccattgtgatcttgaactctttcccgaatacataggccatctcaagaagtttgtgagcgctgtggagaaatctgcatcgaaaagaaacagttctttctcaagaagaagcatggaagggtgtgaacaacctcctcgtcatagtgtagatgctccaaggaagagtaaggacggacgagaaaaaccgaggaaaagcatagacagactaaggttccagggatacaagttgagccacatagagaaaccggagaagctgaaggttccatttgaagaaatggagaggtcaaggagaagcgtggacatatacagagataagtctcagccgatggagagagcacgtaagagtgtggattggttggacagaagtcgagctaccgaatgaaaatggagggtttgatgtcaaaagattgtatttgagtgtcgttcaatttattggggtatgtgtttgtattgtagtttgtatgccaagttaaaatacaacaggaagatagatttaaacaaagtatgataacttgtctgactgtttcccacacgacacttttgactggtttttagtttatttgacaagattcgtgtgctgtcgtcttgctgttgttgttgttcatgtgcaaacttgaagtgtaatagcctgcaaacagaatctccgatctaggaaccaactaacaataatcaacaaaaactctcgatccaacctagcacagaagcttgcactcgatttgctatagtgggtggaagttgtattgtacttgtatttgtaagaactaagaaggatccatagttttttgatcaaaaagaaaaaggaaaaagaaggatcaataggcttgatgattactgattatgtagatgggtatttttattggctttcttaggcccaaacaagggatctttatgggcttttattacattggtactgtcagagtcggataagactccgaccgaattttctaaccaaagtgagtctggttcgaaaagactgcttcaatgaagccaaaactatccaataactcgaaattgactactcttttcttttgtctctgttgttgattcgcaaaggcgaagattatccatcttctcagttactcctactggaaccaaaagctcagaaccttaaaacatg

SEQ ID NO: 17210 - DNA, 3000 bp, Unknown
  misc_feature (1)..( 3000): 2750-1469P.txt file - cDNA_ID_1808145; gDNA_ID_2926186; Annot_ID_140784
tctctatctctaaaagaaagagaagcaaaaaagtaaggaatgtttcctcgcaatcatcatcatcatcaccatcttcgtcttcttctttgaaacctccagcgacttcctcgtagttctctcacttatacacttactaatacagagtaacagagagagacagagtggactcttcttagagtaagatgggaggtgtgacttcttcaatggcggcgaagttggcgttttttcctccgaatccgccgtcgtacaagctggtcagagatgaaacaacggagctttttctaatgagcccttttccccatcgagaaaatgtcgacattttgcggctgcccacgcgccgaggcaccgaaatcgtggccatgtacatcagatacccaatggccgtcaccacccttctctactctcatggaaatgctgccgacatcggtcagatgtatgagctcttcatcgagctcagtattcacctccgcgtcaatttgatggggttagtaaatctcccagatcagatttttctttctatatttagctcaggatcttgctcagaaagtcctcgccttttttggttttgctctgttttctggatttgtgcaagtagatttgaagcttctagatgcagaattttggtcttagtgttagagagaagtggactttattaagctgtggatttgtgattcacaaagcttttgaaagtttaagttgcagactcataaaatcttggatttttgctggaagagtttgtctttagggtttgtctgaatcaggatctctactgatcctttatcaaagagacaaaaagtagttttgaggttgagatgtttgagtttgattgttgacacttgacaacaagtggtcttgggcaaacattaccatttctagaaattcaagatctgttattgtttctgtttctaaaggcaagtactgaatacccaaaatgtagttctttgatgtaacaactttttggctcattcaggtataacttgggattctgggatagattggtttctcaaattagtacgctatttttttctgtcgtatcttcaagtgaacctgaaattagtagaatttacttctgtaaggttatgatttccatcttatgacattggaaaatcctctaaatatgttgtggtgtttataggtatgactattcagggtatggccaatcatcagggaaggtgagtaaccacagatcctaaagctctcttagttctgagattcaaatgttggtccatttacactgtgaacaactgaacataaatctccattttgttgcagcccacagaacaaaacacttatgctgatatcgaggctgcttacaaatgtctggaagagaattatggggctaagcaggagaacattattctctatggtcaatctgttggtagtggtccaaccgtggacctagctgctcgtttgcctcgactaagagcttccattcttcatagtccaattctttctgggcttagagttatgtatcccgttaagcgaacttattggtttgacatatacaaggtgaacataatacccttttgatttctctacatgatgttgctgataaacattcctccttcttgacaccgttttgtttgatcttcttcagaacattgacaaaattacgctggtgaggtgtcctgtcctcgtgattcatgtaagtttccgtgatcaaagattattgattggaagaattgaagttaataaagttgaacagatttgcaagatccgttcattcttgtatgaatccttgtctaataatcctcagtgttagcttaaaggtgaaagcttttcgatttgcagggaacagcggatgatgtggttgacttctctcatgggaagcagctttgggaactctgccaagagaaatatgaaccgctatggctcaaaggtggaaaccattgtgatcttgaactctttcccgaatacataggccatctcaagaagtttgtgagcgctgtggagaaatctgcatcgaaaagaaacagttctttctcaagaagaagcatggaagggtgtgaacaacctcctcgtcatagtgtagatgctccaaggaagagtaaggacggacgagaaaaaccgaggaaaagcatagacagactaaggttccagggatacaagttgagccacatagagaaaccggagaagctgaaggttccatttgaagaaatggagaggtcaaggagaagcgtggacatatacagagataagtctcagccgatggagagagcacgtaagagtgtggattggttggacagaagtcgagctaccgaatgaaaatggagggtttgatgtcaaaagattgtatttgagtgtcgttcaatttattggggtatgtgtttgtattgtagtttgtatgccaagttaaaatacaacaggaagatagatttaaacaaagtatgataacttgtctgactgtttcccacacgacacttttgactggtttttagtttatttgacaagattcgtgtgctgtcgtcttgctgttgttgttgttcatgtgcaaacttgaagtgtaatagcctgcaaacagaatctccgatctaggaaccaactaacaataatcaacaaaaactctcgatccaacctagcacagaagcttgcactcgatttgctatagtgggtggaagttgtattgtacttgtatttgtaagaactaagaaggatccatagttttttgatcaaaaagaaaaaggaaaaagaaggatcaataggcttgatgattactgattatgtagatgggtatttttattggctttcttaggcccaaacaagggatctttatgggcttttattacattggtactgtcagagtcggataagactccgaccgaattttctaaccaaagtgagtctggttcgaaaagactgcttcaatgaagccaaaactatccaataactcgaaattgactactcttttcttttgtctctgttgttgattcgcaaaggcgaagattatccatcttctcagttactcctactggaaccaaaagctcagaaccttaaaacatg

SEQ ID NO: 17211 - DNA, 1432 bp, Unknown; identical to SEQ ID NO: 6386
  misc_feature (1)..( 1432): 2750-1469P.txt file - cDNA_ID_1808149; gDNA_ID_1621091; Annot_ID_55528

SEQ ID NO: 17212 - DNA, 3003 bp, Unknown
  misc_feature (1)..( 3003): 2750-1469P.txt file - cDNA_ID_1808149; gDNA_ID_1971789; Annot_ID_175526
ttctttcgccttcgttgcacccagaagaatttatcctcttttttgctttttttgtttctatttaaaaaggaaaaaaaaaattaagctaaccctagaagacgcaaaagcagacgtgatacgacaaaggaacgcgattgcgtgaagagacgagtgtcaaagtcgaagaatttatccgaagccgcaacaacaaaggatcaaacttctcttcacgaaaacctctttcaccactatacttaaacaattaatatcctcaattttcttcttcttcttcttcctcttccacttcgcttcttccttttttctaataaatttttgacattttcaataatggaaagttgcgcagaagcttctaatgtaagtttactctctcacgcaaacaccagagtcgaagaaccctttcgctcttcttcatctgttgtccaagacaagacaagataaagcctgttttgttataaaaagtaattattttaatttaatatttttatgggggaacggtaattctgtaagtatttcagtttcaccccaatagttttgtaaatggtttaatttacccctaacagatttaaaatttacacaaccggttacatttggttcggtttatttactttggtttttcacaaaaaaaaacacataacgcaaccataaattgtactgtatatggttttgagtaacggtatcaacatgaatttcgaacatgtaaaatcacattggatatacacaaaaataacaacacaaaagaataacaaaattatctttttggttcctaaaaaaatctgaatcttggcgatacggacaaacaaaaaaaagttcaatacaataaaattgtggagccaataaattactttcatttcttttgataccaaaacttataaccaaccttcaaaaccagcataactctactcgttaatcttgttatattcctagatttgaaccatcgtggccatataactgaaagctgaattcattgtgtaagtaacgtatgatatgataatactatatgtgtataaataggtggacacatatatgtatataaactaaatttggcatttcctatcatatgatatgataagcttgattggcatgtgatgtggattggaccacacaaacacacacacacagaagatgtccataggccataggcggtccattattattggtaagaaatgattaaattaagtatgcaaacaacttgacattgaaaatgatcttctgaaagtgatatttcaatgttttcacacaatcttgcccgtaaatggttgcatttaattgttactagatagaaaacggaaaaaaagaacaatttttttttttgtgtttttgtttttaatctctttctaattatgtttttgtgaataactgtgtgtttgattaatatattgttttcgagattcatcatataatatttgttacactctatagatgtgatagagttatctactacaccaataagatataagaaggccacattttgattgtaattgtatatatgaatatctgtggacaaaaaggtaacacttcacataattccaaaggctacgtaacatcagattggttgagcttccacatgggaattcggcaaatctgtaatcttctgtatatgccaaatatgtaattcttagacttaggaaaaaatggtcatctcttcaataataatacttctaattaaatggtcctcactaaaacaatgtttacttaataaaacgtataaacaaatagattttgttacatataaaagtataacctaaaatgcatgcagcaaatttctggattgttagcatatagctcagaacaatcggaaacaagatgtgctgccacctgaaacaaacatactaatatatgattattaagttgacatgacctaaggggaatctcgtgagattcgttttttgacaacttagctttggatccagaatcaaacatagcccacacaaatgaaaataggataacatggattccacaaactcttcacactttttatattatatatagtacttgtgattttataatataaaataaactatatcaatgatattagctagatatttaattcgcgttgaatgtggatactacaagagtttgatagattaaattgattcaagcaaatattttagtgggaatttgtaaaacactacatcttcgttatcgacttgggtatgagactaagagacaatatatatatattctattaaaaaaactcactgttacatgcgataaatggatgaataattcttgcttaattaagtttgagtatattactttgtttgtgacaaccgaaatagtgtcaagaacttcatatcactcggtggattactttatttgattgaatcttagttgataacgaaatcctttctttttctatgtatttcgattattaatgtaatcagaaaattttaagtattttttcacgttatccaactttgagagtactgtccttgtgttggccaataagtggttgaatatatggtaaaagtataaaagctcccatcatgttggacctactagctttgctatatataaaatgtcctgtcattgcataacgtaccactttctgaatctgttttacgtgcctatcaatgatttgtctttaacacttaccgtaatattctacaattaagttcaagtgcctagattttctaaatgtgtataaagacattatatatggcaaatgatcctttagataaccatttcatttaaatcaagcattcgattcgcattcatagataaaatactattcaccggtccagttctaactagccatccagtctggttagaaagcaaaattgtttattttattttaggttcagttttcagatcggttttctaacactgttttggtttggttctcgtatcggttcaaccggattggatagtcataaagaatttgaagtccttaattaagcccaaaacaagtagagcccatatatatactaacaaagccgtgattagggtttttggttttcgtcagaagatttcaaggtttagggtttctgcaattcaaccatg

SEQ ID NO: 17213 - DNA, 1432 bp, Unknown; identical to SEQ ID NO: 6386
  misc_feature (1)..( 1432): 2750-1469P.txt file - cDNA_ID_1808149; gDNA_ID_1621091; Annot_ID_170739

SEQ ID NO: 17214 - DNA, 3003 bp, Unknown; identical to SEQ ID NO: 17212
  misc_feature (1)..( 3003): 2750-1469P.txt file - cDNA_ID_1808149; gDNA_ID_2926198; Annot_ID_141393

SEQ ID NO: 17215 - DNA, 3003 bp, Unknown; identical to SEQ ID NO: 17212
  misc_feature (1)..( 3003): 2750-1469P.txt file - cDNA_ID_1808149; gDNA_ID_2926198; Annot_ID_201634

SEQ ID NO: 17216 - DNA, 3000 bp, Unknown
  misc_feature (1)..( 3000): 2750-1469P.txt file - cDNA_ID_1808164; gDNA_ID_1620769; Annot_ID_50168
gagcgtactcttcttggacaggggatggttccaaagcttccaggtcatagtcatccttgtgaactgggttttgttcaagagaatacatcttcctaatagtccaaccttgttgcctctcgaactcttccctctctgaatggagcaccctcatagcataagctaccccgctagtaagaggcctctcaaaggaagttctatcagtgtactctgagaatgttctctacacaaagcttcttaatgttagttactgttcactaatactcaagaagataggaatcaagctaccaagtgttagctaaatacaaagactgtaagcaacaatcagcaaaattgtaaatcctaactgaaattcgagagcaagttgaatgaaaaaagctaccatcatccaaggaccgttcatatactacaccgtaggaacaacttatgtactacaagcaagactagatctcaggcatcaatccaaacagattagaagacaagaagatgcggaatcgagaatacctgatcgatagcagaaggaatcttgccatggtggaaggttgagatcaagatagacatggcttgaacatgattcatgctaacgttgaactgatcctgcagcatacgagctctctcatcacacatactagctagcgtctctttcctcttctccatagcttgcgagctaaagtaccaaaacgtccaaatagagaccaagacccagaagacaacccaaaccaccacaagcttcctccaccacgccttgttgaatttaacagagccaagaaactgataagagaaactcgggatcttgagtccgctgctagagatcttattccagaaccacatcttgttcttcttcttcaacgtagtcatcttagtcttctcaagatcaccgacagagccaactaaaagaccagacttgtcctcgatcccattatcaacgaaccaagaaacaaaccagcagcatagcatccagaagagatgcccaatcttgacaccaaaccctagcacatggaacagactcatccaccacttgaatacacgatcaacccccaagaaacagagtgattgcaaccagctcaattcaactcagcaagaagctctaacaaccaaacagaaaccatgtacaaaaagggacgaatcagagaatcaaaaaggaagaattttttggggttgggtatttaataattaatccttgtaggcttcccacaaacgagaagagaaaaggaaagctaagacagaggaacgtgtcagattagacaacccaaaggctgaaattgagagatcaaagtggttacttaatcaaagatgacgaaagataagagagaagaaaacaaaaacaaaataaacaaaggtagaaactttgaacaggagcttaaagtttccaaagcgagattcctcgaaatctaaaacaggaaactaaaattctacaaggggagtacgaaaattcgctagagcttgctccaatacaacagaaatctttgagtgtgatgatgatgagtgaaagagagcgaataaagcaacgagaagaagaagaggagctggagacttgagtgaattatcaaatggagaaacttaagaaagaggagcagaagtagtagtagaagaagaagaagaagaagaatctatcatcggaaaagatgagaagaatatggtggaagacaaatgtctgcttccttctctctctctctctctctattatctgattatctttcttttcttttttcattcatacttccattaatatatattttaatcttaagctgcttatgtactcctaaaaaaaatacagataaaattcaaacacaaaaaattatatcctgctgatgatgatgttaaaactcgattctagaagaaaaatgttcatagttgagattctttgagtttgtttagtaagatctgatttttataaacaagtttagaacctcattaatactactattaataacaccaaatgattggtaaaataacttacctctatttatatataaaagaaaaaacactaaacggcgcaggcaaaagaaaaaaaaaggctaaagggacccacaagaagggaacaaaggcatatatggtctcagttctcaccctccaataataaaaataaaaggcgtgttacaatttattattatgaaaatggtttttttgcagtagttggtaaagtgaccaaaattgtttggccattttatcaaaactaaactacacaaaagaattatacaagttagtttaaccaaagcttccttctttagtcaaataactctatatatataactcggtttgttttttcaatttcaacatacactttcctttaaagaaaaaacaaatggctaaaacaaaatacagaatcatttattttcttggtacgtcatctgttttacacgtgtcgatatcttaaagcataatcatttcattttgtttgcaattgcttacataaatttatttttttaaaatgggattgcttgaaagttgaaacacaccaatcaacggttgttctctcacccatgaatcatgatcctttttcttccacctcgatcttccagattcaacacatagacataggatttaactcattttgttttagatcttttagaatttaaaggattactttacaagttatattataagagactttctttttatttcacaaagataaatgttttaaattttctatccaaaattaatatttcatttcataattttccatgttagttaaatgctttaaaatattatcttagttatatcagaatttgattaaaaatctttaaatggtgtaggaatcaaatgaagttagtcaatttaccaattgagctatactgttgattgtcccatatattaacgggcccaacttgaaaaatataaggcccatttaaagtatcgtcaaacactcatttcagtatctctagtcttggtccattcgtataatttttcagtaaattatctaaccctctcgatcctctctcgcctgttgaaaaagcacgacgcaagagctaaggatcaaaaaggaagacgaagaaagagatg

SEQ ID NO: 17217 - DNA, 3000 bp, Unknown; identical to SEQ ID NO: 17216
  misc_feature (1)..( 3000): 2750-1469P.txt file - cDNA_ID_1808164; gDNA_ID_1620769; Annot_ID_167422

SEQ ID NO: 17218 - DNA, 3000 bp, Unknown; identical to SEQ ID NO: 3317
  misc_feature (1)..( 3000): 2750-1469P.txt file - cDNA_ID_1808168; gDNA_ID_1620639; Annot_ID_47442

SEQ ID NO: 17219 - DNA, 2589 bp, Unknown; identical to SEQ ID NO: 447
  misc_feature (1)..( 2589): 2750-1469P.txt file - cDNA_ID_1808168; gDNA_ID_1591053; Annot_ID_150453
  misc_feature (26)..(26): n is a, c, g, or t
  misc_feature (1616)..(1616): n is a, c, g, or t

SEQ ID NO: 17220 - DNA, 3000 bp, Unknown; identical to SEQ ID NO: 3317
  misc_feature (1)..( 3000): 2750-1469P.txt file - cDNA_ID_1808168; gDNA_ID_1620639; Annot_ID_162981

SEQ ID NO: 17221 - DNA, 3000 bp, Unknown; identical to SEQ ID NO: 10397
  misc_feature (1)..( 3000): 2750-1469P.txt file - cDNA_ID_1808176; gDNA_ID_2213647; Annot_ID_132396

SEQ ID NO: 17222 - DNA, 3000 bp, Unknown; identical to SEQ ID NO: 10397
  misc_feature (1)..( 3000): 2750-1469P.txt file - cDNA_ID_1808176; gDNA_ID_2213647; Annot_ID_181463

SEQ ID NO: 17223 - DNA, 3000 bp, Unknown; identical to SEQ ID NO: 11443
  misc_feature (1)..( 3000): 2750-1469P.txt file - cDNA_ID_1808188; gDNA_ID_2214496; Annot_ID_133580

SEQ ID NO: 17224 - DNA, 3000 bp, Unknown; identical to SEQ ID NO: 11443
  misc_feature (1)..( 3000): 2750-1469P.txt file - cDNA_ID_1808188; gDNA_ID_2214496; Annot_ID_183845

SEQ ID NO: 17225 - DNA, 3003 bp, Unknown
  misc_feature (1)..( 3003): 2750-1469P.txt file - cDNA_ID_1808192; gDNA_ID_1620686; Annot_ID_48462
tgcttgtcttttatcaaaaaaaaaaaacatatacatgttaaaaatagtaagattataactaatctttccattaacatttctttctttttgactcttcggatgctcttctagccaggctctagccctctctaataatataactgatgactgtcacaatataattgatcatacatttgaattagagaaatataccgattagcagcatgatatttaaccaaatctgttggagtaagttgaatatgactcagcagttagcctaaaagtttttaagatatatacaacaataattaaaggcgaaaagggtgatataaaatatagctgaacagagtttaacatatcttatactgggaaaatcatgtgtataattatatatacaaacgtatggaaacttgtcgaatgagtccgtcttctaaaaaaaacaaatctcctgcaattaaagatgggttttcactattgtaactgtcgtagagaaagaaaaataattgatggtattgttgtctacaacaagttttttttttttttttgttgttgttgttgtctacaacaacaaactctatttaattcagttttaaacttttttttcaaataatttttgttttcttctgtccgttaattgataaactttaatttatgtaaataaattagttgaaactttaattttttttgtagtatatattttccattgccatcaaaattctgtagtgtatattagcgcgaaagatgagcattatatatcagattggttagttaacgtgtccaatatgcactccactaaggcactaatttagtttgtaattgatgtatcaagaacattttttaaaaaaaagatcaagaacattataatagcatatccttgccacaaacatatatgggtacatggacagctttgaacagcactgacctaatttaattacacacaaatttatttgactctcatactaattaccaaacgtcgatttctgaaataaatcatttaaatttcaaatcttaattttatttcgtttttgttaaccaaatagtataacaagtacagtatcaaaagtttcaagtttccttagaatgacctaatcactattcgatgtaccaacgtatctactaaacataatatgcatgcaatggcattattgcattttttgcacattttacaatttctttctgttagtgactaacaaaatggtgtaactgtttagtatttacctcatctcaatgatgatctggtccacatgctgccaccatgtgacccttactccagaatattcccagtctccaaaatccttcgtggagaaaatgcggaatattctactaaaccgaatcctttcattttattttattttttcctactcttttctgattatatttaagatccgatcaacttttcatatgggcgatcgagaaaacatctatttaatttgtagaactgtaaaagtgatataaaacccatgcatgtgtccatggtttgatagacatctgaatatatatcgaaaatgtgatataattctataaccacatttgccaatccttcttaccaaactaaaactaaaagtatgtataccatttcattttgttgtaatttttggtatctgaaaactgattatatttttttaacaaaccgataaactgataccgttaatatttatattagagcaattttttttcaaaatataatcagatcgaatcaattgaaataaggaagatcatattttccggcatattttcttaaaataagttctaactttcagctaatttcctccgatccaatagttgttttggtggcaggacaaggagtccccgagtacgcacgagccgggataaggcgtttaggacaaaagagacacgtgtatggctatcttccacgtagatgtctttgtccgcgtctaattattggcacgtgggtcctagtatccaagatcaggacgattctagcgagtcgcaagtgcttttcatgattaatcatattattatataccttttttcatgatcaatacgcatcttctttaacgaaaattaaataaaaacaagcaacagaaaaagtttcttaatcctgtggacgatcgattcaaccatacaaaataaattctatgtcaaggaacataaacatttttttttttgcatgaaaccggttaaatcatcaagaaaaatatgagaacttgtttcttaaatggtatataccgtccttgagtttcatttaaattttttgtgatggatattgtaaaaagtagtttgtaagcttgctaataatgcatccaaaaaggatatgtgacatgattaacaaaatttgatacaattgatttgtgataatgaaaacaaaaatacaactaaaagctccataaaccttgccttaagataatgacaacgaaaataaaagctagtttactgtctcggttgattggttgatcccaagttctcctttatcttagagcaaccataccactagacaaacgagaattaatttttttactaaaaatggttcaaaaaaggtttatttagtggctctaattgtttcgttaatctaaactatacacgctttatctagttttcagataatcttatttcaaattaagaattaagaaaatagtatagagataaatctaattgttaaaaatggattatagtacatactaattatttgttaaaaaaaaagcatcgagtatatccgaatctgtggtccgaagttgggacaagctgacataagatctagctgtctttagccatcagatccgacttagttcccaatcatatactgacacgtcatcttcttccaaactcaaaacagagcatcgaagcactctttcgcggcgccttgtatctgttttttctcccacctctcaggcgggtccctaaccccttatccgggtcttacttaagccttcaatttttctgactatatatatcccttccacttatttctattttcttcatcgaaacaaaaaataattaagagagaaaaaaacaaaaaacattttccatctctctctctctctctctcgcctgcttcaagaaatg

SEQ ID NO: 17226 - DNA, 3003 bp, Unknown; identical to SEQ ID NO: 17225
  misc_feature (1)..( 3003): 2750-1469P.txt file - cDNA_ID_1808192; gDNA_ID_1620686; Annot_ID_164622

SEQ ID NO: 17227 - DNA, 3003 bp, Unknown; identical to SEQ ID NO: 17225
  misc_feature (1)..( 3003): 2750-1469P.txt file - cDNA_ID_1808192; gDNA_ID_2926202; Annot_ID_141557

SEQ ID NO: 17228 - DNA, 3003 bp, Unknown; identical to SEQ ID NO: 17225
  misc_feature (1)..( 3003): 2750-1469P.txt file - cDNA_ID_1808192; gDNA_ID_2926202; Annot_ID_201925

SEQ ID NO: 17229 - DNA, 3000 bp, Unknown; identical to SEQ ID NO: 12704
  misc_feature (1)..( 3000): 2750-1469P.txt file - cDNA_ID_1808196; gDNA_ID_2214567; Annot_ID_134975

SEQ ID NO: 17230 - DNA, 3003 bp, Unknown
  misc_feature (1)..( 3003): 2750-1469P.txt file - cDNA_ID_1808204; gDNA_ID_1621104; Annot_ID_55942
agtatatatcaacatcatcatgattctaaagatgtactttgggttgaatgttgaaagtgacgatggaaagcatactcaataaccaattttcaggaaataaaatgcagagacgagtgtattacttaagtaaataaggcagagatgatttcatgtgatatattttatttacataataaatgttaattttaatacacactaaatattgttaatcgaccttcacaaatacaaataaaaagtattagtccaaggaagccgtatgtatgtaggaaatgaaaatgggtccccattttcgttggctagccaatacaagtgctcttaaaagctgattttccattatctctatatttccaatttttccctttgtcttaaaccgaaagtgatttttactttttagtttaagtggttaagaaagtaacgttttcaatcttttttggacagatttttgcctttggcatatactctttaacattgccatgttgatgaggcgacaatatcgatatttttttttttcacaagtgtgattggtaattatatgagccacacaacttttctcatttggaattcatagtcaatcgacagtgtcagttgcataacaaaattcatagtttgatccaatattaggtcattgaactgaagcaagtttcttatatagaaaagtctctgacaaaactagagtactcgaagatactagatcaaaaagagtactttctacacattatctccaagaaaaaaaaaggtgggtaagaaaacactgattgagagtaagagttcaatattcactcgaactcacttttggataagcgtaatcgagctaccaacgtgacaatgagctggaatcttgtactcaagacacaacaaggacaatacgaaaaaggcaaggagggagagaagctttgcatccccaatcatctattgtcgtttgtatgaaagggaacacacatgaagctctcagatgtgccaaacaagagagataaagaaagcttcacataagcatcatggtttttgaatgtgttcaaagtttgtaaagaatgagattttttgtgtgaatttggggatataaacgacatgtgaatatgtgataaactgaatatattaatttcgttctccttctacaatttaacagaattttatttttattatttttatcaatttcatacttgtaaaactctctgtccttctcttattgatatttgatttgatttttttgtatagtaaatatgttcatccgtgagagatgcatgtgagctttatatgttcaacaaaatttcaagcatatataatcattggctgaatccttacaaaaacttataacaatatgacttaaaaacggtattggatgttacggagactgaattattgaaaaataattgatcattagcaaataataaccaaactaattagtaaacaaattaaatatatttttttgtctatgaccgtgttccaagggagaggagaagcgatccagcacgcggtgagtaaacctcacgtgcgtaaaccttctcacaagattcttctttaacgtttctacgagactaattacttccttattcatccacataccacattgcctctcctgccgttttcacgtttactgctctaactactcgttgtctccatgtacttactttatattgtctacggtagtcccaagaccgcgcttattccgagattgatataggaaatacaagtatttaaaaaaaattaggattagtaaatgaggaaagaataatgagataatgagtgacactaagtatacaactaatacgtcacgattgtataattgtcccctacaagtagtcaaaccttagcccttttgaccgttaatatcttgcatttgacgataatcttttccgtgttttgatctgtttccactgtacaaaactaaacgttaataagctcagtattgggtacgttagtaaaaaatcaatcataaaatataaaataatctcactttaagctccaaccagagactgacagctgttagttagtttgaatactcaatagtaatcaattaggtttgaccaaaatagcttcataaattattcatcaatccaataagtcatttaagtgataattaccaaaaggcacatgatagctctctaaatatagatataccaaaatcaatccataccaaaagttgatgatttctttccctctacaccatcgatatgttgaatagtttagattttttccaatatttgtttaattattatttatattgcctttatatatcaaaagtgaaaaaatccaaacaaaatcttgtcaaagaaattaacactggataaatatttagttatttttggataacttgttttgaaattgagtttaccattccaaaatcagcttaactttgtccaaaaataaggaaaaaatcagtctatatttaacacatgtattctttgtaaagattaaatctaaaattctttaagacaaacttgtgtttttttttctgtatacattgtttccctagtattttatgtttcatcgtaatgcagcatcttttgctaacctctctagtaggttttaaacaagaatgaatattgttgacaataatatcataataaaaatattatactgtatacaacaactagacctaccactacgaaatgatttaaaacaagaagagagtacaagaagaatatgataaatttaattttaaaaaaattcaccgatcgtattgataaaaaagttgtatctacttttctctctttttacctcatcaattaaaaagttgactataaataacacattactatttcttctctctcgccaggcggcgttgcctacaaaaacctgacaatcgaaacacagtttttctgataataatatagacatttaccattatgcccttctaactgaaaacggcaattacgttccttgttatttgttttcttccttctccttctgtttcttttttgtggctttaatttttttcatattaattcggaaagagaaagactcttcactcccataacagtcgccggtaacagaatcactccgatg

SEQ ID NO: 17231 - DNA, 3000 bp, Unknown; identical to SEQ ID NO: 6212
  misc_feature (1)..( 3000): 2750-1469P.txt file - cDNA_ID_1808204; gDNA_ID_1620864; Annot_ID_51310

SEQ ID NO: 17232 - DNA, 3003 bp, Unknown; identical to SEQ ID NO: 17230
  misc_feature (1)..( 3003): 2750-1469P.txt file - cDNA_ID_1808204; gDNA_ID_1621104; Annot_ID_171517

SEQ ID NO: 17233 - DNA, 3000 bp, Unknown; identical to SEQ ID NO: 6212
  misc_feature (1)..( 3000): 2750-1469P.txt file - cDNA_ID_1808204; gDNA_ID_1620864; Annot_ID_170422

SEQ ID NO: 17234 - DNA, 3003 bp, Unknown; identical to SEQ ID NO: 17230
  misc_feature (1)..( 3003): 2750-1469P.txt file - cDNA_ID_1808204; gDNA_ID_2926184; Annot_ID_140716

SEQ ID NO: 17235 - DNA, 3003 bp, Unknown; identical to SEQ ID NO: 17230
  misc_feature (1)..( 3003): 2750-1469P.txt file - cDNA_ID_1808204; gDNA_ID_2926184; Annot_ID_200501

SEQ ID NO: 17236 - DNA, 3003 bp, Unknown
  misc_feature (1)..( 3003): 2750-1469P.txt file - cDNA_ID_1808208; gDNA_ID_1620636; Annot_ID_47376
caaaaattcttaagacttcaatattatatgcacttatgctatgagcaaaacatgaaaatttcaagaatgtcactttctcagcaagaatatacactgcaactagagttctgcttacccaagaaaactgagcattgcggaacttgttgtcagatccagctaaatgtgcatcaagaggcctcaacttaagcaaccttggtgcggcaatcttatttcccatgcgaccctcgaagccggtctttgttttgccacttttgtcagtgaaaagggtacagataacaatcaaatatgtgtcagttgtaccaacaatccatttcccatcgaatgtagcatccacatgagtaacaggtgcaccaagtccagggaaagccgtctttgcctgcctcatagtgttgctcgagtagagtctaattttgccatcaagagagccaacaacaattgagccatcaccagtagttgcaaagcactgaaagttagtccctctagaaaactgatgcccctgtgcccaattcaagactggagtattcgcagtagcaagatcctgaaccatcccatatcggtcacgcatatcccacctgcaaagcctattgttatccagaccaagaaacgttgacgcagatggatccaattgagcacctttaccatcattagtaatgtcactcatagagatatccactccatctttctcaaacttccactctgaaataattttcccggtttcaatgtcaagctgatggatacctcgtgaatgaggcgtttggctcataggactcatgagcagcatattagtctcagctctcatgagaagagccttcttcggtgctgaagaatgagttcgaccataaccaggctcaaagttaacacaaacacctttcccttgaatcccctgtctcatgttcttgaaaacctgaataccagaatctccaactagaaagctattatctaaagcacctagagctaagctatgtatgccctcacttgtagcttcttcaaaggcctcagtcaaatcctgtgtatctctagccggagttgcagatcctcctcctgggctttgaagcaaaatatcatcagcatcttcccacatggaatcatcagcagcttcaggattagcccacccaatgaaatctttcccatagatttttgccttgttagcctcattaaactcaacaccatgattgttctcaaacaagcaattgttatagctgcttacaaaaaccgaaaaatcttcactgctggcgaatttcatagcccaaacagctttagcaacgaaatcaacacggcgttgatctttataagctttcaattgcatttcatctgataccttttcacggatcttgcttccgactttcaaaatccaccattcgttttccacatctccgttctcatcgtcgtcttcatcatcttcatctcctttgttagtcttgacgaaacaataagcagtcagtttctcagctgtgacccatttggctttgggagtgttgccattgatgtagcggaaaagccgagctgagttctgagtagacggggctgattgcgtcaatgggtatttcagcttcagggcttggagttttgcctcaacgtcgtcgagtgatgatgaaggagatttaggccggagacgacgaccaccggaggaagatatacctaacgtatcatcccgcgagtcctgaaacgtctcttcctcttcctctccctctcttccttcttcatattcttcatattcatcttcatcggaggaacagatctctagatcttcatgactgtgagatgctcccatatcgaagaatcctggaaatgggaagagctagagagaataacggcaatgagattattcaaacgaaggtgggaagttgaagaagaagagagaagagcgtaaagttcgaattttgaaaattagggtttttcaaaagcatgtgttcctgttcccctttggacagattgaagttaaccggctatagcccgtaaatgcggatctgtaagtactttcatataccggctatagcccgtaaattcggatctgtaagtactttcatgtaccggctacagccagttgaaatttttatgatttgtggttcattcaaattcaaattagaagtggtccgatttttaagaagtacggttatgttgtgatttggtgatgctgtaacttcgtcttaaatatgttgtcgttttgactcgcattacaatatgttatcgtttaatttacgatacactgtaattaattaatagtttcaatattatagaaacgtttggtcctttagtcggagagactgatatgcgacagaggatccaacgtcgcgactgaaacctagatcccaattctccgtttccaccactgtctctcctccgtcgttagggtttctcaggtgacacactccgcttctcttcttttccgtcttgatctaatttttccgtcaattggtttctgcaatctctacgtttcttctctttcaccttagatattgcttgattcccacattaattgttgctgagaagtataattaatttcttgatcgaatttaccagttctcaaagttttgtgtccgttgagtacaacaaattcctcgaaattgagtcattgattgaaataccaacttaatttttgatttctgggtttgttattaaaatgtagacacacacttggataactgagtttccttaacttcaatctggttataaacaattttaaatttaccctttttcttaaagaactcaactttagcttgaggtctgaatttttgtgccaaacatgtacttagtagcttagtaaccatgtcttgtgaactattatctttcttgatgtcccttgttctgtaaagttcgtaaaaacttaatctttttggttttaaggtggcttacatgaggtttgttggtgtgattttttattttacaggttcacatctgttggaaacttattgcaactcctaaaggcatttcacatatttgcttttatgcgtacgaggcttgggggatatttatataatccgaaataactcttttcttatcatg

SEQ ID NO: 17237 - DNA, 3003 bp, Unknown; identical to SEQ ID NO: 17236
  misc_feature (1)..( 3003): 2750-1469P.txt file - cDNA_ID_1808208; gDNA_ID_2926204; Annot_ID_141649

SEQ ID NO: 17238 - DNA, 3000 bp, Unknown; identical to SEQ ID NO: 11505
  misc_feature (1)..( 3000): 2750-1469P.txt file - cDNA_ID_1808219; gDNA_ID_2214499; Annot_ID_133632

SEQ ID NO: 17239 - DNA, 3000 bp, Unknown; identical to SEQ ID NO: 11505
  misc_feature (1)..( 3000): 2750-1469P.txt file - cDNA_ID_1808219; gDNA_ID_2214499; Annot_ID_183928

SEQ ID NO: 17240 - DNA, 3000 bp, Unknown; identical to SEQ ID NO: 6598
  misc_feature (1)..( 3000): 2750-1469P.txt file - cDNA_ID_1808227; gDNA_ID_1621098; Annot_ID_55791

SEQ ID NO: 17241 - DNA, 3000 bp, Unknown; identical to SEQ ID NO: 6598
  misc_feature (1)..( 3000): 2750-1469P.txt file - cDNA_ID_1808227; gDNA_ID_2926166; Annot_ID_139930

SEQ ID NO: 17242 - DNA, 3000 bp, Unknown; identical to SEQ ID NO: 12532
  misc_feature (1)..( 3000): 2750-1469P.txt file - cDNA_ID_1808235; gDNA_ID_2214557; Annot_ID_134794

SEQ ID NO: 17243 - DNA, 3000 bp, Unknown; identical to SEQ ID NO: 6829
  misc_feature (1)..( 3000): 2750-1469P.txt file - cDNA_ID_1808243; gDNA_ID_1621108; Annot_ID_56019

SEQ ID NO: 17244 - DNA, 3000 bp, Unknown; identical to SEQ ID NO: 6829
  misc_feature (1)..( 3000): 2750-1469P.txt file - cDNA_ID_1808243; gDNA_ID_1621108; Annot_ID_171663

SEQ ID NO: 17245 - DNA, 3000 bp, Unknown; identical to SEQ ID NO: 6829
  misc_feature (1)..( 3000): 2750-1469P.txt file - cDNA_ID_1808243; gDNA_ID_2926207; Annot_ID_141799

SEQ ID NO: 17246 - DNA, 3000 bp, Unknown; identical to SEQ ID NO: 6829
  misc_feature (1)..( 3000): 2750-1469P.txt file - cDNA_ID_1808243; gDNA_ID_2926207; Annot_ID_202320

SEQ ID NO: 17247 - DNA, 3003 bp, Unknown
  misc_feature (1)..( 3003): 2750-1469P.txt file - cDNA_ID_1808251; gDNA_ID_2214526; Annot_ID_134150
aattattctatattcaatgtttgtcgtttatggatttgcaaacatttacaagatcatgcacacaacacaacacgtaactataagcaataaataaaacaagattcagatttaagataattaatcgtttttagaggaacggaggaaagaacatgtgaaaacaactatgagaagaaaactcagtactatcgatgatactaccatcaccaagcttgaacatcttaacagcttcatcattcattccatcattacaatattctccatcattatcatcgaagtagatataattcttcaaaagtccatggtactcggaactctcatcatcatgcttgataaattgatcagcttctgcgccactctgatacgttcatgagaagttggcacgtgtgagaactgaagtgagagattggagtcacgtgtgaagaagattataaatagtaagagagagtagagagaaaagcatcctgcgtgatcattgatgtgtaaagaggattagagctttatgtgctctgttcttgggagataagattggagaactgtaactccaagcttatcgatttagggtttgtttcattgtaattgggattttaaggataagaaagagaaattcatagtttcattcttatcacactctttcgcacattatcaacgaagtagatagaattgttcaaacatccatggtactcggaggctacaacagtaaaacaactgtccctagccacaatgagtgccttgtctcccaaggacctaacctcaacccattttgccacatactcgtccatcttataaaccttaaaaccaactgtcctttgactccttcggatataagctttctttaagcgaagttgatgaataatgcatagatctccacaatactcaacgagtctcttgttgcaactatcatatccgtcgtagtccattggaattgaaggtgtgaattgaaggaggctgagcggtgataaactaatccaccaaattgcgccggttaggtctaaggcatagacttgtcctttatgaagtataatgtccaagaaatcttcaacttggtttttgatttttgtccatattctactactctcttctccactcttgcagcaccagattttgtcatcctgtccgactgcgaaaatcagattgtctaggaaaacaactctagacaatatatgtgatggtccttctttacctatcacgccttgtattaaatacttatcaaatatatgaatctcgtaagattggcgaatctctgaaacctcaaatttcaaaaggtctagggtttgttgtgaaggggttaggagctggcgaaagaaaggagacaagagattaatcttactggattcagagacttgtttggttctgatcagccatcctttgtaagaacatgaagaagggccagttacacggaagaaagtggtgggagagagaacagtctctatcatcttgttggaggaaggaaggttgcattgaaagctcttcggtgtcgcagccgccgaacgccagggtttacagatgctacgtacacggaggacgtcactaatggaggagaaacggtttgcggttaaattgatgaggtctccaggtaattcagaccactcaggtttttccatctttgaatcaatcgacgatgtgagagcgtgatcaacatcggctcgccctctctgttataactccatatatatacacaacaaaacttaaaccctagatacttgaggacttacgtgggctggactagaatccatccaattcctagttggattttcgattagctattatcacgtgagtaatatctgcattacatgtattgacttagtattattgttggagcaatgttttttttttgttaaaaattattattggagcaatgttttgtttttgttaaaaattatttgagcaaaccaaaaaatcgcagaatgaattataaaacagttcgtatttcgatgaaatttcgtctctccctctcaatagctttggtgcaaattaatacccttactacatacatgtcaacttaactctaattctaacaaatagaacagaaaatctggagagagaaaaaaaacgtaactagatgaaagaaaagaaaaaaaaaaagacttcaaaatttgtataaaaatatagaaatgttgaacaaaaattattaactctaaaccaaaaattaagacaatgatctaatattctaatatcatgaatcatgatagaaaaggaacacctaactccataaatgatggtcatgcaatgatcaaatttctcctttatcaattattggtttatattccaatgtccaaactcgaaagtcgaaacaatctcctccatatatagccatttctttccctaacccattaaaatacaaaactaaagaaccatcaataattttttcaactgaaaaaggaagaacaatttgtgatccaaaataaaagagagaaaaaaaaaagtggagaaaggagaccaaaagtagaagcgtggtttactccaattgacggtaaacccctttgacaagtagaggcacttgatagtagtgtaacaaaagtacaacgatgggtgaagattggtcaaacatcaaaaggaccccatactcaaaagatagtattctgtttatttataatcatatatttacaaaaaactaacattcagaatataaaaatattagaatatgtaaattttgcaaacatagaggagtattaaatatagttaaatagtttcgaattaaacactaaataattaaatgttgacaagaaaaaaaaacataaaaattaatacggattccgtgcgttacaataacttagcaatattactctctagtagagatgagaacttgagtacttgactaataatttcaacgcatgttgtcttcttgcgaaatagtcccacgctattctaaaggtgggctagtggaaagagtgtagaacccacttttcaaaagcacatcaactactatataaattaatgaaccacctaacaaacaaacccacacattaaactaaagaagagagaactttagaggttagagagatg

SEQ ID NO: 17248 - DNA, 3000 bp, Unknown; identical to SEQ ID NO: 12190
  misc_feature (1)..( 3000): 2750-1469P.txt file - cDNA_ID_1808260; gDNA_ID_2214536; Annot_ID_134383

SEQ ID NO: 17249 - DNA, 3000 bp, Unknown; identical to SEQ ID NO: 12190
  misc_feature (1)..( 3000): 2750-1469P.txt file - cDNA_ID_1808260; gDNA_ID_2214536; Annot_ID_185092

SEQ ID NO: 17250 - DNA, 3003 bp, Unknown
  misc_feature (1)..( 3003): 2750-1469P.txt file - cDNA_ID_1808283; gDNA_ID_2214559; Annot_ID_134868
tcagaatccaaatcatctcatgcatattcgttactacgatcactgactacttagaattctcattaaccgaatctattacacaacccaagaatgtatatactgaaaaacctaacccacatattgaatactgatcgatataatatacatatttttatcatcaaaaggagattcacaagattgaatactggcaacgctgatcactacttaacaagctaaacattgtttagtaattgattaaaaaaaagaacatggtttagtaatcatttgaatttgttcatgaccaatttcttattcacttgtacgtctttcagcagctattaattatctatagcttgttgtcaatctccatcaacaatttttcaagtttcttacgtttgtatatatagatggatctcgattatctaccatgtcttattcaaacaatctgcatcaaaagccccgtatcttttaacttttcatatgctacatataatttgattcaaaagtattcaatgcttttgcgttaaattagctgttctaattcatataacgcatactatatattaacaaaaactctcctactatctttcaattgctttcacaaaacattttttctacttttccacaaattataaattcacgaatactatggtctatggctgctcgcgctctatgtaacttttggagctagagcttaaatggtatggtgtaaaaatgcaatggtctaaaggccatgttttatataaaaaaataatttaatgtttggcgtcaaagggatgaaaccattatatatatacgctactaattagtaaattcattatgcacgaaagaaagtcaaacatgattgataagtagcttcttgttttggtaacgtattttttttggatttaccaaatatagaccaccatattcatgattccaagtcatcaaaaaatgactacaaaatcatgattccaagtcttttatttgggaatatctaatcatatacgtaatcgtaatgtactaatgtggattggaaatgttagtgcaaaaaagtcttgtgacacctgatgtaacaagtaccaaccgacgtcgtttaatttatccatcagaaacatcacaggtaagaagcaacccaaaaacatcgtcgtatttgccatcaaatgagtaaaggcaattatgtgggtctttaagattcaaccaactacacagcaatggaacggacgggttcgcacccaaagcccacccaaagcccaaagggtctcgagagagcttcaaggaaacactttgcaacgattacctaatttccaaagattacctgatacctttggtatgatcttttagtctctactgatgacctaattatcgagtagacatattatataattggttttgcaagagaatggcctagtttcgcagacttttacattctcggtaacaatcttatcaaccgatacatatatgtttgcattatgtttttaaacattatcgagtagacatattatatatcgcttatttcacaactatttgttactctacaactatcaatcatttcctgaaagagtagaacactgtgaagatataaacactgagagcagaagagaccaataccacaagcaccagcacggtatgaatcgccaaagcattgccgcaagagagaagccccagacggagttgtataacatcaacaattgacaacagaagaaatacacaacccaagatagatccaccagctgcaccaaccacaccgaaacgaagcacatctctgttgatattcgctttaaacacttcgtccgtttctttgctgttcaaaaggttgatggctagcttcatcccttgagccacaagggaggagaagagaaagaaggcaaatgagatgacttcaaacacaaccaggtcacgttccacgtctcgtcctgcactgcactctgttctgtccgtgagggtgaggtcacttggctggtcgaaggagattccgacaaagactgcaaccgtgaagagagaattagcacttacaatcccatcgagagccgtaacatgaacactcgtggttgaagtagttgaatggctggtgttgctattgctattttggttgctgctcgtctctatgtcggaatctgccattaccaatgaatggatctctctttctttcttttttgggatagctaaaagcttctttctaatggtggatcataatcttctgttgtgttcttatgattcccttttgaatatgatttggtaatgttgtttaagagtgggtggtgtttggtttagaacgattagccttttggaaaacgatagctctatgttaattgataatttaatctttttcaagtcttggaaggtacacacacctttctccttttgttatgaaagaaaatggtttcttctagtaaccaaaattttgaactttattcacatgtaaaacaacacaatcttgtagcaaatttacacgttaaatttaaaacggtgttgcgtatttgaagagacaatatcctaaacgttatcatattaatattatttttgttatttttccgtcaaacaccatttttattaagttatcgaaaagatactatccgttagagaaaactattaaggaaccgacgtgcttacatgagagaaaataacattttcagttttaacttttttggctaaaaggtctactcgagtgttaaatttttgagaaaaaaatctaatacgaaaaaaagaaaaataaacaataaaacaccgaaaaagaggcgaattccgctgcaaaagttggctaatctttttggttatccagaagagatatcaaatcggagcatagtactattattaactttgttttaacctaagcgatgtgggataaaaatcctcttaacaaagacaaacaatcaatgacgtcatcaatccaaaaattggcatgtcctcaagattaaaaagacagtcttagctgacgtggcctgttctcaagttttaattggctggagaattcaagaggatgaaacatagaaatcctctttgactaaaatattttaaaccacacaagagaaggaggaggcaatg

SEQ ID NO: 17251 - DNA, 3003 bp, Unknown; identical to SEQ ID NO: 17250
  misc_feature (1)..( 3003): 2750-1469P.txt file - cDNA_ID_1808283; gDNA_ID_2214559; Annot_ID_185855

SEQ ID NO: 17252 - DNA, 3000 bp, Unknown; identical to SEQ ID NO: 12544
  misc_feature (1)..( 3000): 2750-1469P.txt file - cDNA_ID_1808299; gDNA_ID_2214558; Annot_ID_134833

SEQ ID NO: 17253 - DNA, 3000 bp, Unknown; identical to SEQ ID NO: 12544
  misc_feature (1)..( 3000): 2750-1469P.txt file - cDNA_ID_1808299; gDNA_ID_2214558; Annot_ID_185803

SEQ ID NO: 17254 - DNA, 3000 bp, Unknown; identical to SEQ ID NO: 12747
  misc_feature (1)..( 3000): 2750-1469P.txt file - cDNA_ID_1808306; gDNA_ID_2214569; Annot_ID_135025

SEQ ID NO: 17255 - DNA, 3000 bp, Unknown; identical to SEQ ID NO: 12747
  misc_feature (1)..( 3000): 2750-1469P.txt file - cDNA_ID_1808306; gDNA_ID_2214569; Annot_ID_186116

SEQ ID NO: 17256 - DNA, 3000 bp, Unknown; identical to SEQ ID NO: 4384
  misc_feature (1)..( 3000): 2750-1469P.txt file - cDNA_ID_1808321; gDNA_ID_1620703; Annot_ID_48820

SEQ ID NO: 17257 - DNA, 3000 bp, Unknown; identical to SEQ ID NO: 4384
  misc_feature (1)..( 3000): 2750-1469P.txt file - cDNA_ID_1808321; gDNA_ID_2926174; Annot_ID_140267

SEQ ID NO: 17258 - DNA, 3000 bp, Unknown; identical to SEQ ID NO: 11235
  misc_feature (1)..( 3000): 2750-1469P.txt file - cDNA_ID_1808325; gDNA_ID_2214485; Annot_ID_133351

SEQ ID NO: 17259 - DNA, 3003 bp, Unknown
  misc_feature (1)..( 3003): 2750-1469P.txt file - cDNA_ID_1808340; gDNA_ID_2926128; Annot_ID_196760
catttcatgcaagaaaaagccttggtttcatattcataaatcataatacaatataattaattaattggaccttttatttttatactttattcaaagttagtctaatacttttacgccacatatattctaaatcttgagtaattaaaatgaatgaatatagcaatgatctacatgtgatttagctatctctatattaaattgaatataatgtgaattttttttttgtctattggtagcctaatctggaatataagatttccaaataaaatctcagaaaataaagctctataaatttacaagtcaattagctatctctattttaataattgaatatcatatgcttttgcttcaaaggcatgtttttcaacaatgtgaacatctcttttcaccttttctttatttcattgtccttgtccgtcaccaaccaatcatacacttttttcccattgacatgttcttctatgattggtttctttccatcacagtcagtatctttatctctttgacgtacgtttcaatcttcttctctaaatcccgccctcgcgttccacgctaacacctaattctaatatatacaaatcatataaatagccatttttatatcctctcgtaacttttccttctttctttctccaaatttgatcgtaaaaaagattcctatcttcttcaccattcttttcttgaaaaagaatcatgggcttatcttatagcggcgccggagttattatcgccggagttatcttgaatgattttatcaaatcagttcgttcttttcttgatattcgtcgtttgtttggttcggcatcttcagggagcactatcatcgacaagattccgatggacgatatgcttccggcaacaaagttcgaggatatatcatcaagggttaatccgccggagagctgccggatatgccaagatgagttcgacggcggtgacgaagtccggtgtttgaggaattgcgtacatgtttatcacaagacgtgtattgaccgttggatccaagacgataagatgacgtgtcctttgtgtaggaccccgatcgttcctgatttctatttttttcgtttgtaaattagaaaagctaaatgtttcattaatcagattttttttcagcaaatagatatcaatcgttcactaataaaaactaattttttgtctagtttatttatttagttacttcccataattcatttccgtttaaaaattatggttatcatagtcctggacgttcggttatccattcgatttcggttatattcattcagttatcggtttgttgttctaaaggtattcattcagtttggtttcgattctttcggttttcagatatttttttgattattttcaagtatttttattattttatatatattctcaagtatttttaattatttactttagaaataactaatacttttaaaattttgattgatgtttcggatattttcggtttgtatcaattcggtttcggttatttcagttatagaatttagtatgcattcgattagtttccaattttcggttcggtacggttcattatttttgcttcgatttcagtttgatatattcggttcagaatatttgttcagacttagttgataattgagaactctttctcgaaacgtttaaatattaaaagatcacaaaatgggataaacaactacaagaaaattttgccttaatcgacgtcacatgtaaacaaaagaactaaatcggattcaatgttgggcctttcttgaagcccacatgctatttgggtcaaaagcgccaagacccaagacatatctcttaaaatctttgaactttttgagttttgatcacataagaatttacgataagatttactcaccacgagaacacacacgtggcagtttcactgattaaataacacatttggtgtattcactaatatcaaataaatgacgtcatttcacgcttctaatttatttcctaatgtacatttagtgataaaaccctacatacgtgttagagatacggccccgtgcacctactcaaaatagtaaagtcaaagaacgaccgtcagattctatgtctccctcctcagcttataatcaaatcgtggccgttgattctcttttgactcagaacgagcattaacggtgacctttttatccgacttcaccaccatcgttgccgccgcattcgatcgatcactaatcacaattctccagctcaagtgggacattcgtgttcgccactctctcgcctgtcacgcgtgtctctcacgctccacattttttttaatccccttaatcacacgatcttaaggtgtctgatttcactaaaaacatcggaggcaaaaaatgaaaaatcccatgtgcatgctcagtcaaactcacccctcacgtgacacattgcctctatcacgtgatagacgagtaccatttctagatacaactaagattcatatagatcctttaggatttatttttttacagtgttgtatgtttaaattgaacacatttatgccgttgacaaaatttaaaagtaaatatgaggttgacttttgatttataacagattcgtagtatagaatatttacaattgattgaccaacaaaaatgagcaaagatgttaccgtgggtcgattctttacctgggaacttaaatttggtaaaaattagcggcagcttttcttttttaattatgcctactactacatcagaggggtattatagggaactagagtaaaacctaaggacatttccgaccaatgaaaaaaacatggaaaatataagaagggctgagaaaagcaaacaaaaaaaaagttttaataaaccagagaaaaaaaagaaccctcctatcgagttctgtgagatctgcttcaaaagaaaaaaaaactggtggagaagaagaggtgaatcgagttataagcttacgtggtgatgtaaaatatttatatattgagcattttatacatcttcttcttacttgtgtttggtttcttttgggccaaagtattgttttgggtaaaaaatg

SEQ ID NO: 17260 - DNA, 3003 bp, Unknown; identical to SEQ ID NO: 17259
  misc_feature (1)..( 3003): 2750-1469P.txt file - cDNA_ID_1808340; gDNA_ID_2926128; Annot_ID_138680

SEQ ID NO: 17261 - DNA, 3000 bp, Unknown; identical to SEQ ID NO: 7697
  misc_feature (1)..( 3000): 2750-1469P.txt file - cDNA_ID_1808340; gDNA_ID_1621157; Annot_ID_57056

SEQ ID NO: 17262 - DNA, 3003 bp, Unknown; identical to SEQ ID NO: 17259
  misc_feature (1)..( 3003): 2750-1469P.txt file - cDNA_ID_1808340; gDNA_ID_1972020; Annot_ID_178027

SEQ ID NO: 17263 - DNA, 3000 bp, Unknown; identical to SEQ ID NO: 7697
  misc_feature (1)..( 3000): 2750-1469P.txt file - cDNA_ID_1808340; gDNA_ID_1621157; Annot_ID_173577

SEQ ID NO: 17264 - DNA, 3003 bp, Unknown
  misc_feature (1)..( 3003): 2750-1469P.txt file - cDNA_ID_1808354; gDNA_ID_1620630; Annot_ID_47235
ttactactaagtctactatagtagatatatcagtacatttttatttatatatatacattttcattttaatgcaaacaaaacaattactatatgtttcccactgacgagtaaaaaacttaattagattcacagagagcaaataaatataacttgtccttctaatgtatggccgagtgggcaatggcgaatgatgatccatttttgtgttgtcaaattatcgttggttatgaatatcggtttccccatgcaatttattgtttcgtatactaaattctttaatatgttaccaagaacgtgaaatcgaaatcgagataatgtgtaacacataggcaagccatgtaaattatgcagtcataaaagagacgatacgctaaccaagaatcaatatatggtttcgagccttcgattattagaaagataacgaccacactactattggttctacatgttttatgtacataaaatcaaatcgggaccaaataaaagaaaaactgaaatggaccagccaatataatgtatatattctttaatatcagttgataaaaaaaataacaggaaagagcaataaaaacatagagccatgacattatgtcttcatcattatcagccttaaacgataacaaaattataaagctctagaattcaccaaatatacccaattgaatttctactagtacctaaaatcatagttacgagggctaatggacttctcataagacttatcttacgcatcatttggatcctctaatatttcgcacactattaagtccctagacgaatcgaaccaaggaaatgcgtaattacctttttaagaagaattaatgcacctaacggatattgccgctcaacatagagtggttaatgttcttttttgccaacctgtatttccatttactgaagaaataaatttgacacaactaaatctttgaaaattacaatattttataaagatttacagtttttgggttttataaaataaataagatttgacaaagatagttatgaaaagaaggatgaaatacggatgtcttttcatgaagatttataaagagtactaataacttcatatcttatgattagaaatctaactttgaggcccttgtgtaccttcgaatatagctagtttatagtgacgggacccttagcataaccaaaatcactgacaagccatagcattccacgtggttaagtccatctatactctcattatcatcttccctccggttcgggttcacgatactggtttagcaactaaattatcaaactatcaccagtttcgtagaatttattcacactaaaaccaattatacgttaaatcattcgttagtcttgtaacttttgttattacttattaaacgccatggcgatgttgggtccactaaacagcgcagccaatcacataaataggggaacacgccagttagattgtatttttaataactgttgtccaaacgtgtaatctccaatattttatctgttccataatgctaatgacaaacagaatagaaaatgagagagctatagaagtcatatatacagatagatataattggactcagattctatgtatatagttgaagatataataaaagataaatctaaaataccatactttgaagaatcagagaagaaagaaaacagcatggccatttgttggcactaaataattagtttatggacacaagtaagacaataaactgtactgttatagtgttttgtagtcaaaagtgttccacacttcatgtgactacaccattacactcattacaataatcaatagaataccaaccaactctataatataacgtgttaaaaacatgaaggtgttaatatttaaataatagggcacgatgtttatatgcgttcttaagtttttctttcagtagttgtgtcttgtatatcgatatatatgtagtggtcttacaaagtaggtgtatgtatgaataaaacaatgttaacaatctaatcaaattattgtttactttggagtaaaacaagaaaaaaactcaggttgattatgattgaaaataggatcaaatgataatggataacgcatatatatgtgtatgagaatgagatatttgagaaattttattttcggtagaaatttgcacagaaacgtttagggaaaatgttatatgaaaaaatagttagaaaaaaaaatttagtgaaaattatttactttgtttgtgattatcttcattagatgtcatatataaatatggacatatccatgtttttctaaagtgttggcgctacatcaaccaataacacgttttattgtttgatctgtagtaattagtgagtagtaaacaacgaagcataaagcttcatctatttcatagtcgttggttgatcaattttttttaacaacacatttcaatgactagcgacttaaattgttaatcgctaaaagtaaggtttcaaattttgaattaacgattaattactaaaataagttgttgtcgtcaacaattacaaaatgaacacgattgctacaatatgttattgttatagatctttggcaactgcaaaacgaatataatttaatcacgtacgatacgactatgaaaaatcaaacttcatctaagatatatgttttggttttcattttaagattaattaaaacgagagtggttatgtattaaattgtttttaaatttataaagaaaaacaaaacattttttacatgtttcaagaaacacttaaatatttatccacaaaaaataaaataaaacaatgaatctttatttttcattcacaaaggaaatctgaaataagagtaacctaaaaaccacgtcaccacattatccttaagaatagatatgtaatgtacacgtggcagatctcaagtggagggaaacgattcgtttaacccaaaacatctcaaacaattcctcttttcttagccttacgaacatattactaccaacaaaacaatcaagaaccactctttcgtgtcgcaataacaataagaaagaaagaaaaagaaaaccagagatg

SEQ ID NO: 17265 - DNA, 3003 bp, Unknown; identical to SEQ ID NO: 17264
  misc_feature (1)..( 3003): 2750-1469P.txt file - cDNA_ID_1808354; gDNA_ID_1620630; Annot_ID_162653

SEQ ID NO: 17266 - DNA, 3000 bp, Unknown
  misc_feature (1)..( 3000): 2750-1469P.txt file - cDNA_ID_1808354; gDNA_ID_2926193; Annot_ID_141151
ctactaagtctactatagtagatatatcagtacatttttatttatatatatacattttcattttaatgcaaacaaaacaattactatatgtttcccactgacgagtaaaaaacttaattagattcacagagagcaaataaatataacttgtccttctaatgtatggccgagtgggcaatggcgaatgatgatccatttttgtgttgtcaaattatcgttggttatgaatatcggtttccccatgcaatttattgtttcgtatactaaattctttaatatgttaccaagaacgtgaaatcgaaatcgagataatgtgtaacacataggcaagccatgtaaattatgcagtcataaaagagacgatacgctaaccaagaatcaatatatggtttcgagccttcgattattagaaagataacgaccacactactattggttctacatgttttatgtacataaaatcaaatcgggaccaaataaaagaaaaactgaaatggaccagccaatataatgtatatattctttaatatcagttgataaaaaaaataacaggaaagagcaataaaaacatagagccatgacattatgtcttcatcattatcagccttaaacgataacaaaattataaagctctagaattcaccaaatatacccaattgaatttctactagtacctaaaatcatagttacgagggctaatggacttctcataagacttatcttacgcatcatttggatcctctaatatttcgcacactattaagtccctagacgaatcgaaccaaggaaatgcgtaattacctttttaagaagaattaatgcacctaacggatattgccgctcaacatagagtggttaatgttcttttttgccaacctgtatttccatttactgaagaaataaatttgacacaactaaatctttgaaaattacaatattttataaagatttacagtttttgggttttataaaataaataagatttgacaaagatagttatgaaaagaaggatgaaatacggatgtcttttcatgaagatttataaagagtactaataacttcatatcttatgattagaaatctaactttgaggcccttgtgtaccttcgaatatagctagtttatagtgacgggacccttagcataaccaaaatcactgacaagccatagcattccacgtggttaagtccatctatactctcattatcatcttccctccggttcgggttcacgatactggtttagcaactaaattatcaaactatcaccagtttcgtagaatttattcacactaaaaccaattatacgttaaatcattcgttagtcttgtaacttttgttattacttattaaacgccatggcgatgttgggtccactaaacagcgcagccaatcacataaataggggaacacgccagttagattgtatttttaataactgttgtccaaacgtgtaatctccaatattttatctgttccataatgctaatgacaaacagaatagaaaatgagagagctatagaagtcatatatacagatagatataattggactcagattctatgtatatagttgaagatataataaaagataaatctaaaataccatactttgaagaatcagagaagaaagaaaacagcatggccatttgttggcactaaataattagtttatggacacaagtaagacaataaactgtactgttatagtgttttgtagtcaaaagtgttccacacttcatgtgactacaccattacactcattacaataatcaatagaataccaaccaactctataatataacgtgttaaaaacatgaaggtgttaatatttaaataatagggcacgatgtttatatgcgttcttaagtttttctttcagtagttgtgtcttgtatatcgatatatatgtagtggtcttacaaagtaggtgtatgtatgaataaaacaatgttaacaatctaatcaaattattgtttactttggagtaaaacaagaaaaaaactcaggttgattatgattgaaaataggatcaaatgataatggataacgcatatatatgtgtatgagaatgagatatttgagaaattttattttcggtagaaatttgcacagaaacgtttagggaaaatgttatatgaaaaaatagttagaaaaaaaaatttagtgaaaattatttactttgtttgtgattatcttcattagatgtcatatataaatatggacatatccatgtttttctaaagtgttggcgctacatcaaccaataacacgttttattgtttgatctgtagtaattagtgagtagtaaacaacgaagcataaagcttcatctatttcatagtcgttggttgatcaattttttttaacaacacatttcaatgactagcgacttaaattgttaatcgctaaaagtaaggtttcaaattttgaattaacgattaattactaaaataagttgttgtcgtcaacaattacaaaatgaacacgattgctacaatatgttattgttatagatctttggcaactgcaaaacgaatataatttaatcacgtacgatacgactatgaaaaatcaaacttcatctaagatatatgttttggttttcattttaagattaattaaaacgagagtggttatgtattaaattgtttttaaatttataaagaaaaacaaaacattttttacatgtttcaagaaacacttaaatatttatccacaaaaaataaaataaaacaatgaatctttatttttcattcacaaaggaaatctgaaataagagtaacctaaaaaccacgtcaccacattatccttaagaatagatatgtaatgtacacgtggcagatctcaagtggagggaaacgattcgtttaacccaaaacatctcaaacaattcctcttttcttagccttacgaacatattactaccaacaaaacaatcaagaaccactctttcgtgtcgcaataacaataagaaagaaagaaaaagaaaaccagagatg

SEQ ID NO: 17267 - DNA, 3000 bp, Unknown; identical to SEQ ID NO: 17266
  misc_feature (1)..( 3000): 2750-1469P.txt file - cDNA_ID_1808354; gDNA_ID_2926193; Annot_ID_201236

SEQ ID NO: 17268 - DNA, 3000 bp, Unknown; identical to SEQ ID NO: 11886
  misc_feature (1)..( 3000): 2750-1469P.txt file - cDNA_ID_1808366; gDNA_ID_2214521; Annot_ID_134072

SEQ ID NO: 17269 - DNA, 3000 bp, Unknown; identical to SEQ ID NO: 11886
  misc_feature (1)..( 3000): 2750-1469P.txt file - cDNA_ID_1808366; gDNA_ID_2214521; Annot_ID_184625

SEQ ID NO: 17270 - DNA, 3003 bp, Unknown
  misc_feature (1)..( 3003): 2750-1469P.txt file - cDNA_ID_1808370; gDNA_ID_2214478; Annot_ID_133190
ccattgattgatgcccaactatacgaactggtctaaggttcttctggatctcttctctgacaattgcttgactttgatgatgattcgatttggaactgaaattgcaagaaaagtaaaagcaggcgatttgattttgattcgcatttgcttggtgaacactgccaaaggctaaaccggtcgccgagacggttaatctgatgtttgggattgacacatcatgcggctgttgtttctccacgtaacatttggagacccgctcaaatatattgtgggccggagaacattgttttaccatatagggcccatagactttgaatatgtgtaggtaaataaaatacaatctgtggaacaaaaatggcaaaaatatttgaagtcagcaggattggttaacaatttgagcacagaaatacatttggtaacatctgagcatatcattcatatcatatcgctgtcgaatttgaaggaaaaaaaaaagactaaggaagtggatatattggtgaatgctgatgatgagaaaacttattattatatacgaaaaatttactaaagacagcaatattccaaaataatgatagggaagattctgagatggtgtgtggtcagtgtggaggcactacagatggtcaaacagtagcatacccacctggctatttggacaaggacaaggaagaagaaaaatcgagaaccatcttctcagccgattttagtaaccatcttcttgtttgctccgaacaatcaagagatcgaaaatggctgatgttcacaaaggaaaggtttgtgtaaccggtgccggagggtttttgggttcgtgggtcgtcgatcttcttctctctaaggattacttcgtccatggcactgtcagagaccctggtactgaatcttctctccttttactctcttcctctgtaaattttccgcctttattcactctgatgtctcgttgacttgtgtgtgcgtgcgaagtagaaagtctgttcccaaagtttgatttttttcttaatctactttctaggtgtttagattcgctagtttctgttctctcgacggataaaagccttagcttttgatttttgtttgttgttcccaaatcattttagtttgcttctcttcttttagtgtagttgttgttgttctgatgaagagtttcgcatggttcttgttatagataatgaaaagtatgctcatttgaagaagctcgagaaagctggtgacaaactcaagctcttcaaggctgatttgttggactacggctctcttcaatctgctattgcaggttgcagcggagtcttccatgtcgcttgcccggttccaccagcttcagtccctaatcctgaggtgaggatttcacttcactcctgtaatctcactggggatatataacatagtctcactctgcttccactggttttgcaggtagaattgatcgcacctgctgtggatggcacgctgaatgtgcttaaggcatgcattgaagcgaatgttaagcgtgttgtgtatgtttcctctgtagctgcggctttcatgaaccctatgtggtcaaagaatcaagtattagatgaggcatgttggtctgaccaggaatactgcaagaaaactgaggttaatgcatcctcaatccctcatctcatctcacttgttatatatcacatcttttttttgctgacttttaaattcctctggcagaattggtattgtctggcaaagacacgagcagagagtgaagcttttgaatttgcaaaacgaaccggacttcatctcgtcagtgtttgccctacccttgttttgggacctatactgcagcagaacacagtaaatgctagtagcctggttcttcttaagcttcttaaaggtatacaacaagccttatcattcacatctgggattgttagaagcagcgtggtatacatgggttggtgaatctcgggttttgattttacttttgtgtggtgcagagggttttgaaacacgtgataaccaagaacgtcatttggtagatgtgcgtgatgtagctcaagctttactcttggtttatgagaaagcagaagctgaaggaagatacatatgtacatcccacacggttaaagaagagattgtggttgagaagctgaagagtttttatccacattacaactacccaaagaagtaagtaaacaaacaacacatctctctgcttagttttgtacactcaaaaccatccttgacaattttttgagcgaaaaccttttgtcttgagaacagactaattgctgtcagctcattactgatttcattcaataagcaatgacacttacctttagatcagtgttttgaagtttctttaagacctaactttgatccaacctctacttatccaatgttagatacattgatgcggaagatagagtgaaggtgagttcagagaaattgcagaagttgggttggacttaccggccgttggaggaaacacttgtggattctgttgagagctaccggaaagctaagcttgtggactgaaaacttggaaagaagagcaaaatagtgttttagcttcatatgttatagttatagtgttccattctgcacacacacacacactctctcatcgtttactcaataataagagttgtgcattcaccatggatttctgagtttttgttattttctttttagatatcattacttttattaccaatctacaattttctttccataatattttacaatatctctctattgtatatgttgttccaatttctaccgaaatcttactttcaaaggataaaacacacaaacttttatctcaattggtacgtcttgtttctgtataaatttgttaatcattgtagaaaataacataacaaatgtggatttaagctgaacataaatattaatgctttttccgatgaataaaattagtcgaacaaaagttgagatatggagctgaagcagagatggtcaaagtcaaacaaatagctaccatttgcacaaggaagaatcttcttctcatttgggtgatcaaaaatg

SEQ ID NO: 17271 - DNA, 3003 bp, Unknown; identical to SEQ ID NO: 17270
  misc_feature (1)..( 3003): 2750-1469P.txt file - cDNA_ID_1808370; gDNA_ID_2214478; Annot_ID_183225

SEQ ID NO: 17272 - DNA, 3000 bp, Unknown; identical to SEQ ID NO: 12895
  misc_feature (1)..( 3000): 2750-1469P.txt file - cDNA_ID_1808374; gDNA_ID_2214579; Annot_ID_135232

SEQ ID NO: 17273 - DNA, 3000 bp, Unknown; identical to SEQ ID NO: 12895
  misc_feature (1)..( 3000): 2750-1469P.txt file - cDNA_ID_1808374; gDNA_ID_2214579; Annot_ID_186426

SEQ ID NO: 17274 - DNA, 3003 bp, Unknown
  misc_feature (1)..( 3003): 2750-1469P.txt file - cDNA_ID_1808383; gDNA_ID_2214565; Annot_ID_134933
gtatcgaggacagtgttacagcgacaaaaccatttgtaataaatttagatctctttaagatgtctttctttcttccaaaaaacaacattgtgattttagtctttgttcttgacctagttcatgatataaaaatcatcatcccttttatctgaccttcactcatgtttaatcaacttgaatcttatgagacctactacaatcacacaactctcctcttcttagagcttgctgcaacaatgacttcatcgaagctgatatagagtacctaccgtacctaaagtgtttcattaagttgatcaaacttgtgaggcaatgagattttgagaggatagcttgaacctctttggatatagctacaccaagattgctaagatgttctaccaatttcagaataaatcatcaatgttcacatcaattatacaactttgatttttccatctcaaacgtatatatagaatttgagttgcatatagatacgatctttacctatacaatcttgttaaagtagaccacatcgaggttgcaattaatgttctcccgcaatatgtaatcacaaacaataaagattatcaagttttaagtcttcctatatcacaaactaacctttaaggagtcttaagtcaatttatgtgtttcaccagattctacctttgtttagacatggattgtgtctttagcatccattcattcatccatagttacaaatcacctttccatcaaaatgatccactcccatccatagtagtatccaccaccattaaaattgtaacatggggctatgaatatgatagcattcttcgattcttgcatcaatctggaacctaaatcgaagcataaactacaccaaatacaatcgtaaacaaccagaacaaagatctaacaactcatgctcaagaacatatatagattaatgatggagaagatagataagagaagtagatgaacacaagaagttattagttaagatcaatcggtgtgatattgatcctacatctcggcgagagcgggattgaacaattcataaacttaacttcacaagatcatggagagctccataaatccggaggttcacgaatcatggccaaaaaatctatcgtacaagataacaacatgaacacggctcataaaaaaccttatctctattaatcagtaaaaccctaattttcagccaattccggttcagttagtcttcggtttaacattttttcttcggtttaatatttaaacaaaaaaaatacaaattcggtttaatgtcacacaaccattactaaaccgcgtgattcgaagcacaacttaacaattagaaattagaatattcatttttttcaaaaacaaatttggattattgcattattgtttggataaaaccacgatgatgttcacatgacaaaatgatgtttagtgaacgagacgccaaccgctttatatgaactgttttagttcggagattttgcgagttccgactatgggttagaactaaaattttcccatattgtcaaatgatgttgttataaataatatattctctacataattactgtggaattaaggaacataaatttgattctttaacagagaagtgaagatattggccatgcttggttgggttgtattatgccctacttttcttcccccccaacacaaagaatccaaccatgtttaaccaaaccaaataaatatataaaaagcaactataaattattcacttgaagaaatgttaattaacaaatcgataatttttatttaaagcgaattcgccattccatgaccatatggacaaaaagaagctttattgggccaaagtacccacatgcatatcccacagctaatcttttttatttttgacatatcccagctaatcatattccatgtttcttctatcctttttttttaaaaaattgattatattcccatgataatcatttcaattgttttacctaatcctatatttgttcggagtttctactagaatttctatctacatcaacatcaaattgtaatagctttatgtctttgctaaagcacattacctatgtagcaaacaatcgtattaaatataaacgaaaatatagctttatgtcttttcactaaaatcaacaatactaatccaaatcggagatttgctttcggtaaacatttttgttcgactttttatctagaatattataaagtaagaaattttgtgaataagttactaaaatgaattcattacaaaagtagataaagtataaactatcatgataatttagaagtaaaaggattatttttttgtgaatagtaattttagataaataaattatatatctactaaagagtaaataaaaatatcaatacaattatttaatttttaagggcaatacaattatttatcattttgattcataattaaaaaaaattgtcgacaaacaaaaaagcttcataattttaaatttagcatatattaagagatatttcataagagacactaatgtctttctaattttcatgttaacttggatgttttaaatatcaatcaaaaaggttataattgagcctcaccaaaaaaaaaaaggggttataattgatctgattcgatcaattatccagtgtaattatatattgcaatctagttaatgatataacgttataggtctcatttcctacattcaactaaaaggtaagctaaaaaatctaaaagatacaaatatccaacaggagaaatatctttttctctcattgtctatatttgttgttcttctatctctttctctctctttttcttccacaccctcacaactttacttacgactttattatatatataccaccaacccattttgtcataaaagatcattactcgttaagactttccactacccattctcattctctcttcaactaatattcttccccggccctcataaagaagcttctcctgttctttattcacattttccaaaattgtatcttcttaaagtatctccaacaaaactaaatcctactaagttaagagatttgaaaatg

SEQ ID NO: 17275 - DNA, 3003 bp, Unknown; identical to SEQ ID NO: 17274
  misc_feature (1)..( 3003): 2750-1469P.txt file - cDNA_ID_1808383; gDNA_ID_2214565; Annot_ID_185977

SEQ ID NO: 17276 - DNA, 3003 bp, Unknown
  misc_feature (1)..( 3003): 2750-1469P.txt file - cDNA_ID_1808391; gDNA_ID_1620702; Annot_ID_48797
aagattttgaattatttaaagttcacgatatattggcatatacctcgaagaatggtgatcttgtactcaagtgctggaggagacctttaatttttaggagtgaaattctcttcaatttgcaattttctatttgatcacgttgaagatttcaaaaacattttttaatccaattttgtatgtttgaaattagtcaggaattcggcatatgattaactgcttatacacaagtattctgaaataaactaagatgttttggaaaaaaaaaaaaaaaaaaaaaaagtattttaaactcatattacattttttttcttcgcaaactagtattaccttcttactagaacaagtaaacaactatgggatcaatgaggtcatcgaatgccaaatatgaattctattattggccgtctacaaattaattaatggatataatgcaacccttggatactcataaacatcattatgcccaaaaagaacattagaggtagactttttcctctacacaagagaagctcagctgtctacagatcctatcttctccttctcataattttatagaaaactatagtatatagataaaaactatattgttttaggcgtcatatataagaaatatgcccacgcaagagaggataaaaaaaacaccacacaacagaatattttcccttataggtaaaggtaaaatgtcaatggaacataatattaaaatgattaaatttgatgcaaaaatattattttgtatattttcatgtagggcatatgattctatctttgtgatataaaaagatagcatcgagtacccagttttaaaattatgtcaacgtaggcatatcacaagtgaaaaacaaaacgtagacaaatcaaaatattaaaaatgtaaaggtcttatcataagtagaatgtgaatttgttaatagaaaatatgaaaaagtcgttaataacataaatgtgtataatatgtatcgtgggttcgtatattagatagaagacaagtcacctacgaacaagaaaatgtactatgtagtaatcttggaatattaatgtaatttctctctaacgctcaattaatatataacgttgtcacttgactcactttatctcttaaccattcattttctggtgttttgtgtaccgaataacatactgattaattattatgtatccgtccacttgttcgtgattttgtaaggtaaagtccaaacattttgtaaatagtctgaaaagaccaaaaaaattctaaaacataacgctaagtaattcacctaacttaaattatatgagacactaataatttcggaaactttgatgacgattttagctcaaacattatgtaactattttctaatgtttgtcccagtgattatgatgatatgaatatatgataatttttagatatttaaattatttcaatacttttgtagatagtgattgaatacattataccttacctaattagaaattaactcattcattcacctatagtttttacaaacacattactggtttacaaactcatattattatacgctgatgacatttatataaatcattaaactacaatgtatgttctaaaaatcttccaattttaaagtaaatagtataaaattaaatatatgcataaagtttaaacttagtttgtttccaaagcaaggaataatgtgcagggattcagaactttggaaattcttgtgagtttttttaaaattataagaactttggaaattaaactttagaagaaaatcttcatacaatcataaattcagctacaattgaaaagttgtagaagaacaaaaatagacaatgaaattagtgtttcttcaaataaaatggaacattttcttttgatgatattaattagcctttagaaaagttgtgatactcataaattgaattactcattttttctagagactccataaattgaatttaatctcataagaaatgtaaaatctatttttcaattgtttttatcacaaataaattattggttagaaagtgaattattgagatgaatatatatatatttgtgggaaaaaataaaatttaaaaataaaaaggagctatcatcttccatcatctgtctttagggcctccctctaagtctaacaaccctaaaataaaagattctaacaccaaaagagagaagcaaatctcaaattcttcccctattattatatgtgactgttgttgtttttctctcttttaccatctttggcctgaagaaaaaaaaaaggaatccttcttaatggatttggtaaatcaattaagaaagcattacacaaaataaaaaaggaaagttttttaataagcttcattgagagagagatatagagagagaaaagagagagaggccatattttgataagagaagaagaacccttatagagaaagagaaagagagagacagagagagtggatggatgtcttatagaatgaacaaaacatcctctgtttctcttgtccttgtccctttttccagatcttaaggttttccacattttatcatctgggtcctctccttaatggtgaattctccatctttacaagtttgatgtttttgttcatcaaatctggcgtttttttttctcttctaatatatattgtctctgctcattttccgtttctcttcccattgattgttctgtttcatttctgttttttttttttcaatagttttgattggatgctttgatgatccattgtcagatttgaagacactcaattcctatttgatcggggactagaatttggattctgtttcagacaaaagtagatttccctgtctctttcccgtttgattttcaataagatgaatccggaggtaaaacattgaacaattcttcataaatctcagaactttgagcttttttgaatcttaaaacacgatcgaagtaaaaaatcgaattgttagatgaaatgggcaatcgtcattttcgcaaatctgatccgtatttgtgagatcggattcattggatcgactttggggttttgcaggagcaaaagatg

SEQ ID NO: 17277 - DNA, 3003 bp, Unknown; identical to SEQ ID NO: 17276
  misc_feature (1)..( 3003): 2750-1469P.txt file - cDNA_ID_1808391; gDNA_ID_2926189; Annot_ID_140950

SEQ ID NO: 17278 - DNA, 3003 bp, Unknown
  misc_feature (1)..( 3003): 2750-1469P.txt file - cDNA_ID_1808399; gDNA_ID_2214477; Annot_ID_133137
tcagaaaatgagaacccttcccacgtacacactctttgcctttccttttatagctttcctgtgacgtgtttcttcgtttctgggttttgggtttactagcgaaaacgtcaaagatcaacttttgttctgagagattacgattagggtttatcggggattttgaaacgatttttggtaagaagatgacaagagtcaagagtaaactagacgaggaactgtcgtctccttggttttatactgtttgtaccatgggaggaatgcttagtgccggaacaacccatttggctataactcctcttgatgtcctcaaagtcaatatgcaggtttgtgtttcctttctctgcttcttgacttcttcaaatctctaatcttgtttgtttcttctagttattgtctttttagggatgtataatgatcgatataactgctaaatttaggatcttttgcttttctctgagcttaaatttggaaccatcatgattgttcagtcaatgaggatcgatcattctctcttgtaggtgaatccagtgaagtacaatagcattccttccggtttctctactctcttaagagagcatggtcattcttatctttggagaggttggtcagggaagctattaggctatggtgttcaaggtggatgcagatttggactctatgagtacttcaagacactctacagcgatgtgttacctaatcataacagaacttccatatattttctcagcagtgcttctgctcaaatattcgccgatatggctttatgtccttttgaagccataaaagttagagttcagacgcagcctatgtttgcaaaagggttgcttgatggatttccaagagtgtatagaagtgaaggtcttgctgggtaagcccttttttcagaatcattctacttggctggctcactttgcgttcgtttttgagtcttttatctcttcaaatgcagcttccacaggggactttttccgctctggtgtcgcaatcttccatgtaattttactgcttcgtgcaatgcctgttttcacttaatctatttgatcatcaacgtctctcgttatcagtttgatcttaatcttattacaactctcaaactgtcagttatgtaatcaaatcattcagttttagtcattagcatatgagacagatacttgagctatagatgcacattagcatgtctgtagacttggttgtgttttctaccaaaaccatatcttgttgattatatcttctatgtggtttcagtttctatggtgatgttctcaacgtttgagcagtcagttgagtttatatatcaaaagattatccagaaaaggaagcaagattgctctaaagctcaacaactcggtgtcacatgtcttgctggctatactgctggagccgtaggtacaatcatctctaaccccgcagatgtggttctttcgtctctctacaacaacaaagccaagaatgtgttgcaggtcgactcttaaccatcattatttatcttttaaaatccatttcgaaatttcacaatcatgaagcaaagtattcttattgatgttggttatttgcttgagctttaggctgtgaggaatattgggtttgttggtctattcaccagaagccttcctgttcggatcactattgttggacctgtcattactttgcaatggttcttttatgatgccatcaaagtcttaagcggattgtaagtagaaatctctcaaaatttccatatcagaaactcgaatctctctgctccaaatcctcatctaaccagcttgattgtacaattgtgaaaattatagccctacaagtggcggagtgaagaaaccagtggatgcagctaaattatcagtgtgaagcttagaagagtagatctatctctatcaacaataaaaccaggaactcaaaacatacggtcatataagattctcttgcaagtagatacgaggcgttgtgtagcgattagaaggagctttttgatattttcgtttcatgcgcaaatgcatttgtcttgaacccctgcctgaaattggattgtaagtaaagtgctaatgatggatattgctgtaaacagaaacaatgatctttaactgattgatgtcaaaggaatgagtctggttttatctttggtatgctctgaacaatttttgtatgagaagagaagactgagatttgctgtttttagattgttcaatagcttccaagtactttggttttaggcttttagctaattagtttgtgccgtcttcatattttccccttcttctttgcaattttgctattttatggaagctgattatgaccaagcatcaatgaaggaatctctccactataacttatcaggttcacataactttcttaaaagtaaaacagtgaagaaccattcaccttccatatctccagagcaggttcattgcatcttagttagggtttaaccttcaaacttgtctttacactatcctaggattctattgttttcttgtcttctttgtattgctgcatttgattgacttaccactactctcttgagattggccaatttttgctgattaacagttcatttttgctctaagtttcatcagttttttttcttggcatggatgttttgctgaattatcattcgcctaatgagttacacaaacaaaattgtagattttcagagaaaacaaaacaaaacatatgaataaaaaagttatgcatatgatacgcgttaagaaaaacaaatgattaacgtacgtcggctgtgaagtgttgtttgatacaattgggggaagtgacggcacaatgggctggtttcacggcccctttctaagtcatacacgtctcctttttttattttcgtttttttcaaaataataaaaataatatagagagtggcatatccgacggtttaggatctctgccttttctcaacttatagtatataccaaacactttctaaggtaacatgagatatttcacatccttttctctcttattcgtttctgagattcccttcttgttgttgtagccatg

SEQ ID NO: 17279 - DNA, 3003 bp, Unknown; identical to SEQ ID NO: 17278
  misc_feature (1)..( 3003): 2750-1469P.txt file - cDNA_ID_1808399; gDNA_ID_2214477; Annot_ID_183160

SEQ ID NO: 17280 - DNA, 3000 bp, Unknown; identical to SEQ ID NO: 3749
  misc_feature (1)..( 3000): 2750-1469P.txt file - cDNA_ID_1808411; gDNA_ID_1620660; Annot_ID_47955

SEQ ID NO: 17281 - DNA, 3000 bp, Unknown; identical to SEQ ID NO: 3749
  misc_feature (1)..( 3000): 2750-1469P.txt file - cDNA_ID_1808411; gDNA_ID_2926174; Annot_ID_140247

SEQ ID NO: 17282 - DNA, 3003 bp, Unknown
  misc_feature (1)..( 3003): 2750-1469P.txt file - cDNA_ID_1808414; gDNA_ID_1621085; Annot_ID_55375
cgtttttgttttatttttttctcccttgcacaaaaagatcattttcaatttttcattatgagttgattacttgatttccttcatgtgttattgaatttggaggactagtgattcttgtagtgattatcacattttcccactaggtagtttagtgtcagtttatttcttaactatagtgattttaaccatttacggtttacacaaaatacttctacagatttggtaaaacgattggaaaagagaattcaactagaaaaaagagagggttactgtttgttacaaacaagacaagctgtttttcattctaaattgttggcatatgactaaaacaaaatattcttaagaattaaaagaacaatcatgatcaaacagagtacaaggagtatagttgcacatttcaccattgctccttctctttgtgttctctccgcctatttaaaaattgaaatgtctttgtgagttccatacggtgaaaaatctgtagtactcacaaaatcttatgagttttgggtaaagaatcaaaccttttgtagttgtttatagccttcctcgaccgatgtagaaacgttttggacattgtagtctatccgatcaacaatcgtgccctaattgatacaagaatataagaaaactaattgttgagaagccagcaaaaactttgtatctagccagttatgtaattcataagccttttaatgactaagctaggcacctggtcaatcacaagggctgataagtctttcattatctgtgcaaggtcattcacggaacccagaacctagacagaactctgaagttaatcgccatcgaaaatgtgaagcacgcagcttcttaaatatggtcgagtaacaacttccattacctgttgtatctctcgttccctttccgctgagacatgttgcccttccttcaacttgattgtctggtgttcatcgaaaccctacaatttattgaagaccagcgattctcattatggtattggcagagtaaggacgacaaggttctgaagattgattaaaaaaaatctgactcgtcctagcatgataaccataagaagtgtttcttaaaaatgtaaggaagacaaggataactgattaaaaatctgaattgctctagctagataaccatattaagtccttattaatttgtcaatgatatatagttttacaatacaagtaagcacttaccatcccaccaagttcatcctcttcatccagtctcgacatctttccattcacattaaactctaaatctacttcatcctgaccctatgattagagaagccaaatacaaataagaacatcatattacggtacatgcatgtctcaagaatcaacactttttttgtttatttcttgaaaataaaggaaacatacctctttctgctgctgcagacgttttaagtaagtagactgttttctgcggagctccatggaaaggttctgaagatctgttgcaagagaacgctgtcaaaagcagtatgccaaaaagtaggtcaagtccattggagagccccactatacatgtacacagaactttatcctcatgctacaaactcaaaacatagaataacccaaagtacattatatagagggaaaaaaaaacacttcatacattttgctgactgataatgtcaactagataggtagtcaaaacatatgagagtgatttaacccaaaattcctaactttcttctctaaaagcacaaaagaaaaggtaatgaccatgcattctttattgttaacaagctcgattctgaaaaagtgtccaacaacctacctgcacatttttcctgagatttgattcttcagaaggccctctagtagataacatctgcaatctcttttctgacttcctcaacaaatctgtgatctcatgagtgagcatctcgacttcacgatgaatccctttgttatctccaaatgtaggcataagagcctttgaatgtgcctttgctagttcattcattttgtctcgcaccttttgtatattaaaagttatctcctcagaatcatcaacccaagctggtggcataccaattgtgaaggcatcactactgcaaacattcacaacaacacttaaatcatttgctcattctgttacctaattcgtttagggttctaattctgtatctcaaatcaatcccatgattacaattcgtttctatatataagttcatagaatttcccaggttttgcagaatcaaacaacacattatattattaccttgatggaccaggatcataggaattcaaaggagcataagaggagtgattggaccgggaaaatgaaccgctaaccatttcgatcaccggaccaccgaacgaatcagacgccgataaagataatggagcacgcgcgctcttacacgcatccctgtgtttccggtacaccgtcgttcgattcctcgtcgccatcaataccaaatcaattgattctcaacagaatctcgaaagtaaaatttcccggagaaaataaacaaaatcggagcttttgtcgtcggcaaaagcaaacgaatctgaatcgcaaaatcgtttctcattagcgcgtgttacagacttagcaacgaaggagaagtatttgggcctttttaggcccatttatatattgggcttatagtccacttgcgcgatagggtcaatataagtgtgtggagcacacgttttaagacggtggcgcaaagacgaaaatgcccgtagattcgtggcggctaaaagtcaacagagggacgttggtggttcagggtaaaagaggctatagtgaccggttaggggtagtttggtcattggatttagctcaatagattcgtgtccatggattccctcatgtcgccagagaaaaagaccacatttaaaggtcttgcctttttggtgtgtttcctcgcactttcaggctgaacaaagtactgacagatgctaataaatacacggaggaagaatatgctcctttaattattatctgagatttttcaattcaagttcgtgtggattcagaatcaaaatg

SEQ ID NO: 17283 - DNA, 3003 bp, Unknown; identical to SEQ ID NO: 17282
  misc_feature (1)..( 3003): 2750-1469P.txt file - cDNA_ID_1808414; gDNA_ID_2926183; Annot_ID_140637

SEQ ID NO: 17284 - DNA, 3000 bp, Unknown
  misc_feature (1)..( 3000): 2750-1469P.txt file - cDNA_ID_1808422; gDNA_ID_2214588; Annot_ID_135383
agatggaaaacgctctttgtaaatacatagccaccagtcatagaacccaaggacccattttctctgctgttaccttaatgaaaaaggtgagattcatatatatggaaaaatctcttctgtaaaatggtacttagtgtcctgaaactgaatatgcataaagcaaccggttgggttgggtcttcactgacatgattgttgtaggttccatcagagttagaaactcacaaagataatgtcacagcctccattcaaactagttcgtgaaggagtgttgagttgtagccaaacagaagaaaaaattgatattgggacaaatgatcgatcattagtgacattagatacaaaacttgacagcccttctttttggaagttgtagccacaattacttaaccctaatgcttttttttttttttgtcaaacacttaaccctaatgctaagcggctatataaatagaagatctttattctgatattatctctacaacttttttatcttgaaaaaaaaaatgaaaggaataacaaaaaaacttttggtctcccgctctctcaaacgtctgacggccaagaaaaaccggaggaagattcatcgagagacgaacaagcgtctcaaaccggaggaagatccatcgatggtgaagaggcgtcaagactctgattcagattcgctggagaaggaggtttcagttgttgtaaccaagacgagtgatgatgagatggtgtcaacagataccaaaaagaattattttcaaagaatatggagtgatgatgatgagattgttttgctgcaaggcatggttgattttgagaatgataaagggaagagtccttatgatgatatgactggttttattgatacggtgaagaacttcattagctttcaagcgaatcaacatcaattcacaaccaaaatccgtcgcttgaaggacaagttcctcaagaaatggaacaatggtgtagatgagaactctcttgtaaatgctcacgaccggaaatgttttcaactttccaaagtaatttgggaacctacaactaaggtggaggaggtaggagattggtttgtaaattcttatcttgtaggatcaattgcgaggttaggggtgagtgaagacgtaatgaaacagagttggagcatggttccgatagagacgaagaaggaggtcgaagagaagttcaagctgttgaaagatgaagaatctgaaaacctacggctaaagacaagttttttgcaaaaggtcaactctatgatcattgaagcaacaaattagacaagtatcgaattagaggtttaatgcatctttttcatttccatcccatatgagtctgttttttctatttggtttgttattggtttttgatacttggattgtgttgttaaaaacactatggaagaacggcagattaaattttaatgcatccaattgtggtcaaggtttatggtctaaattttggtcagaatactcttgttagatacctctcactttgcttagggtcaacaagcatcaatgtttctgagatcacagattttgtaatcaaacagaagcaacagattttgtctatcttgcaagcaaacagaagatcacatgcatattttgtcttcaacatgaacaatttcccggaaacgtgtagaagcaacaagactcttctgctccttcctcaatgacgatgtttctctctggaaatcactggttttctcaagaccagacaatagaacatcgtatgtcccaagcgaaggcattatctctcgctctctcatctctcctaatatcttcattgctttctctggactccctgctgagatataaacatccatcagcgcagtgtaagcagatagacccttttgatcatccggaagtaagtctaaagcctctgcagctaagctaggtcttctcccaaacccgagcatgtggatcagcattgctccatggtacacaccaagcgagtgttgggatttcaccatctccttgaccacatcaatcactttagagagctcgtttgatctcagaaagttaccagctaacgcaagatacgctgacttctcaagatgaattcccatttccaagctccaatcaagagccaacgaagccaagtaaataaccaagatactgtgccaactattagtagtcattaagagacaaaatcagtactagatactgtgccaactattgtcaaacccaaaagtgtttggacggtttcctattatatctctatgcttttactaagacaacctagcaaatattctgaaagtgtaactgcacgactgatagttgcatcaatagtgtgacaagaagccataaatgtttgatcagaggtgtaccatacgggtacctgcatagttggagtaaacaattgaaagatgaatttagccaagcaggaataacaaacagtttaaaattttgtaatcgatccagggagtgtatttactcaaagaacagatcaaggactcttctaatagctcctgagctagctagttcttttcctattgcttcacttcgagttttcagtaagacatgaatgaactccacaatctaagacaagccatcagcaacacaaacgaaatcagaaatatattacacaacagaaaacacacacaagacacaagagtatatgttttgagttagaactccgtacttgttacatgtttgagtgttatgttttatgttgaatttaactaaaatgcagacgttagtatggaatgggcttcacaaataaaagcccaatagtatgtttttttggtagggagcccaatagtatgttggttcacccaaatatcatttctttctctgagagctgtttattatattcacacaaagaagaccaacaagaaacagagttgaatcagttctacaatgatctctgtctctcgattcttgtcgcctcaattctacgcaattccaaggttttatccgacaaaacccaatcttttaagtctctcctttgttcatttctgtaatcgtggcgaccaaactcaatctcaattgtttcaggagcttcgtaaaaatg

SEQ ID NO: 17285 - DNA, 3000 bp, Unknown; identical to SEQ ID NO: 7500
  misc_feature (1)..( 3000): 2750-1469P.txt file - cDNA_ID_1808437; gDNA_ID_1621148; Annot_ID_56809

SEQ ID NO: 17286 - DNA, 3003 bp, Unknown
  misc_feature (1)..( 3003): 2750-1469P.txt file - cDNA_ID_1808441; gDNA_ID_1620658; Annot_ID_47900
ttattatttttatacattctttgtgagaagtaaacacttctacgtgtgtatatgtgattggatagacatttttagatttcatgtctaattttttgtataagtatattttcattaaggtgtatgtagaaattgcataacgaaatttgtaatacacattaacacatggcttcaatcgtatatatctagaagtagaagactgcgtcttgaattagatagcgagttctggcatcaacaacaatccagtttgcaaaatgtgcaatgtgattaacattttaattacatgtcctaacgtttgagttattagagaaacattatctctgttcttcagtcttttggagaatatggaccctcaagctactctcctttgcctgttaaaagaaaattatctcaccattttagcctatggagcttccacatccaaattgaaccaataaaaaacaaaccattcaagttatagataaaactaccggaccggtcacatatatataatgaaattaggagataatgaattaccgtgaagagaggaatggataaaaggctctcgtccatttcttcaaaatataacaattcttgattgaacatgccgatcaattctgtcagctcatagaggattatttcaacctgctgatatttaatcacccaagacattcttaaattaatttcttttacatgtatctatacaaaaaaagttaggaaaatgatctgtatagataaagtggacttactcgtgggagaaacttgatgatgacgtcttcgatctcgtccatgacttctatagctatgaccatttcttcatgtatcgacaccatatctatctgtaacttccaaattattagtttctgctttcttgacaaatacacaaaatgtttataaacaaattggtttcccaaagagagaaattctaaccgtggcaccatgtacgaggggtaatcggacagacaaagcatggagttttcgagttagcttgctcaacgcttcggagttttttgcgtctatttttgaccactcattaagtaaaggcatttggaggctgagaacttcacgtactttgatatcttgacggagcctttgaatttcaatcaaattttctacaacgtagttcctcattttgtatatcctaagccaaacccaaaacaactgatcctgaaaccattcacagaaacaaattaatagatatttataagatacaaatttaaatatttttcatatagtttttgtacctcaacgttgatcttaaggtttgccatagtggcttcagttcttgcgttaacaaacctccattgaagtaatctgttttgaaaaatcctaaaccggtgataatcctcctcttgtaccggagatactttcttctgcgccatgaagtacttcaaaactcctgccaccgctccaccgccaccgcttcttatcttggccttgcttacgggtgactcaggcggcgtcatgcacattgaagtcgtcggagctgagctggacagaggcgtcttcatagtcgaaagtcttccaggagacaacgcccacgccgatggtgagctggctcccggctttacccctctcgatgaagcgttactacgaggactaccacgcgtacgttgctccaagtaccgagcaaacgactctctgcttctaccgttgtttatctcttgagatcttgatgcgctgtttctcgccgggattatgttctcgccggatttagagtcggatgatccgatgggtctggaggatcttgttgtggactgtgatctggttatcatcactcgtttgcttgaattggaaggcgaagaggaagaagatgaagaagtagaagacgataacgaggcgtttaaggacactgggagagagattgaagagcttatagtccggctccggttattattgggcgatggaggacggagtctccgaccggtggttgccattttcttctttaatatatgacgacggttaactatatgactatatcatacaagacttatattcggtttcgtttctcgactcacttgcccctgtccttaagactcttatagtaaagctggaattatatggttcaaggaatcgtctagtctatatacactggtttgaacaattgtgatatataatatagttaggggtatattatatttaatctgttagataacggttggggtacttgaagatctgtaggagttgacagcacgtagaggcagaggtaagaacacttctgcatgtagtgtgtctacataataaaatatagagtgtattttttacacacaccaaaaagagagattataattaatgtattatgtcaaagcatatatgaaggtcagcttagctagagacacgtcttttgtttatctctcgactaaacaacatggcgttttaataaaatcaaaacttaaaaggtccaattcagaacggccccatagtatatagtctacgttgaataaataaacctcaagatagcgtcaaactctttagtctttacccaaaaatatttttttttaaataacgtcaaaactctaagtcttgacctcaacaccaatatatatttgccttctccaatatctgatttttttaattgtttatccgagtcttcttggtcttttcgaatgtttgcccgaaccagaccttcccacgttcggtggttggtggccgcctcggcctttggttgatttctgtccacattttggtccttttcattcatgtaccatgttctagggtcatttgacttgttgaccataaatctactaaaacaggcctaataccgatgggccgtagcccgttaataaacaagacaatttatatttgtttcacttagcttgggagccacggatctctagaaacatccagagaaatatcaatctccccacttctccagaacattcactcactgacaatatcccaccttcaacacttaactcctgtatatagtcctcccctgtctccagtttcgtcgcacacagttctcagataaatactaaactcactgttaaaactttctcaacaaagcttcctgtttctctacaaatg

SEQ ID NO: 17287 - DNA, 3003 bp, Unknown; identical to SEQ ID NO: 17286
  misc_feature (1)..( 3003): 2750-1469P.txt file - cDNA_ID_1808441; gDNA_ID_1620658; Annot_ID_163705

SEQ ID NO: 17288 - DNA, 3003 bp, Unknown; identical to SEQ ID NO: 17286
  misc_feature (1)..( 3003): 2750-1469P.txt file - cDNA_ID_1808441; gDNA_ID_2926186; Annot_ID_140826

SEQ ID NO: 17289 - DNA, 3003 bp, Unknown; identical to SEQ ID NO: 17286
  misc_feature (1)..( 3003): 2750-1469P.txt file - cDNA_ID_1808441; gDNA_ID_2926186; Annot_ID_200668

SEQ ID NO: 17290 - DNA, 3000 bp, Unknown; identical to SEQ ID NO: 13848
  misc_feature (1)..( 3000): 2750-1469P.txt file - cDNA_ID_1808445; gDNA_ID_2214658; Annot_ID_136508

SEQ ID NO: 17291 - DNA, 3000 bp, Unknown; identical to SEQ ID NO: 6680
  misc_feature (1)..( 3000): 2750-1469P.txt file - cDNA_ID_1808465; gDNA_ID_1621100; Annot_ID_55863

SEQ ID NO: 17292 - DNA, 3000 bp, Unknown; identical to SEQ ID NO: 6680
  misc_feature (1)..( 3000): 2750-1469P.txt file - cDNA_ID_1808465; gDNA_ID_2926168; Annot_ID_140002

SEQ ID NO: 17293 - DNA, 3000 bp, Unknown; identical to SEQ ID NO: 12030
  misc_feature (1)..( 3000): 2750-1469P.txt file - cDNA_ID_1808479; gDNA_ID_2214528; Annot_ID_134220

SEQ ID NO: 17294 - DNA, 3003 bp, Unknown
  misc_feature (1)..( 3003): 2750-1469P.txt file - cDNA_ID_1808486; gDNA_ID_1621201; Annot_ID_57674
tattaaggtagttgatgcatttttctttttggttacaacggatatagttaaatggtaattagggtaactacgtatgacatgaggcaaaataataattgaaaatgtgaatgtgaggagtgacgacctaattgctccaaggccgccttcgtcaaagaataagtctcctcaacggttgtcaaatcaatttcacacaaaaaaaaaagaaaagaaaaagatattttcagacataaatagtaaagtaattgtactattgatttcatatgataaaaggtgcatgaaacacatggtcgactattttttgtctttagagtgttcattaaggaatgttattaaaaaaaacttataagagctgcatttgttattacatagttccttattgaaattttcatttgttaattgttaacacaaaataaaatatgccactgaatccacaaatatcttgtcggtatcgaactttttatttatttagaacaagaatatcttgaccaaatgaaatgtgaaccaggaaaataaatatacagttcatcttttttttctttgaatcttctcaatttgttgtttggatttttctgagggtaagggcccatttcatttttaaatttgtctgttaagagtagtttaaaatccatgcctttaaaagattcgacttgaaaacatacttaatcgggaaagatgcacaattttgatccaaacgcatctactaataatctattgacttcattaatctaatccaaactccacgttcattgggtaaattttgtgaacagttattataataatgggcctagaaacagtgagataataggccatgatcaatatagataaatgggttacacaaataatgaattgtcccacagaaggatggttaaaagtaatgggccgaaaatagtgagctaatgggccgtgaaagtaatgatttgaaagaggggattacagaagctgacgatggataagtcttttctggataaaacgctcttcttcttctcttcatcctccttctggagcagagcttagagctccatcatcaaatcttatcaatggcttcctcactcgtctcatcttttcaacccaggtacttttcatatactacaaaccatagagcttcttcattccgctagggtttcgttttctttacttggcattttctactcaaaaatctctataaactgtgttcatgagcctcccaagtataaggaatctctttgaatgggttatttttatctttttaaatcgatggcaatgttgaattggttatggactcttgaaattgtggatttttattttgggaatttgaatgtgttatgcggaactcactgtgtaaaaagcaggattctagaggggtttttagccatggaaactgaaagttctacaagaatgtttctcttccttaatctaacgttatctttgttccaataacagtttctgtgtattggtttagatatatatctggtagagttttactttcttgacatgttttatctgaagatagatagataacttcccctttgttttaggtcagcatttttgggagatagaaatgtgttcaaggtctcaagcacaccttttgctcaagtgggttactccagtaagaccattgagtgcaaagaatcaaggataggaaagcaaccgatcgctgtaccttccaatgtaaccattgcattggaaggtcaagacttgaaagtgaagggtccattaggagagctggctttaacttacccacgcgaagttgagcttacaaaggaagaatccggtttcttaagggtcaaaaaaaccgtcgaaactagaagagccaaccaaatgcacggccttttcaggttacaaacttctcatcttttcttgtcatccaatgaagtccttaacttttttgaggttaaaagatcgtttgttctctaatctttttttttaacttctgtgtgacttttaggacgcttaccgataacatggttgtgggagtatcaaagggatttgagaaaaagcttatacttgtgggtgttggttatcgtgcaacagtagacggaaaggagctggtgctaaatctcgggttttcacacccggtgaagatgcagataccggatagtctgaaagtgaaagtggaagagaacacaagaatcactgtgagtggatacgacaagagcgaaatcgggcagtttgctgcaacggttaggaagtggaggccaccagagccatacaaggggaaaggagtcaagtattccgatgagatagttcggaggaaggaaggaaaagctggaaagaagaaatgatcttcatttttcattattatctacttacttatctcttcctttcaatgtttatgtgtatttgctcaaatttgtttagaaatgaagatgtttgtgttgggattcttgagtaagtttttaaaggaacccattaattgtttttgatgctctgacaaaaatttctttagtgctttgattgaacaagaacttgggcacaaagtgcctcatcggtgtgattctattgttatgtttccttattgaaccaaaccaatccaaatcggacaaaaatcatggtagataaactttttaaaacaattttttaatctattcttcttttttttaattacaaattttcttattttcttatatctaaaaaatcgtaacagtaagatattaatatctgtattcttaatttggtagataactttttaaaaaacgaaaatttcctataagaataataatagtcggaaataaaacaaaaaacaatatcatggtgattattcttatttgcttatatcttcttctttttcacaatttttttttaaaaaaaatatttacaaaattttcttatttgcttatatatataaaaaatcagtaagatattaatatcgattttttaatttggtagataacttttttcaaacgataaatttcctaaaaacaataaaatattcggaaataaacaaaaaccctgattgaagaaaagtctttttgtttatcagttcaccggaggcaaaaatcgtctctcgcttgagctgcgaagatg

SEQ ID NO: 17295 - DNA, 3003 bp, Unknown
  misc_feature (1)..( 3003): 2750-1469P.txt file - cDNA_ID_1808490; gDNA_ID_2926150; Annot_ID_198001
aaaaatatcaataatattttcagatattattataataaccaaaaatacccaaatattattataatacaattaaaaagtaaataaaaataggaaaatatcactttatatgctcagaagactgaaaaattaggtgtaggaattgtggactatttcaacagtaaaagaactaatgaagttactttattattcttctgtatttttcttttttttaattaaagtctcatatattgttttgttactaaatattttcattgttatcatcaggttaacctcgttaacaattattagtaaatattatgtataaattatccgttacagtaaacattattcatgtatcgaatatcttaacgttttcatataaatattattctgttatataatatattagcatgttatcattctatatatcatgtagttataattattatcatgttaattatataaaaaagtctaatttccttttattgtgctgaatatacataaataaaaaattctgatttacaattttaaatcgataaatatgttttaacaaataatttataaacttatcgcgatatcatagtttttaaaacattaaacaaataattatatacttatcatccgaatattacaattatttttattcaatagcatttttgtaattaatttttttaaaaaaaattttttggtttatatattatttatctttcatacttacctaaataactaatatttatatataaattctttattttttcatcatcctcccagcatatcgattaatatagtccataaaaatacgtcaagtttaatgcttccatgttagaagacgtgctctcaaaacttcttcttttgtttgttttctaattcacaacttgaatctaaaagaaacctggatcctaaacgttgaaaaatattaacctcgtaaacgaagacttgaaagatatatggggagtgttatatgatcacatagtgtaggtcgccttctgactatttttgtggtttatacaaaaagctacgtacagctgtaaagtcttctactctgtgtctctgtctatcatttaaagatggatttatagatagtccactttccaacaccaatcagatttgacaaaaatattaacattgcatttttgggataactatcgttgacttttttactacctattttatcggttagttattagactaaggaaacacagagtttaattgacagaacttctgagctgtttaggcccgtaattctttccctaattgataaaagggccctatttgtttaggtgcataacaggcttcattatatgggcttagaacggcccgatttgtttacatgaagacttttacattttaataatttgaacttgatcatgtaagtgagtatgagtaatgagctggtgaactttttttatgtgtgatctacataattatcacatagaataatagccataaggctttcggtatttgattcttatcaactgtggtccgacatctacttttatacacacccacttgtttttttgttaaaggcttttttctttgttttgaaagtaatgatagtgtatataactaaacataaaaactcgatattgatttgttgttttgagtatggaccctccaaaacatgaaaagacaagaaacaagattgatggcatagttgcaattttcttatacattatatgatgggtctgattggtaaccaaaaggtatacaagatttttagctgttagatttatcggaatagtgcaaagctgttagaaggaactatacaaagaaattattaaaaaaaggtgagtataaaacttttaataacacttttgataaagtttttgtgattggtaactttcaaagttatacaaagctatactattattattgtggttatcattcaaacccgatatcatcttggaaaaagttaaaatctctctccgctatacttaacaaaaataatttttttgggaaaattattttatctttttgtcgttccttccatattaagcccaacaatatttagataaaaatatagatagaactaatttacagtctgtgaagtatgtagtgtgaaagtatttcaactttttttatgatcccaaaattgatgtggttacgaaaacttactagtattacaaagactggaagaagtaaccaaacaaatggatcatactgaccaaacgggatcaagcactaacacagttgtaccattatcacgtggcgtacatatatggagagagtatatcttacgcacttagtaacgcgcgttagataacacctgatggtaccacatcataagaaaactttgcaaacaaatccttaaactaacaattgtttctgcatacaccccttgacttaaaattcttaacttttttttctacactaacttctttaacaattgaataacgagagtgtcgaaattcgagtgtacaacattttaaaactgtttttttttgtttttaaatccttaacctcttaaatataatatcaagtgtataattgtttaaatctttaaccttttaagaacttaaaagataggtgacgttgaacataattaaatatcactaaaaagaaaaaatcacaaatgcggctactaatcgccacacactcaacttcaccgctgacgtgcagatttttaatcaaatgaagaataatttcgcacatttcgaagtaaaagggctattttacaaaacatgattaagtcaaggggttggtttgcaaatatttcacaacagaaatgtgccattaaaacggcgtcgttatgattcaggcttaatcagtaggttgtgtcttttggcttttatcatcgccgccgggacacaacacaaagaggggcttagatttgtgctttcgagaagtgctttgatctctcttctccattttcacttctaatcggagatttctcttagggttttgttattcgttgagagatcgaattaaaaacttgtgaagaaatctctagggatcgtaatcgttgttggtgtggggtattacactgattccggtttgaacctgaatcgtatctatcaatcgatg

SEQ ID NO: 17296 - DNA, 3000 bp, Unknown; identical to SEQ ID NO: 7649
  misc_feature (1)..( 3000): 2750-1469P.txt file - cDNA_ID_1808490; gDNA_ID_1621155; Annot_ID_57012

SEQ ID NO: 17297 - DNA, 3000 bp, Unknown; identical to SEQ ID NO: 7649
  misc_feature (1)..( 3000): 2750-1469P.txt file - cDNA_ID_1808490; gDNA_ID_1621155; Annot_ID_173480

SEQ ID NO: 17298 - DNA, 3003 bp, Unknown; identical to SEQ ID NO: 17295
  misc_feature (1)..( 3003): 2750-1469P.txt file - cDNA_ID_1808490; gDNA_ID_2926150; Annot_ID_139262

SEQ ID NO: 17299 - DNA, 3000 bp, Unknown; identical to SEQ ID NO: 14105
  misc_feature (1)..( 3000): 2750-1469P.txt file - cDNA_ID_1808500; gDNA_ID_2214700; Annot_ID_136848

SEQ ID NO: 17300 - DNA, 3000 bp, Unknown; identical to SEQ ID NO: 14105
  misc_feature (1)..( 3000): 2750-1469P.txt file - cDNA_ID_1808500; gDNA_ID_2214700; Annot_ID_189634

SEQ ID NO: 17301 - DNA, 3000 bp, Unknown; identical to SEQ ID NO: 10454
  misc_feature (1)..( 3000): 2750-1469P.txt file - cDNA_ID_1808507; gDNA_ID_2213650; Annot_ID_132458

SEQ ID NO: 17302 - DNA, 3000 bp, Unknown; identical to SEQ ID NO: 10454
  misc_feature (1)..( 3000): 2750-1469P.txt file - cDNA_ID_1808507; gDNA_ID_2213650; Annot_ID_181589

SEQ ID NO: 17303 - DNA, 3003 bp, Unknown
  misc_feature (1)..( 3003): 2750-1469P.txt file - cDNA_ID_1808511; gDNA_ID_1621088; Annot_ID_55427
tggttaatgcagaagacccatatatgttctacacttggactgttacttatggtacaagatctcctttaggtgttcctcaacaggtatgaatacatacactctttgctctttttaagtatgttaattgtcgttatgaaatttttgatattatatactttggtacgaacgatgtaggtcattcttatcaatggacagttccctggtccagcgattgaagcggtcacaaacaacaacattgttgttaatctcattaacaagctggacgagccattcctcatcacctggtatgtaactatataactgattgtatttgtgcgcttagacaaatatgaaaaaaaacctttaacacggttttgtaatatatgtgtaggaatggagtgaagcagaggaggacatcgtggcaagatggagtattgggaacaaactgtccgatccaaccaaactcgaactggacttaccagtttcaacttaaagatcaaatcggtacttacacttacttcgcttccacgtcactgcaccgagccagtggtgcttttggtgctctcaacattaaccagagatctgttattacgactccttatccaacacccgatggagatttcaccctcctcgtctctgactggttctcaaatatgacccacaaggtacataccagtacaaagcctagatatacactcaagatcgtttcaaaagtcctatgtgaatgaataaaaagcaaatttgatgtttttaaaaaagtaaggatttggtttatatgttttcaaatgtttttctttaactattcttgtgatctctaggacttgcgaaaatcgctcgacgcaggctctgctcttcctcttcctgatgctcttctcatcaatggagtctctaaaggtttaatctttaccggtcaacaaggtaatgtcatcataacaaatctttaatattacatcgtgcatggtcttgttctagtctttgatatgtctttaatttcattgtctatcttcaggtaaaacatacaagttccgggtatccaatgtcggtatagctacatcgataaattttaggattcaaaatcacacaatgagcctcattgaagtagaaggcgctcacactcttcaggagagttatgagtcgcttgacgtccacgttggtcagtccatgaccgtcctggtcactttaaaagcttctgtgagggactatttcatcgtggcctcaacccggtttacaaaaccggtactaaccacaaccgcgagtctccgttaccaaggctccaaaaacgctgcatatgggcctctccccattggtcctacttaccatatccattggtccatgaaacaagcaagaaccattaggtattaataccaaaccgaacataaccgaactaaatcgaaccgtacaagtctagattggttctgcttaatttgactttaactttttctgattcttaggatgaatttgacggcaaatgctgcaaggccaaacccacaaggatcatttcattacgggaccataccaataaaccgaactctagtcctagccaatgcagccacattgatctacgggaagcttcggtacacagtaaaccgaatatcatacatcaacccaacaacaccattgaaactcgctgattggtacaacatctcgggcgtgttcgatttcaagacaatcattagcactccaacaaccggaccggctcatattggtacatcggttatcgacgttgaacttcatgagttcgtcgaaatcgttttccaaaacgacgaaagatcaattcaatcttggcacatggacggtactagcgcctatgctgtcgggtaagcaaacacattgccctctgttatctaaaccggttccggttattcataacttaaaccgtacgtaattgattaccttttacagatacgggtcagggacatggaacgtgaccatgaggaaacgttacaacttggttgatgctgttccaagacacacttttcaggtaataatcttatttagaaacaatatgattgaatctaaatatctaataagtaatcaacgatgattgtgtgtatgaaggtgtatccgttatcgtggacaaccatattggtgtcgttggataacaaaggaatgtggaatctaaggtcacaaatatggtcgaggaggtatttaggacaagagctctatgttcgtgtttggaacgatgagaagtctctctacactgaagctgagcctcctcttaacgttctttattgcggcaaagccaaacgtcccctttagatttatcattgttatcttttctactgaattaggtcacaattacgtggagtggaacaaaaaatacaaacgtagtccaaacggaaagctaattgatttttcaataaagagacaaaataaaaatgaaggaaaaaactttcttttgtcttatgatttgattctgtttttttttttttgctctcttaaattcagattgtgttcatgtatctaaagcagaattggaaaccaaaatttggatactagaattgtcagtttgacataaaattttatgtaaatgaattgaaaccaatcctaagcagtcatcacttatcaatatgctttttcaaataattttgcaaaatgtcatagatttttatgtgtgtaattcaaaccatagaaatttatttgaaaatataatattaaaatctttatctttatctcaagttattttcccaatctcatcaatcaaatcacccacttcagtggacaataatctttaatatttcattaatcattgatatctttctcattttcacatttgagaaaaacgttttgtcggtaaaagaaaatgtatcattgaaaattctaaaaatagatataatggagagagagatccacctcaagattatcgccacaaaacagagtagttgactgatatcgattgtgagatttcaaagcgataacgtggagaccccctcaccattataataaatcatcatatcgtcactttagccacatcacataccaaaaaaaggcaaaacactcacgaaagaagaaacggagaggatg

SEQ ID NO: 17304 - DNA, 3003 bp, Unknown; identical to SEQ ID NO: 17303
  misc_feature (1)..( 3003): 2750-1469P.txt file - cDNA_ID_1808511; gDNA_ID_1621088; Annot_ID_170559

SEQ ID NO: 17305 - DNA, 3000 bp, Unknown
  misc_feature (1)..( 3000): 2750-1469P.txt file - cDNA_ID_1808511; gDNA_ID_2926212; Annot_ID_142056
ttaatgcagaagacccatatatgttctacacttggactgttacttatggtacaagatctcctttaggtgttcctcaacaggtatgaatacatacactctttgctctttttaagtatgttaattgtcgttatgaaatttttgatattatatactttggtacgaacgatgtaggtcattcttatcaatggacagttccctggtccagcgattgaagcggtcacaaacaacaacattgttgttaatctcattaacaagctggacgagccattcctcatcacctggtatgtaactatataactgattgtatttgtgcgcttagacaaatatgaaaaaaaacctttaacacggttttgtaatatatgtgtaggaatggagtgaagcagaggaggacatcgtggcaagatggagtattgggaacaaactgtccgatccaaccaaactcgaactggacttaccagtttcaacttaaagatcaaatcggtacttacacttacttcgcttccacgtcactgcaccgagccagtggtgcttttggtgctctcaacattaaccagagatctgttattacgactccttatccaacacccgatggagatttcaccctcctcgtctctgactggttctcaaatatgacccacaaggtacataccagtacaaagcctagatatacactcaagatcgtttcaaaagtcctatgtgaatgaataaaaagcaaatttgatgtttttaaaaaagtaaggatttggtttatatgttttcaaatgtttttctttaactattcttgtgatctctaggacttgcgaaaatcgctcgacgcaggctctgctcttcctcttcctgatgctcttctcatcaatggagtctctaaaggtttaatctttaccggtcaacaaggtaatgtcatcataacaaatctttaatattacatcgtgcatggtcttgttctagtctttgatatgtctttaatttcattgtctatcttcaggtaaaacatacaagttccgggtatccaatgtcggtatagctacatcgataaattttaggattcaaaatcacacaatgagcctcattgaagtagaaggcgctcacactcttcaggagagttatgagtcgcttgacgtccacgttggtcagtccatgaccgtcctggtcactttaaaagcttctgtgagggactatttcatcgtggcctcaacccggtttacaaaaccggtactaaccacaaccgcgagtctccgttaccaaggctccaaaaacgctgcatatgggcctctccccattggtcctacttaccatatccattggtccatgaaacaagcaagaaccattaggtattaataccaaaccgaacataaccgaactaaatcgaaccgtacaagtctagattggttctgcttaatttgactttaactttttctgattcttaggatgaatttgacggcaaatgctgcaaggccaaacccacaaggatcatttcattacgggaccataccaataaaccgaactctagtcctagccaatgcagccacattgatctacgggaagcttcggtacacagtaaaccgaatatcatacatcaacccaacaacaccattgaaactcgctgattggtacaacatctcgggcgtgttcgatttcaagacaatcattagcactccaacaaccggaccggctcatattggtacatcggttatcgacgttgaacttcatgagttcgtcgaaatcgttttccaaaacgacgaaagatcaattcaatcttggcacatggacggtactagcgcctatgctgtcgggtaagcaaacacattgccctctgttatctaaaccggttccggttattcataacttaaaccgtacgtaattgattaccttttacagatacgggtcagggacatggaacgtgaccatgaggaaacgttacaacttggttgatgctgttccaagacacacttttcaggtaataatcttatttagaaacaatatgattgaatctaaatatctaataagtaatcaacgatgattgtgtgtatgaaggtgtatccgttatcgtggacaaccatattggtgtcgttggataacaaaggaatgtggaatctaaggtcacaaatatggtcgaggaggtatttaggacaagagctctatgttcgtgtttggaacgatgagaagtctctctacactgaagctgagcctcctcttaacgttctttattgcggcaaagccaaacgtcccctttagatttatcattgttatcttttctactgaattaggtcacaattacgtggagtggaacaaaaaatacaaacgtagtccaaacggaaagctaattgatttttcaataaagagacaaaataaaaatgaaggaaaaaactttcttttgtcttatgatttgattctgtttttttttttttgctctcttaaattcagattgtgttcatgtatctaaagcagaattggaaaccaaaatttggatactagaattgtcagtttgacataaaattttatgtaaatgaattgaaaccaatcctaagcagtcatcacttatcaatatgctttttcaaataattttgcaaaatgtcatagatttttatgtgtgtaattcaaaccatagaaatttatttgaaaatataatattaaaatctttatctttatctcaagttattttcccaatctcatcaatcaaatcacccacttcagtggacaataatctttaatatttcattaatcattgatatctttctcattttcacatttgagaaaaacgttttgtcggtaaaagaaaatgtatcattgaaaattctaaaaatagatataatggagagagagatccacctcaagattatcgccacaaaacagagtagttgactgatatcgattgtgagatttcaaagcgataacgtggagaccccctcaccattataataaatcatcatatcgtcactttagccacatcacataccaaaaaaaggcaaaacactcacgaaagaagaaacggagaggatg

SEQ ID NO: 17306 - DNA, 3000 bp, Unknown; identical to SEQ ID NO: 17305
  misc_feature (1)..( 3000): 2750-1469P.txt file - cDNA_ID_1808511; gDNA_ID_2926212; Annot_ID_202719

SEQ ID NO: 17307 - DNA, 3000 bp, Unknown; identical to SEQ ID NO: 12034
  misc_feature (1)..( 3000): 2750-1469P.txt file - cDNA_ID_1808515; gDNA_ID_2214528; Annot_ID_134226

SEQ ID NO: 17308 - DNA, 3000 bp, Unknown; identical to SEQ ID NO: 12034
  misc_feature (1)..( 3000): 2750-1469P.txt file - cDNA_ID_1808515; gDNA_ID_2214528; Annot_ID_184842

SEQ ID NO: 17309 - DNA, 3003 bp, Unknown
  misc_feature (1)..( 3003): 2750-1469P.txt file - cDNA_ID_1808519; gDNA_ID_1621088; Annot_ID_55445
taagaaagactctgcaacagaaacggctaagaaacgagaacaggagcgacaaaggctggagaaactagcggaaacaagccggttaagtcggaataggcagcgcagccgtagtaggagtattagtcgatcaccaccaccgaggttgttaataaagttatcatttttgcttcgtgattaaaatggggggatttgtgaagatgagaaggaagttttcggttctagagctctgattggatccgctctcttgatattcactaacacagttgtcatctctccttctcccgtttgattttctttactaaaatgttttgtctacagaagacacaggcgaagcagaagcagaagcggaagcaggagcaggagatcacgcaggcacagttcaaggtcacggtctaggtccccatctaggtcgttatcacgctctccgaaacgtcacgcagacgctctccatcttattcgaggtctcccaggtaagaacagatggaaagcattacatgtacgtcgaaaatggtgtctttgactctttgctttacctttgcctatataacatattgagttgttgtgtttgcaggcgaagaagcagcaggtcaaggcactgaagagaggaaactctaattgttgcggcagctttttttgttgcctctgttcattttttttttttttctgtgtgttttcgtatccttacgattcagtggtaaaatatggttttgtgggtttacatgggataataacaacgttttcatatgatgttttagaaatttataagatgttataaaaaaataattattttagtagttgaatgtgaagttttatggttagctttgtttgttggattagttaacaaatgtgtgtgtttgtcgtctctgtgtgagacgcagcgtaaccatctccatgcgttgcatcgttcgtgaaagtaaaacctttcataaagtttctaactttgaataatcatccgcaatctttataagatattttcagctaattggaattgcaaatacacaatttcaaaagtcttggttctttccaagaaataatttgttatagagagattgtcatactttacaactacatttagaaaaaatagttaaggctggtcccataaaaacaacttgcttaaccatgttatttgcaaaaacaaacttttataatctccatagtatagatttcactcaatttaagtaagaagaagaccatgaatatcaagcttggggcttgaattctcgcgaaaaggaagcatttaaatggttataacaacaatggaaacaaaaaacgtgacattagttgaaaaatctatttctctgatgtctatatgtatattcttcattttcttcttgtgatgaatatatagataaggacgatttggatgaaggagaataaaaaaaatcaaacgttgaatgtggtaggagcggagtcactataattcatgcgtcaatattgaatattggatacatgacatggtttccattaattggacccattctctgattttttggtctgtttattgaagcagaattatttattattattgttataattgatgcctttgttttgttcgaaaaatcaatgctacattaaataataagagagactagtgtgtgttgtcgtgtgtgtgcttgaccatccccatgcgttagttagataacgtgattataactccgtattactttaaactatactaacaatttgaaattttgtaacttcatctataatccacattctgatgagattttccagctctttggaattgttaagtactaaaagccaaaagtcatgctaaaacaaatcatttcaatgaaattctaaaacaaattgtattttctctcgttaatcaaatttattaaatgagattaaaacggacacctagggtttacaataccatcgatcaataagaatcgacagttaacacttaatccaataaagttggaatacgtagttctttaattaaatagatgtccatttatagatgatacaatattcctttatttgaaataactcccaattgattgtctattaaattttatatcttacccaatggaaatactatgaaagagagtgttaatagcctatagagtgctagctctcaataccatttgttcatctctcaaccatactagtatttttctgcatttaattaagaggtaaataaagtaattttcctcaatttcactgtatattctaggaaattgtttgactaataaaattgaataatttcattgaataatctcataattgtctagctaccaatgagaagtactagtaaagagcggaaactacatagcagaaagagtcttagggtctacgatcctagctttttaggcctgcagaagctaacagttacaaatatctgtaaaaataacctcaaagtgaaaaggaaagaggaaaaaaagcagaagctagttaagagaaacgacaaaagagtctgaatttatcgaaagaacaaaaagagcagaaaaatgtcacatggcaatagtcgtggcttctgtaataacggtacagagtaatcggatgaagaaaattaccaaaaacaaacaaagagaaagctctaacgtcagttaaatctgtttcttttcaccaattttttttttttttctctctcacaatttcatgaagaaaaaaataagattaacacattgaagagcgtgtaaaagaagaaactggtaaattgcattatcccaattcccaaatagagatttgtttggcttttcctctatttttcattattcggacaagccacgacacttgtcttaatgccaccaaaaaaaaaaaaaaaatcactcacatcatctctcttccctcaaagttctcaccttttgagattattacaaagaacacaaaagtacagtttctttattcccttttttgaacactttaaacatcatcactcttgaaacacttcaaatctccggtcaacaaaaaccatgacttcaatttcttaaacaaaaagtttcaatctttttccaaacaaaacccatttcagattttgttctttgagaaaccaacatg

SEQ ID NO: 17310 - DNA, 3003 bp, Unknown; identical to SEQ ID NO: 17309
  misc_feature (1)..( 3003): 2750-1469P.txt file - cDNA_ID_1808519; gDNA_ID_1621088; Annot_ID_170579

SEQ ID NO: 17311 - DNA, 3000 bp, Unknown
  misc_feature (1)..( 3000): 2750-1469P.txt file - cDNA_ID_1808519; gDNA_ID_2926212; Annot_ID_142038
gaaagactctgcaacagaaacggctaagaaacgagaacaggagcgacaaaggctggagaaactagcggaaacaagccggttaagtcggaataggcagcgcagccgtagtaggagtattagtcgatcaccaccaccgaggttgttaataaagttatcatttttgcttcgtgattaaaatggggggatttgtgaagatgagaaggaagttttcggttctagagctctgattggatccgctctcttgatattcactaacacagttgtcatctctccttctcccgtttgattttctttactaaaatgttttgtctacagaagacacaggcgaagcagaagcagaagcggaagcaggagcaggagatcacgcaggcacagttcaaggtcacggtctaggtccccatctaggtcgttatcacgctctccgaaacgtcacgcagacgctctccatcttattcgaggtctcccaggtaagaacagatggaaagcattacatgtacgtcgaaaatggtgtctttgactctttgctttacctttgcctatataacatattgagttgttgtgtttgcaggcgaagaagcagcaggtcaaggcactgaagagaggaaactctaattgttgcggcagctttttttgttgcctctgttcattttttttttttttctgtgtgttttcgtatccttacgattcagtggtaaaatatggttttgtgggtttacatgggataataacaacgttttcatatgatgttttagaaatttataagatgttataaaaaaataattattttagtagttgaatgtgaagttttatggttagctttgtttgttggattagttaacaaatgtgtgtgtttgtcgtctctgtgtgagacgcagcgtaaccatctccatgcgttgcatcgttcgtgaaagtaaaacctttcataaagtttctaactttgaataatcatccgcaatctttataagatattttcagctaattggaattgcaaatacacaatttcaaaagtcttggttctttccaagaaataatttgttatagagagattgtcatactttacaactacatttagaaaaaatagttaaggctggtcccataaaaacaacttgcttaaccatgttatttgcaaaaacaaacttttataatctccatagtatagatttcactcaatttaagtaagaagaagaccatgaatatcaagcttggggcttgaattctcgcgaaaaggaagcatttaaatggttataacaacaatggaaacaaaaaacgtgacattagttgaaaaatctatttctctgatgtctatatgtatattcttcattttcttcttgtgatgaatatatagataaggacgatttggatgaaggagaataaaaaaaatcaaacgttgaatgtggtaggagcggagtcactataattcatgcgtcaatattgaatattggatacatgacatggtttccattaattggacccattctctgattttttggtctgtttattgaagcagaattatttattattattgttataattgatgcctttgttttgttcgaaaaatcaatgctacattaaataataagagagactagtgtgtgttgtcgtgtgtgtgcttgaccatccccatgcgttagttagataacgtgattataactccgtattactttaaactatactaacaatttgaaattttgtaacttcatctataatccacattctgatgagattttccagctctttggaattgttaagtactaaaagccaaaagtcatgctaaaacaaatcatttcaatgaaattctaaaacaaattgtattttctctcgttaatcaaatttattaaatgagattaaaacggacacctagggtttacaataccatcgatcaataagaatcgacagttaacacttaatccaataaagttggaatacgtagttctttaattaaatagatgtccatttatagatgatacaatattcctttatttgaaataactcccaattgattgtctattaaattttatatcttacccaatggaaatactatgaaagagagtgttaatagcctatagagtgctagctctcaataccatttgttcatctctcaaccatactagtatttttctgcatttaattaagaggtaaataaagtaattttcctcaatttcactgtatattctaggaaattgtttgactaataaaattgaataatttcattgaataatctcataattgtctagctaccaatgagaagtactagtaaagagcggaaactacatagcagaaagagtcttagggtctacgatcctagctttttaggcctgcagaagctaacagttacaaatatctgtaaaaataacctcaaagtgaaaaggaaagaggaaaaaaagcagaagctagttaagagaaacgacaaaagagtctgaatttatcgaaagaacaaaaagagcagaaaaatgtcacatggcaatagtcgtggcttctgtaataacggtacagagtaatcggatgaagaaaattaccaaaaacaaacaaagagaaagctctaacgtcagttaaatctgtttcttttcaccaattttttttttttttctctctcacaatttcatgaagaaaaaaataagattaacacattgaagagcgtgtaaaagaagaaactggtaaattgcattatcccaattcccaaatagagatttgtttggcttttcctctatttttcattattcggacaagccacgacacttgtcttaatgccaccaaaaaaaaaaaaaaaatcactcacatcatctctcttccctcaaagttctcaccttttgagattattacaaagaacacaaaagtacagtttctttattcccttttttgaacactttaaacatcatcactcttgaaacacttcaaatctccggtcaacaaaaaccatgacttcaatttcttaaacaaaaagtttcaatctttttccaaacaaaacccatttcagattttgttctttgagaaaccaacatg

SEQ ID NO: 17312 - DNA, 3000 bp, Unknown; identical to SEQ ID NO: 17311
  misc_feature (1)..( 3000): 2750-1469P.txt file - cDNA_ID_1808519; gDNA_ID_2926212; Annot_ID_202701

SEQ ID NO: 17313 - DNA, 1145 bp, Unknown; identical to SEQ ID NO: 14198
  misc_feature (1)..( 1145): 2750-1469P.txt file - cDNA_ID_1808527; gDNA_ID_2214706; Annot_ID_136961

SEQ ID NO: 17314 - DNA, 3003 bp, Unknown
  misc_feature (1)..( 3003): 2750-1469P.txt file - cDNA_ID_1808527; gDNA_ID_1620626; Annot_ID_47136
tgtcttatcatcaagatcaagaattgcagcatgctacaattgaagcaagagatgtgatcagtcaggtagtttgatactaatcaacaaggaaaatataagattatgttttgactaaccgcgtcttccatggtagcgcgccaaccttgcatagacgataaaccaaatctgagcttatcattctcaccatcttctgataacttttcagttttcggagaacttaggtatgtacccatcgctttcagccaaaacaacaacatcattcttagctccacaattcacaattcattttctagctcatagacttgtacatgattcagagttgacataatcaacttagaactactcagcaatcaataatcaacaaagaaactaacttgaaaccatcaaaccaatcagaatcttacacaatctaatatcttcctcataaacgtgtgcatgattcacagtggacctaatcaagaaagaagctaacttgtacgaatcataatcttacacaatccttttctcttaaactgatagacttaatcaactcagaactacttagcacatcaatcaacaaaaagggttttgaatcgatttgacctagatgcgaatatttgactatttggatcggaaaaagattcagatattaaagttatgacagaagaagctagcaacttacatatctgggtagagaaatgaacaaaaaggaagagcctttagagatcttcaagaccaaattctggagtttaggagaagaaacttgatcggggacgagaaaaggaacagaaccaaccacttgaaatcacttgagatcagatgtatgtacaatcaaatcctaaggacaaaagataaaaaaagtgtgttctttttatttattgttttgtccgagaaaagaaaactattaaaggtctttacttttttcaaaactttttcttgttaataacttacttaactaaaacttgagatgtgtaatctttacagctgtttaaagctttctctgattcgtcatcacagctttaagaatgtgtgtaatcgtcattgtaaacagcaaaattacagaagaatttaactagttgtgtatttgctatatgtagaccattagtattttgtcatcttaactttcatataaactggttttgtcgttggctaaaagtatattaaaaattttaaacagaaaaagagtattatggtaggataaattgcaaaaacaaattaacatatgctagtttttacctggcatttaacaaaatttatgatttctgtttttatatcgaacatacatagtttcatgatacaatcaatttttgcacttaggtatgtgaagtaatagaaatggaagaaaaaaatacaagaaaaaggaacttcagaagattttttgtctccaagtgaaagccggtccttagttttgagaggcttgaagcacaaaaataattatgtggtctatcaaatatttacgacttaaatattgtattacaacattattaacatttaaatatcttaaatagctaaaaatataatatttttgactttcaatgaggcaaggaactctcgagagaggtcttcctagacccatgttggtgaagatagcttcgacgtcttctaaaagcacctccatcgattatattaacgagtgtttatactatttttttttaatataaatttgaaatatttgtgaaaggagaaaagagaagaaacatatgttaaagacactttttacttacatgtcactttttgattgggtttaatatttttacaatttattgattaaaattttaatctaacttaagacacttcactttgatcaccggtgcagatactttaagagcctcgcttcacgaagaaaaaccgaatcggaataacgagtgggagtgaattcggtgagcatgtaagtatcaccctcatcgcataaaacctccttagcttcaatttcgaaaagggaattgttatatactgattgaacaaaataaagatattctatagtaaacacatgttatatagaacaacatttgagattgatattgtaataatggagagaggtagcttctaatgagtatactactaaagtactaataagaaaactaaatttggctgtcacatcttatctatttgtttatgtggcccaacatttccaatatatattacaaaataataataatggataggcattgccaccggttagattataactcttcgtttgagtgcgacatatttgtaaccagagacaataattaggataaggattgaaccaaggaactaaacaaaaatttgaggatgaaacatagtccaaaacaaaatccatttaatttttgggacaagaacatagatatcataacacttaaatatgtgcctcaaattggtccaaaatgctctcgtgaatgaacgtggattttgcaccactcaacttaattacttactttgtcccatttaaaaaaaaaaaattataaaagcaaaaatattaaggaaaatttttcattataaaaatatcatctaatattttaatttaaaaccctaccataaatcatagaaaatactgcagcatataaataatcataaaattaaatagaattttacagtgatttcatataaaatactacagaagataaataatcataaaataaatataattttgcagtaatttcatagaataaaatgctccagaatttaagtaatcataagaaatctaataagcattttgtaaataaaaaaatccaactttgtctccaattgaattctgcaaaaaatccaactatactgcaaaacaaattccaattatgtctccaaaacgaatttgaaaacaaattgtgaagaaaaatatcattatattttttgtaaagtaaataaaattaaaaacacatttatggtccaaaaatttagttttttttgtttttttagttaatgtgtattttggcatgatataaagtgcgtcgtgtctcgactatatcatctctcggtttcactattgaacgtgtaacactggtcgaaagaagacgaacataaactcgtctccggtaaccaaaaatg

SEQ ID NO: 17315 - DNA, 1145 bp, Unknown; identical to SEQ ID NO: 14198
  misc_feature (1)..( 1145): 2750-1469P.txt file - cDNA_ID_1808527; gDNA_ID_2214706; Annot_ID_189838

SEQ ID NO: 17316 - DNA, 3003 bp, Unknown; identical to SEQ ID NO: 17314
  misc_feature (1)..( 3003): 2750-1469P.txt file - cDNA_ID_1808527; gDNA_ID_1620626; Annot_ID_162472

SEQ ID NO: 17317 - DNA, 3000 bp, Unknown; identical to SEQ ID NO: 11077
  misc_feature (1)..( 3000): 2750-1469P.txt file - cDNA_ID_1808535; gDNA_ID_2214478; Annot_ID_133193

SEQ ID NO: 17318 - DNA, 3000 bp, Unknown; identical to SEQ ID NO: 11077
  misc_feature (1)..( 3000): 2750-1469P.txt file - cDNA_ID_1808535; gDNA_ID_2214478; Annot_ID_183228

SEQ ID NO: 17319 - DNA, 3003 bp, Unknown
  misc_feature (1)..( 3003): 2750-1469P.txt file - cDNA_ID_1808541; gDNA_ID_1621128; Annot_ID_56420
agaagagttactatttcttgggttaatatgccaaaaaaaataaaaatatgtataggtaagcattaatgttttggtgataagagatttcaaaatggggtatgtacacgtactctttatccataaaatcataaatgctagaagacctttccacaacaacaaaaaatgagccctttgtaattattttatccaaacataattttggaacaattttgtgtaatcatatatatgttaaaaatgcagcaaggcagctcggatttgaggatccaaatgaatacccacaactatgcaaattagcaaatggatatttgttgaaaacaaaagggtatgatgagaatgtggatgagtatttggagaatgaagctgagcgtgattctctctatgttcatctccttgaagaatttgatagatgcattctcacttatttttctttcaattggacccaatcttccaacctcatctctcaggtactttgatttcaatcaaattcagtatatttttatttggtagtctgataggtgaagtaggctatttactacaaccattagcgatctccaataatgtgtatgaataataaatattatcctataacacaaaatgacaggctttaagcgatgagtcggatcagaaagttccaaaactcaaggatttcgtgatggcagcaacaaggtgattgattgttccatatccatgactttatatatgcatacctatagttacatacatataaattgcgttacccgtaatcgtcgttgcgtaatgattccaactaactgtaccaagcgtaacatataatgtagaactgactattaatctataactattaacaaacattgtagaactaattaatggctttgttaataatgtaggaaacagaggtttgagagagtaacaaaagatctcaaggtgaaaagggtaatttcgacattagtagaagagatgagagtcattgggagcggaagcagtgagccacactgtacggaagtaatgtctccggtggctcataacaaacgaagtcccgtccttctccttatgggcggaggaatgggcgcaggaaagagcaccgtcctcaaagatatcttcctagagtataactcttttttcttgtatttctttaacatatggtggttataagcctacttaatctttctttaaataaccagaaataatattttgtaggtcgttttggtcggaggcacaggccgacgcggtggttatagaggcagacgcgtttaaggagacggatgtaatttatagagctcttagctctagaggtcaccacgatgatatgcttcaaactgctgaattggtacgttgttcttagttctagctagccatcctcgattgtgtatatatatttggctttaacatgctacatttctggttatttccttatatatattttaggttcatcaatcatcaacggatgctgcatcgtccttactagtaacagcattgaacgacggacgtgatgtgataatggatggaacattgtcatgggagccattcgtcgaacaaatgatcgaaatggcaagaaacgtccacaaacaaaaatatcgaatgggcgaaggctacaaggtgtccgaagaggggacgataaccgaaaaatattgggaagaagaagaagaagaaacgaaagaaaatggcaaacaacaaaatctgaaaccttacagaatcgagctggtcggtgtggtttgtgacgcttatcttgccgtagcaagaggcatacggtaaagattcatcaagttttcacattttcgaaaatattttgtagtctttgttactcgttgttagctgctattatcatgctaatcgtaaccaaattttgtttttttataggagagctctaatggtgaagagagcagtgagagtgaaaccacaattgaattcacacaagagatttgctaatgcattcccaaagtattgtgagcttgttgataacgctaggctttattgcaccaatgctgttggtggtcctccaagggtaaattagtcaaaagtcaatatcaaatctattacgatgtcgtttttgggagagatactgatgtgtgtgttttaattggttggtggagcagcttatagcgtggaaagacggaaatagtaagcttctggtggatccagaggatattgattgtctaaaacgggtcagcagtctcaacccggatgcagaatccatttacgagctttatccggatccaagccaattaagcaaacccggttctgtttggaatgatgttgtgttagttccatcgaggcccaaggtccagaaggaacttagcgatgcaatcaggagaatcgaaaaggcccaaccaaaaaattgatgatatttgtgaactagacctttgaaattatcttcttcctgaatttgtcatttgtttccgtcagctttttggttaaataagttaataaaatggtttttgttgtgagttgacatagctagtggaattgagacccatagtcattggtcacgcacatcaaccaagaacaaattgcagtcgataaactaatattttgataacagttacgacttgatcctatcgtatataacttcgatttaacaaacacaagtcgtaatttctaaaaaacaattaactcaatttgtttgaaaataaaagtttcctttttcttcgtaacaagtgaagtcaaatgtttttcactcgtatctcttacaacgttttgatgagatgataagagaagagtgggcccacatatttgcttaacaatacacgttttagggttacgtgtcactaatgttattgggttcatttaatctgggcttaaaagaggcgtgtatcatgttgtaatattcccatttgggctttcatataatgaagttgggccgacaaaaaaaaaaaggactagggttcccaagtatcccactatatataattttagtcgaagaaaattcttttatttttctcttgcaaagacctctcagcagccaacgacagttatcaaagcttaagccgttttagggttttatccttttgctgagatccaatcatg

SEQ ID NO: 17320 - DNA, 3003 bp, Unknown; identical to SEQ ID NO: 17319
  misc_feature (1)..( 3003): 2750-1469P.txt file - cDNA_ID_1808541; gDNA_ID_1621128; Annot_ID_172406

SEQ ID NO: 17321 - DNA, 3003 bp, Unknown
  misc_feature (1)..( 3003): 2750-1469P.txt file - cDNA_ID_1808549; gDNA_ID_1621085; Annot_ID_55362
ttaataagattctgcttacatatatcttttgattggatgatgtctattggatatgcatataactgcaagaatagttatataaaaaaaacttcaaatcactatggtcttatatctaaaactcaattaccctaaaaaataataatacattaggttagctttcatatcacaaaaactttttaacttgtcatttcttgcccttctcttagtattgcatttttgtatttggattaattacgtcaaaccataggattgactagttcagcaacaaactaaatacacacatcataataaatgccatcaaatttcaatatcttcttggaattgtcgatttatacattctggccttagaaagttcattttgtcaactagtatcttaactaatcatatcaataatacgaaagaaaaaaacacttaataaaatactaagatacaatctcacaaagaggcaagaaccaaactcaacagtggatgaaaaaaaactccaaccacaaaaataagcgataatattctgattttcaagccttaaatatgtgataaactgaaatttaaactcgatttagctaacaacataaaaaaaagtttaggtaacctgatagtgactatttatcattatttttttgtggacacagaaaatttatcatgtaactcatattatataacaaaatgattgtgcaatatgtgaaactggaacgaatttgaatatgaagcctaataaggctcacgaattctatgattgctttatcaacggtcgcctgatcagctggtgagtacaccagaaatttaaactcgtgggtcctatttttatttttaaaaataatcagtataccaaaccaaaaaacccattacaaaatcttatgattattagtgttcctgaaatttcatgtttattcttgaaaaaaagtgagaccataaatgcaaatgaaaattgacccatactgaatatacgttttattatcattattttagcaaaacacatatttttcaaagaatcaaggtcaagtttccatattagattatacttctccatactctgatgttttctatttaaaacgaagacaacaaggtatatcatctgatcatcaacatgacaacatatcacgacaatagacaattatcttcatttgttataatattagttatgtaattattgtattgcataattattagcttcttttgtttccatacacttagacgctgacatttgtgcttatctcatttttttggcgaccttatctttctacgttctatttttgttggggttcaagtttcaacgactaaaaggaatcaattaaaacaaatattttgatatttaactcactctatttcaaaattcgccgactaatcattttcaggtagattcttgtaaatatcattatacacataattgatttgttcaattttaaacgaatataatataaattgtgccggcataaaatataaatattgcggttaaaaaaaaaaaaactttgccatgaaaatatgaagaggtattcgcgtaattgtgtaaatagatttgattaaattcgtcacaaaaaaaaaccgtggcagaaaagtataataagatagggcgattgacacaaatagcactaaaaaactttattattccaaaaatggcatctttttttgaaacttccaaaaatagtatataaaaattttaatcctctataaattaattcaataataaagtttttttattaccatttgtatcaatctcccaaataaaaatgagagcaaacactaatctaatattaaattgaattaaaaacttttaaatagtggaaatatataccctaaattggaaataaaaaacccaaatataatattacaaactaattttaaaataaaaaatctcttttaaatggtgaaaatatataccctaaattggaaataggaaacccaaatataataccataaacttatattaaaatgaatcaatatttcttttaaatagttgaaatatataccctatattggaaatagaaaactcaaatataatatttaaatttatttctaatttattttggttgaatagattttatataaacttgtggtattattattgtccataaaacttgttttagtgttacttttaagaatttttcaaataatcatttgagtgctaattatgtgtaaacaactttttaatgctatttttgtccaaaaaacttaaaaatgtgctatttgtgggaatttttcaataagatataaatttaaaactgagttgattaattaaaagtgtcacacaaaaaaaagtttaatgtgaacaacaacattaattcttttttaaaaaattttgttttatactattattctattaacatgttaattaatataactagaaaaaaaaatcaatctactaaaactaggttttttagcattttataaatatttgtatgagaactttctctaattcagttcatccagttaaccattgttcgcttattctgcaattcatttatttatctgatataccagttaaccttaaatgttgtgtaatcagtcgtaaaattgttttgtgtaatgttacataaattaatagaatcaaatttaaaatgtgttctaattatgctatgacgttataaacaaacgataaattccgattcatgattatgaagtatttcaattgaaaacacaaaaatcgacaaaattttaaaaatattttagatcttacattacatacctgtattgtcgcaaaggaaaatttatttcttgtcctaaaaggccatttggaacttgagctaatgtaaatatataaatgggcttattgggtcctctaatgggcttgcctttgacgtagaagacagaagcatcgttgtgactcccgtttgtgatttaggaatccgcactgcttgccgttttccgtttctactttacttttcaattcagaaacgcctctctcgtcgtcttcaaagctaaattagaaacctgacgatctctctctctctctctctctcgatcggataatatttgagctttgtggttggaggatctgagttagtcatg

SEQ ID NO: 17322 - DNA, 3003 bp, Unknown; identical to SEQ ID NO: 17321
  misc_feature (1)..( 3003): 2750-1469P.txt file - cDNA_ID_1808549; gDNA_ID_1621086; Annot_ID_55381

SEQ ID NO: 17323 - DNA, 3003 bp, Unknown; identical to SEQ ID NO: 17321
  misc_feature (1)..( 3003): 2750-1469P.txt file - cDNA_ID_1808549; gDNA_ID_1621085; Annot_ID_170496

SEQ ID NO: 17324 - DNA, 3003 bp, Unknown; identical to SEQ ID NO: 17321
  misc_feature (1)..( 3003): 2750-1469P.txt file - cDNA_ID_1808549; gDNA_ID_1621086; Annot_ID_170530

SEQ ID NO: 17325 - DNA, 3003 bp, Unknown; identical to SEQ ID NO: 17321
  misc_feature (1)..( 3003): 2750-1469P.txt file - cDNA_ID_1808549; gDNA_ID_2926172; Annot_ID_140176

SEQ ID NO: 17326 - DNA, 3003 bp, Unknown; identical to SEQ ID NO: 17321
  misc_feature (1)..( 3003): 2750-1469P.txt file - cDNA_ID_1808549; gDNA_ID_2926172; Annot_ID_199595

SEQ ID NO: 17327 - DNA, 3003 bp, Unknown
  misc_feature (1)..( 3003): 2750-1469P.txt file - cDNA_ID_1808560; gDNA_ID_2213649; Annot_ID_132439
acgttccacgcgttcagcaaaatctttttgtctgctgcatgctcagatggaaaaaaagatcagctaattaacaaaatatctaatcagaataatcagaatagtctaaactaatgcagctttacttcatcttaaatcttattcattttcatatatgtaaagttggttacgttaatattaaatctttaagagagcggggaatccgagaacaaacagtgtctctccttcgctaaattatttatttatacagtatagtattaccaaattgcaattaattctttttttatatataagtggtgacaattagtggacttcgctttttatgagaaaaaaatatcattcatattgagacaacaacaactagaaaaaatattctacttactgtattatttaaaacacagatatgtcaataattgaaaaatatgtatgagtggatcaacagtaaaacaaattatatgtaacatatcattctacaacctctccttaaatcaattttttaaattcaagccaaaagctaaacattaaataaacagtagtgccacatgaaattataggtcggaccatagtgaaaatatccactatatatactttttttttttcaactatccactatatatactataaaaacaaaacataaagtccacagatgctgagaatttaattaaaaggagtacacagctgtaaagcctacaacttttctttctcatttatggtgcgaaccttttattgtcctgcccaatgcaatttttttaatatgagtaattaaatatatttttcgtttttataaattcaattttcaaggagaaaataattcgatgtatatgcatattttgtgtgtatatattagcaaattttcacgtgtggacaatctacgtcaatggagtatataaacgtgtgttacgtaggacaaatcagtcgttggattagtagttgccaacagttgccttgattaataaattggtatcatactctcttctttgtgtttgttagggtcaagataatatataaatttgtgatactaatcatagacattttacgacaaaaatacggacctgttcattactcgaaaactatatgaagccgaaatagataatgtcctatttttcctcatcattatcatgaaatctatttaaaaaaatcaatagtggtgtaaaacaattgattcgtcatgatttataggtatgattgctattcttgatttcaacatcgtcagatactaaaaatttcccaatgagtaagttaagattcggaccactgttatttgggatttcttaaaataaataatcaacaacagatttcgtgctatgcccggtaatgttaaatgtagaacatggggtgttttgttttacttaattgtcaatcataaatcaaatattcggattaggaattacgtcaagtgccaattagattgttatcactaaaatcatatcatattgctttctaaaccaattaacgtcagtccatttatttaaagaaaaaataaagtatttcactaaactgtccagtccatttcaccaagtacttagatattcataaacacaaaattaatcactcaacttttaaaaatatttcttctagaccaaatcctgtaccaactcgtattgaatgtttcagtgtaaagtgtaaagtgttttcttaaaaaaattagttaaaaaataactgaattatcacaaaatattttcagaacctagtcacaaatctaataaattacatataaaagcttcttcatagttaaaaaaaaccagtgatttcagtaccaaacaataagaaaagctagcatatgatatatttcttttgctaagaagcatatgatatattcaatattcgtccacgatccactgaatattttttctttattccactgagatttcttttcgtcgctactttgaatctgaacattatttttggtctctgaatctatatgtttgcttgtctttcaacatcatgactcgcatatcgatactacaacttcaactcttcaagcaagacacatggaaatataggagttaacacatgcaaactagcacccccaaattttgtcctcctggctcctacaatagctggaccgaacctacatgaagccggctttatctggttctcttctccagttatgatgtcaaatttaaatcattcatccctcaacaagaattgtcattttaggaaccatcatcataccgagagagagcaacattttatctataaatatagtaatagttctactcttatttcttccgtggtttcttgtaaaaaaaacttatgcatgttcgttcactaaatagtagttaaatttgcgataaacgagcgagatatgtcatgcataaaggagttaaaaattacgtgaagttatttcaatgatcatgcaagaaggattgaatgacttgtaattacgatcaagtaatataaaaatggtctatttgttgttccttcgttaccacagtatggttcttacatgtgaaaatgattgtgctttacataaatgtagtagtacatgagcccataaaaagttactgctcagtcgagttttcactaaccggtgaaaagaaatggataaataaaaatatacacgactacaaatagactctttaaatttgacacgtaaactctatttttcaggagtctttgaggcccactctgataataatatgtcaactaaactttctttttacaaacaaaattaccgttgcataagacacatgtcgtcaattataatccaatatgaagaaagaaagaatataaaacgaaaactttacttttcttatttttttcctatttttcaagatgctaggaagtagccaaatccaaagcattgactcttctttatccaatgtctcaccctttgtcttcaactgttcctcatccttcaccaaaatctctctctctctctcttcttataagaaaagagctaaaaagcttcccttcgttttactatatccatgattctgaattccacacacactgagagagatagagggacacattaaaagctaattcaacttttctgcaatg

SEQ ID NO: 17328 - DNA, 3003 bp, Unknown; identical to SEQ ID NO: 17327
  misc_feature (1)..( 3003): 2750-1469P.txt file - cDNA_ID_1808560; gDNA_ID_2213649; Annot_ID_181555

SEQ ID NO: 17329 - DNA, 3003 bp, Unknown
  misc_feature (1)..( 3003): 2750-1469P.txt file - cDNA_ID_1808564; gDNA_ID_2214662; Annot_ID_188909
aaaccaaaccgaatatagattgacccaaactcaaaccaaaccatactaagagtgcctctaatgtagggttgtaatgcaatttttcagaggttctcttgatattttggatcaaaaataaatcaaaatagaattaaaatgatagaggcgttggagataggcgacacgtatctaaattgtattggttgtgcatggataattttttttgtctcttaaaaggttttgaaaatatatgattattagtgacataatatttagtctgtgatcgactatattgacataaaaacgacataattgtcatccttttcactatgttttgtatttataattattgaatgctttaaatatttggagcagtcacctagcaaagttattgaatgggttcgttcagtggtacataaatgataaaaattctcaaaggagaatcatctttatttgcatcatatcaagaagtaatttgtaaagatgtcgagcgtgcatttggagtattgcaagtttggtttcacattattagaaacctaactcttatttgggataaagaaaaaaataggaaatattatgtgagcatgtatcatgctgcacaatgtaattgttgaagacaaacgagatagatacactctgtttgatgttgagaaattcaagttgaagcaaaccaaacttcaaaagtcgatttatcgtattctacatgtatgcctacaaatctcagagattttatgagcattcaaaatcaagtttgtgattgagagatacatctacaattgaaaggtgatttggtgaaatctatatgaaaagaaatgcataacaatcaacagaataactgatcgtttttgtttttttttgttttacatctattttaaaacatttcaaaataatatatttttaatattttatgctttaataattattaagttttataaaataaaataattttatattaaatttttttcttcagagaactactctaagagatcctaccatttaagtatgaaaaataaaaaacaaaaaaaaaacacaaagctctttggttaatttttctgaaatttaattatagaaaaatggagagaacccttagagaggctctcttctttggaggtgctctaatttcggttgagtttagttaaagttttacaaacccaaataaacagaaccgaaccgaaataaaagaaatgccaacccctattctgtaatgaaattacattctacaatttattgacctctcaactacatttactaatcttatcatttaatgcatgctataaataaatagctttatcttgtggtacgtctttctttttatgcatctccttcaaaggttcattttctttcattctgagtttgttccatcggtacttccttatactttctcgtttcattttcgagatttttttgtttttagtgtccttacaagtaacatcatactttgattactaatagtttcatgattcatcattgttgttcatcatctaatgctctcatttcctcacgcagctccaactttcaaacacaagtgcttttgtcttaagaccttttctcttcgggttcgtgagttaaggtaacaacattactgatgattttggtacaattaataaatttccctaagatttttttaggatattataagcttaatttttaatttgtatagctgatgaacaataaatcacatttattgtagccccatgaagcatgtctcaattgacttttcttgctgcgtttataccattagataatagatagcgataagaaaattaaatggccaagaagcattgaataactaccacgttttaaaatggtatgtacattaggtaggcacgcaaactaatgttactacacaatagtccatttttatttgtttagatatgtaaaaatcgtgtcccaaatttcttctattattttgtcgtatagaagaaagaaacctttcacgggatatgattggttggactttaaaatttttttaaagtcattaaaaaaactataacctcaaaattgaaacaattatgatatagcttttctattttttctcacagcctaaataatatttttttaattattttggctgtaagtacaagttattctaaagcacaagtttatggttctttttttcttttcattttatttttatttttgtaaaaacattactataattttcatatatatatatatatatattaaatttagttttatggatataaatagtagataaatatctactttatgacatatatatatataactcacattgtttttaatatatatatatatatatatatatatattaattaaattgatatttgtgaataatattatataacacataaatacattttacaaataatattttttttgtttaaaaatacatacaaccaaaatcttatttctacaaccaatttctttaagtaataatattatattaataaaatctacaatctaatttctaaatcaataaaacctacagctacaaccatcacacctacaacaaaaaatatacaaaaataaatttacagttacagacgaaccaatcacccacatagcttccatttttaaggtatatagtcgtctagattactatcacaacaatttaaaaaatctagctttttttgtttttgatgtaaagaaatctttattatatattatagactaaaaacgcttttttaacacatgtacgaatccaatttcttatttttggaaactagtgttaactatttatctcttcaaaacagctagaatttttggttttatgttttagtgatgcagaattacaacgcaatgttaggtatatattaattactaaaacaatgtcttgatgcataaaacgttggaaatgttatttttaggcacatataggtttgttaaaattagttagctgttttttgttgtactattaattttttttagtatgtgtaaagctttataattgacctcaattttcatctttctttcaatttgcagggttcttcttcttcttcttcttttttctctaaactggaaaataaagaagaaaagaacatg

SEQ ID NO: 17330 - DNA, 3003 bp, Unknown; identical to SEQ ID NO: 17329
  misc_feature (1)..( 3003): 2750-1469P.txt file - cDNA_ID_1808564; gDNA_ID_2214662; Annot_ID_136534

SEQ ID NO: 17331 - DNA, 3000 bp, Unknown
  misc_feature (1)..( 3000): 2750-1469P.txt file - cDNA_ID_1808572; gDNA_ID_2214530; Annot_ID_134260
ggttagagttcttgaatccttctcttgactctctatcccaatccttcacaataataaacatttttgatcatttagattatttaaaaattgcaatatataaaaattatacatattttgagaaatcctaacctgaatgtagagacgtgtgttccaatcttcttgagctgagacattacatctgagaagatctcttctagttggagccacattagggtttcctctccaataagcatacgccacgcggtctttccattgagtcatcttattcccttcttctatcgccactagcgatttatcccaaggctttatattaacctcagccctagcccaataataatataattagctaggtccaataacaagcccattaaatagagaacagaatagaattaacatgtgtgttaagcccttaccagccccagaaggaccaatcagggaagacaatatccaagctggcgtcatcagagcaataacggaacaaaggaggcggggccgggtgttgttgaccttgaaagtctttagatcggacggttggtctatcatctgggtcaaacatgagctcaagatccggtaacctacctgggtaccaccgtagtaactgtacgatgccccacagagtaaaaacgtctcttgtttggattgactttctatatttcttaacgtacactctcccgtcgaggattactactctgaaatgcgccgtcctcctggctttctcaagcatccctctcgttacacctgtctctttccatggccgtagatcttcgtggatccaacggaagtaagaaggacacgtggatattcttgaatggctgcttctgggtttgtcgttgtttctcgaggagccattttggggaaataattgagtttggttctgaacgacgccgcattggttagggaatctttggcttgtgattggtgattttctgatactagttgttacctgcttcagacctgtaaaagttgtctgaagtacagagagatatgaatttattaactcttcaagttcaagattcacttgattgaataaaaagtttctaaaaaagaagttacttcagattcgaactcacgaaatcgaaacaacccaataagtctaagagaccagcagatatgaagagagaggtgacgaggaacagagtagctttagcgatgctttttgctggatgcgacgccgttttaagatagacatacttattcttgttcgttagaagattgttgttgttcctcttcatgcttttccgttgaagcatgaatctatatctatctcagctttatatatatctatgttcacaaacattcaacaggaagagaagaaaaacgagaatcaggtgagattaaacgttaccgaagctaggaggaagctcaaaggtttgattctggtgatcgattggtgctcttccacgaggatttgaatcttgtttcacgttatcttcaacactaaccagagttcacatcttttgtgttaatgacgttcatatttttgtgtgaatcttgtttactttttagtttttcgaagagttaaaatgtttttaaatattaaatagataatattttattaattagtaggagacatttggtcatccatatttggtattcctatgctcaaatcacatatggacattgatatgtgatacacaaatgtttcccaaataatcgtctcttattaacgttgtatttattggtaaataactaaatacaagacctttgatgttcttagaaaaataatctgcttactacaaaaataaaactgcaagagttcaattaattaaagtcctctttgggaaagtttgttataagtgctttaaactgaataaaagaatccgaacttcgaagaaagaagaaagaagataaaccttaacccattaaataaaggtcagtgacatcatagtccatattcgaccactcatcatcatacaagacagataattaatcgtaaataattccatgttgtagagtactttttattattatacaaatacattaatacatctttcacaggctgttcgaaactgtgagtctgtgattagtgattagccttaattaatttactttattgctttgttagaaaaaaaattacacctttctttaaattaaaacaagttgggcaggaaatttaaaaacccgttgggccattaggattcacaaaagcccaacacctacaaaaagagatgtctccatctcatagtccatataccacatgcttaaaccagtttaaattgcatataccacgcgccacataaccggaaagttttgtacacgcgcgagacacagacattatcctttttgtatctgtcttccagcgtgtcgagtcagtgaggctccacgtcaccctttgatccacttaaattttaaaactaaaataattgtttaaatgaattcgagtgattgatattttattatagatttaatacacacccgacactctgtcaattctataggcatacgagctcactccaaatttagattcagttttttaatacgaactttttagttaagccaagattagcaataatatagatcatttattttcttgattgtagtttgattgttgtttttctcataataaaaaaatcccagctaaaatctgattttcaattttaaaccaatttatatggtaaacaaaattttagttcggtataattggaagaattaagttttgttgaatatcaggaaaaaagaaggggaggacaaattttctacagaggtgacgtggcatcattgaaccactttacttgtcggcagtgaggtgtgtttaatcacgtgtaacgcatccaatgcgtatgagagctttacagccgcacgatcacatgggtacaaaaatcaacggcgaagcaaaacaagagtctcacacttattaaacgcgcgtagtacgctccaccggtataagctaacggaggatataaaaactctttaactcattattgtcctaaaatctcaattttatccattttcacggaaaaaacataaaatctgttcttcttcttcggctgagagacaatg

SEQ ID NO: 17332 - DNA, 3000 bp, Unknown; identical to SEQ ID NO: 17331
  misc_feature (1)..( 3000): 2750-1469P.txt file - cDNA_ID_1808572; gDNA_ID_2214530; Annot_ID_184902

SEQ ID NO: 17333 - DNA, 3003 bp, Unknown
  misc_feature (1)..( 3003): 2750-1469P.txt file - cDNA_ID_1808574; gDNA_ID_2214535; Annot_ID_134363
tagtagaaaaccatctcaaacaaatatcttctacgtaccacttgagtttggattataaaaggacttggtagaatgaaaaagcatgactcataattaaataaaacgtacaatgtatctaatccttcatttgtcaaaatggtaggtggtcacacatttggaaaagcacaatgccaattcgtgacacctcgtctttacaacttcaacggtaccaacagaccagacccaagtttgaacccaacttacctcgttgaactccgtcgattgtgtcctcaaaacggaaacggcaccgttctggttaacttcgattccgtgactccaactactttcgatagacaatattacaccaatcttcttaatgggaaaggtttgattcagagtgaccaagtgcttttctcaactccaggagctgatacgattccactagtaaaccaatacagcagcaacacgttcgtgttctttggagcattcgttgatgcaatgattaggatgggaaatcttaaacctttgactggaactcaaggagagataagacagaattgtagggttgtgaatccaagaattagggttgtggagaacgacgatggtgttgtgagttctatctgattatgcatgttggggatatatggatatgtaagaacgtataaaatgtgtgggattgtgggaacatttcgactaaataaagttctcacaagttgtgtgatttatgaaatttggtcttaattaacacttttgattcgattttctgagtactaaaaaagtggatgaatttcataatgaaatgatacgtggtgtttgtataacacttaactttcaattgacatagtttcatgttattggagaagttaaattgtgtgtaaaaatataattcgaacatgcatccatttctataaataaatatcgaggttatcggattaaacaaagcttgtaggacctaaatatagtcatgaaactacaaccctaatagaagtttcaaacataatcaaactttagtcttgagcaaagaaatagaaaatatataaaagttatactcttgtaagcaaagaaaagcccaaacgaagcaaaacaagacaaaaagcccagtttaaagtagatgtaagcagatttacttgctacatcatcaactccccattttacatcgtcccaatgagatatatccactcttttcatagaatttgatgttttcacacgaatacgaaatcccaaatatataatctatcccttataattcataattatatacaaaaaatatgcaatcacacaactagccattaaatactatatagaaatatcaccacttgtcatttcaaaacaatacactaattaatgtctataattcaatccttgtcagatggagataagagagacacaatccataattttgttgctcattcatatagttcaagtgcgttggctcacggcaaacattttaaatttagacccacgccggagaaaatctaattagacgcatagtttattatagtggatttcattgggacaaacaatattagccgcattttatgtaatatctttcacttggaacacgtgccccatacacatatggtccctccatgctttgtacttatgtagttttttgtatgctacgatttggtattattgtatcgcaacgcgtaaaaaaggagagccaagtgtgtctccaatctttgggattgatttaagaataaaagataggaaagacaattatatgtccaatctttaagattgatgatttaaaattttgtagttatcatgaaaaacaaatttttatagtgttgtagggacgtaggtgatcattctcatgactcatgacacccattccatttaccaaatgcattacttatttacttgttttggtacaataccaaacacactaacaatgatttaacatttacttaattataatataaatttgcttacgaaacaacttgcattaaacaatttgcttctactatacttatattgatctatcgtgggcggtgagtaaaatgagttgggacatggatttgtcatttaggtcatttttagtaaatgtgaaacttgtaaccaaaatatgcataaaaactttagcctttctaaaagctaaaaatggtttgaggaacaccaagacgtaagctcttttaagctatttgatgtttgatgtgataaaataactaaaaactatttgttatgttttttcctccccttaaagatataagagaagagaaggtaaagaagttgtgtaagttagtcacaatcaattgttggaaataaatttgaaaactctgttaaaagtcacccaaatgagtttcaaacaagagttaaaagattaaaaaaaaaaagtaactgatataaagaatggtagtttactttttttttaaagaatggtagttttttaaaaactatttaggttgatggtatttttgtaaagaaatccaaaaattgtagttgatacaagaaaattttgatttgtgttgatttatttctcttttggcatgtgaatgtaagtaatctttttccacatgatttctaattctggacttgcatgtcttgttacgccagtcaacattcgttggataagttacaatgtcatttacaacttgcagattaattcggaaatcaagaaggaaaaaatctgaattagaaatagtaggttggatttttcacaaaaaaaaaaaaagtacaatattttgagatatgaccattagattcttaaattttacgattctaacttgtaagatttcaaattaaaccatgtataattcaatttaggggtaatttaatactttagggtagtaacgataaaatagataattaaattgaagtttaaggaccatcctgtaaattcaagttcggtaccggaaacacgtcagcattgatctaatagatacgagtcctcctttctctataaataacgtaatctctctcccgtcttcattaccatcgaaacagtgtcgtcgtagtctctctctctctccgcaaaatatcatcggagaaaagaaacagagacacgaaacagagaaaaccatg

SEQ ID NO: 17334 - DNA, 3003 bp, Unknown; identical to SEQ ID NO: 17333
  misc_feature (1)..( 3003): 2750-1469P.txt file - cDNA_ID_1808574; gDNA_ID_2214535; Annot_ID_185063

SEQ ID NO: 17335 - DNA, 3003 bp, Unknown
  misc_feature (1)..( 3003): 2750-1469P.txt file - cDNA_ID_1808595; gDNA_ID_1621088; Annot_ID_55409
agaacattgtatctgaaacgttacgtctgtaccctgcagcccctatgctgcttcctcacgtagcctcgaaagattgtaaagttgggggatacgatatgccgcgtgggacgatgctattgactaatgcatgggctatacacagggatcccctgctatgggatgatccaacgagcttcaagccagagaggttcgagaaagaaggagaggctaagaagctaatgccgttcgggctaggaagaagggcatgtcctggatccggtttggctcagcggctagtgaccttgagtctcgggtctttgattcaatgttttgaatgggagaggattggagaagaagaggtcgatatgactgaaggtccaggactcacaatgccgaaagctagaccgttggaagctatgtgcagagcacgtgactttgttggtaaaatcttacccgactcctcttgagtttttgtatgtaaaatgctaatacgttgcttagcaacggtaacgaattaaatgaaacgtattagcataataaaaatcagagacaaaaatcatattctaatttccaataacccattgttaattatgttacagtcttacaaatatgaatgttcagtgttatcaatcaaacaaaattctaggtgtgaaaaaaaaataaaaaaatctaggtgtggcattgctatgctaaatgtcatataattagctaaaataaataaataataatgattaggtatctaaacgactaatgggcacatgtgatttggccgaaataagattctgttttcgaagtcaacgtctatggagtagttcaagcagattttgcaccacatcatcctctgttacaacccctgaagatccttgaggaagaagaagtcaaatatggaaggtcaaaccctaattttcacattccttttcatatctctttctctcacgtttatcatcggaagaatcaagcgaagacctaaccttcctccgagtccgtcgtgggcgttaccggtgatcggtcacctccgccttctcaagccgccactccaccgagtttttctatccgtctctgagtccctaggcgatgctccgataatctccctccgtctcggcaaccgactcgttttcgttgtctcttcacactcactcgccgaggaatgcttcacaaagaacgacgtcgtactcgcgaaccgcttcaactcccttgcttcaaaacacatctcatatggctgcacaacggttgttacagcttcgtacggcgaccattggagaaatctccgccgtattggcgctgttgagatattctcggctcaccgtctcaatagcttttcatctatccgccgagacgagatccaccggcttatagcttgtctctcacggaactcttcactcgtaagtttgttctttgttctttgttccaattttatgctaattagcaaaatttattataatcagaatccttagtccctagtcaatctctgcttataggtgaatttcagtgaattgtagcaaatatttaacatatgatatacaataaattttgcaggaatttacaaaggttgagatgaaatcaatgttttctaacttaacattcaacaacattataagaatgttggctggaaaatgttactacggagatggtgcagaggatgacccggaggctaaacgcgtgcgggagcttatagcagagggaatgggttgttttggtgctggaaacactgctgattatttaccgatcctgacttggatcacaggttccgagaaacggataaagaagatcgctagtaggcttgatgagttcttgcagggattggtcgatgaaagacgagaagggaaggagaaaaggcagaacacaatggttgatcacttgctttgtctgcaagaaacccaacccgagtactacacggacaacattatcaaaggaatcatgctcgtgagtaacattttaagttcattagtctattgtcacatttggtatgggattaattagttatgtttgtttttttgtgtatgcgtccattgtgttgaagtctcttatactagcggggactgatacatccgcagtaacattggaatggacattgtcagctttgttgaaccatccacagatactaagcaaggcgagagatgaaatcgataataaggttggcctcaacaggcttgtagaggaatcagacctctcacatcttccttatcttcaaaacattgtgtccgagtcgttgcgcttataccctgcgagtcccttgttggttcctcacgtagcatcagaagactgtaaagtagggggttaccatatgccacgtggaacgatgctattgactaatgcatgggcaatacatagggatcctaagatatgggatgatccaacgagcttcaaaccagagaggttcgagaaagaaggggaggctcagaagctattggggtttgggctaggaagaagggcgtgtcctgggtccggtctggctcaacggctagcgagcttgactatcgggtctttgattcaatgttttgagtgggagaggataggagaagaagaggtggatatgactgaaggtggaggaggagtcataatgcccaaagctataccgttggtagccatgtgcaaagcacgccccgttgttggtaagatcctcaacgagtccgcttgagcttagacttttgtactaaatgctaatttgtgttttttgagtaacggttacttttgtactacttttgttattatgtaaaaagaggaaataatttcgaggtgatacatccaaataatatattaatacacttatattttacttttaagaaagaaaatcttgagaagaaatctagaattataatttcgtctgcttttttaaaaggtttttcttaattagagtccaacgttcgaatttgaacttgtgacaatagtacattatcttttatagagcataatttttaaaaataatatatttccttgaccacatgtatatatctccaaaacaatagtaaaaaaaagagagacgaaaagaaagaaagagagagagccccacaaacaaacaaaatg

SEQ ID NO: 17336 - DNA, 3000 bp, Unknown; identical to SEQ ID NO: 4006
  misc_feature (1)..( 3000): 2750-1469P.txt file - cDNA_ID_1808595; gDNA_ID_1620678; Annot_ID_164304

SEQ ID NO: 17337 - DNA, 3000 bp, Unknown
  misc_feature (1)..( 3000): 2750-1469P.txt file - cDNA_ID_1808595; gDNA_ID_2926213; Annot_ID_142074
cattgtatctgaaacgttacgtctgtaccctgcagcccctatgctgcttcctcacgtagcctcgaaagattgtaaagttgggggatacgatatgccgcgtgggacgatgctattgactaatgcatgggctatacacagggatcccctgctatgggatgatccaacgagcttcaagccagagaggttcgagaaagaaggagaggctaagaagctaatgccgttcgggctaggaagaagggcatgtcctggatccggtttggctcagcggctagtgaccttgagtctcgggtctttgattcaatgttttgaatgggagaggattggagaagaagaggtcgatatgactgaaggtccaggactcacaatgccgaaagctagaccgttggaagctatgtgcagagcacgtgactttgttggtaaaatcttacccgactcctcttgagtttttgtatgtaaaatgctaatacgttgcttagcaacggtaacgaattaaatgaaacgtattagcataataaaaatcagagacaaaaatcatattctaatttccaataacccattgttaattatgttacagtcttacaaatatgaatgttcagtgttatcaatcaaacaaaattctaggtgtgaaaaaaaaataaaaaaatctaggtgtggcattgctatgctaaatgtcatataattagctaaaataaataaataataatgattaggtatctaaacgactaatgggcacatgtgatttggccgaaataagattctgttttcgaagtcaacgtctatggagtagttcaagcagattttgcaccacatcatcctctgttacaacccctgaagatccttgaggaagaagaagtcaaataatggaaggtcaaaccctaattttcacattccttttcatatctctttctctcacgtttatcatcggaagaatcaagcgaagacctaaccttcctccgagtccgtcgtgggcgttaccggtgatcggtcacctccgccttctcaagccgccactccaccgagtttttctatccgtctctgagtccctaggcgatgctccgataatctccctccgtctcggcaaccgactcgttttcgttgtctcttcacactcactcgccgaggaatgcttcacaaagaacgacgtcgtactcgcgaaccgcttcaactcccttgcttcaaaacacatctcatatggctgcacaacggttgttacagcttcgtacggcgaccattggagaaatctccgccgtattggcgctgttgagatattctcggctcaccgtctcaatagcttttcatctatccgccgagacgagatccaccggcttatagcttgtctctcacggaactcttcactcgtaagtttgttctttgttctttgttccaattttatgctaattagcaaaatttattataatcagaatccttagtccctagtcaatctctgcttataggtgaatttcagtgaattgtagcaaatatttaacatatgatatacaataaattttgcaggaatttacaaaggttgagatgaaatcaatgttttctaacttaacattcaacaacattataagaatgttggctggaaaatgttactacggagatggtgcagaggatgacccggaggctaaacgcgtgcgggagcttatagcagagggaatgggttgttttggtgctggaaacactgctgattatttaccgatcctgacttggatcacaggttccgagaaacggataaagaagatcgctagtaggcttgatgagttcttgcagggattggtcgatgaaagacgagaagggaaggagaaaaggcagaacacaatggttgatcacttgctttgtctgcaagaaacccaacccgagtactacacggacaacattatcaaaggaatcatgctcgtgagtaacattttaagttcattagtctattgtcacatttggtatgggattaattagttatgtttgtttttttgtgtatgcgtccattgtgttgaagtctcttatactagcggggactgatacatccgcagtaacattggaatggacattgtcagctttgttgaaccatccacagatactaagcaaggcgagagatgaaatcgataataaggttggcctcaacaggcttgtagaggaatcagacctctcacatcttccttatcttcaaaacattgtgtccgagtcgttgcgcttataccctgcgagtcccttgttggttcctcacgtagcatcagaagactgtaaagtagggggttaccatatgccacgtggaacgatgctattgactaatgcatgggcaatacatagggatcctaagatatgggatgatccaacgagcttcaaaccagagaggttcgagaaagaaggggaggctcagaagctattggggtttgggctaggaagaagggcgtgtcctgggtccggtctggctcaacggctagcgagcttgactatcgggtctttgattcaatgttttgagtgggagaggataggagaagaagaggtggatatgactgaaggtggaggaggagtcataatgcccaaagctataccgttggtagccatgtgcaaagcacgccccgttgttggtaagatcctcaacgagtccgcttgagcttagacttttgtactaaatgctaatttgtgttttttgagtaacggttacttttgtactacttttgttattatgtaaaaagaggaaataatttcgaggtgatacatccaaataatatattaatacacttatattttacttttaagaaagaaaatcttgagaagaaatctagaattataatttcgtctgcttttttaaaaggtttttcttaattagagtccaacgttcgaatttgaacttgtgacaatagtacattatcttttatagagcataatttttaaaaataatatatttccttgaccacatgtatatatctccaaaacaatagtaaaaaaaagagagacgaaaagaaagaaagagagagagccccacaaacaaacaaaatg

SEQ ID NO: 17338 - DNA, 3000 bp, Unknown; identical to SEQ ID NO: 17337
  misc_feature (1)..( 3000): 2750-1469P.txt file - cDNA_ID_1808595; gDNA_ID_2926213; Annot_ID_202756

SEQ ID NO: 17339 - DNA, 3003 bp, Unknown
  misc_feature (1)..( 3003): 2750-1469P.txt file - cDNA_ID_1808608; gDNA_ID_1620653; Annot_ID_47774
cacacattgggagatgtatgcgattggtggaagtgctaatcctacaatcaatagtcaagggaacagatttttggcacccaatatcagatttagcaaagaagtgactaagcatgaggacgcgcctgagagcgagtggaagagatggaattggagatcttccggagatttgttgctaaacggtgcgttttttactccgtctggtggtgcagcctcgtctagctatgcaaaggcttcgagccttggggctaaaccgtcttctctagttggaccattgacgtctacttctggtgcactgaattgccgtaaaggttcccgttgctgattgtggcttagtggtcacacttaagtttttaccccattattatataggaaaaggcaattaaagccaccaattaagggggattaagtagtgtagtaagactttcttaatcccttgatttactcttttttttgtttgtttattcgggtaaaattgaaggagaatacaacctctggctagctgctctctaggacccttcttaaggattctctgttttaaggaatctttaaattaggttaaagtgtgggaacaagtgcagatgtgttgatcttgatattaatataaatatgattttgtgtctttatcttttactagtattattttcttatgagcattgcaatgcaaagacatagattagtcacaaaaattagtttgaagtataaatttgcgtacacacatgatggagaggttagttaaaagtgtgcccatttggcaagtcaataatggctctttgattttccaaataaaatgactttttattcggaagtttgtaatgttatgtaaaatggtaacttttgggtcaaagatgttggagccagtcaatgtttgaccaactgccgcgacttttttttcctctggccaatgcatcgattccggtaaattaaaagaaaaattacccttaaaaataggaaaagaaaatcctaggcatgacaatgagagaagagaaaagtgaagttgatagattttgaatagaaaaaagaaatactaaaattttcaaaagaaagataattggagcagtcaataccacagtagctctacttttgatgggtttgtctcatattcgtgttttgactactgtccactgattatgggatttatttaaaatttgaaagtaactaattaaacaactaaccaactttctttgtggccatgtgcacattttcttttgttaaagatggccatgtgcaacatgataatacatctaggaacgaaaggaagaagaaaactttgaaagtaacaagtggtcgcaactaatgatgtgatgtagttggtgtgattagtatgtggctggtttgatttggtcagtcagtgagtattaaatgttagtttgccaagaaagattttttttttttttggtcatactgtatatagcataaaactaggtagagaatttccttgttatgaaaaaaaaaatctttacatttgagttattggggaacgaaagaaattcctatggagcaagaaggtttaagtggccatgttatgagttgtgtgcggtcacgtgtactggtcagttaatttagttgtaacaatcgattatatttgttctattattctttatatttcagtgatgccgtaacagtaagaaattatagttaactgaaaccaacaaaaagattcagaattactggtgttattcaattatggagttaaagttaattctttaaactttagatttgttttctgatattgcttttaagaatatgtttgtatgaatttcaaaatctctgcaatatatcttggattttgattctaatgatttactcatgaaactccaaagaggtttcatttcaaatcaattaatatacaaagattttacaagacttttagttttgaacaacattggattttaatgaaatatttaaaatcttaattgaataacaccaaactttaaaatctattaagcatgatttacaaatatgagttccaataacactagattttaaagctggatttagaatcattagttgaataacattggattagtgttggatttcaattctattaaaattcattaacgaataacacccccttaaagttaactctttcaaaaccgatcataacgcacacaagcctccaccgaaatgtttgacaccataatattttactaccgagttcgcaaggctaatatgtatttccttttgtaatttttctctttattcgtattcgagaataagtggattgttcttccgaaagttagatagatcattatgaggttgttcttagagagctagaaaactcaaaacaagtttatcaagtcgatcaactctttgataaactcaacaaatagttatcattgctcattataagattgaaaatgagactttgtattgtggaaaataaaatgcttacctcaagtgaaattttaaagtttatgctatgatgtttgtgatttcgcaattatatgatttaatgatattaaataatcaaataaataataattcattaaaattcacatatggtttaaataggtctaaatgagtttatatgggtcaaaataattttgatggttctaaatgggcttcaaatttaagtgggtttatatttacatgagtgtgtgtgtttacatgtagaggggcttacccaaattaacatccaaattaacatagagtaatttccaaaatgaagtaagattaacattcaaattgtgactagaactttgatttgagttatatagactttgtgtattatttttttataatataaacttcgttttgataagtttatataaaccttgttttcgtaagagattgtgaaattttctttgcagagggacatggttattttttgtctttggttcttgtaatgagattttaactatggtaaatctaagagcccatttgaagatgatgtctcggccctccttatccttatctcgcccaccgttctaaaacccttcccttcctcttcttttctcttctccttccacttccacttcttctatctctcacaattcagcaatg

SEQ ID NO: 17340 - DNA, 3000 bp, Unknown; identical to SEQ ID NO: 4063
  misc_feature (1)..( 3000): 2750-1469P.txt file - cDNA_ID_1808608; gDNA_ID_1620681; Annot_ID_164436

SEQ ID NO: 17341 - DNA, 3003 bp, Unknown; identical to SEQ ID NO: 17339
  misc_feature (1)..( 3003): 2750-1469P.txt file - cDNA_ID_1808608; gDNA_ID_1620653; Annot_ID_163528

SEQ ID NO: 17342 - DNA, 3000 bp, Unknown; identical to SEQ ID NO: 4063
  misc_feature (1)..( 3000): 2750-1469P.txt file - cDNA_ID_1808608; gDNA_ID_2926186; Annot_ID_140786

SEQ ID NO: 17343 - DNA, 3000 bp, Unknown; identical to SEQ ID NO: 4063
  misc_feature (1)..( 3000): 2750-1469P.txt file - cDNA_ID_1808608; gDNA_ID_2926186; Annot_ID_200622

SEQ ID NO: 17344 - DNA, 3003 bp, Unknown
  misc_feature (1)..( 3003): 2750-1469P.txt file - cDNA_ID_1808620; gDNA_ID_2214558; Annot_ID_134846
gaactgacattgaagcgggagaactcaagcttgaggtgtctgacgaagtgatcatgacatttctcaaaagctctttcctcatcttcaacaaagaaacttttgcttgctttcctaaacaattttctatgttccttttgcgatttccccagtgtgcttatcaatgcattctcatcaactcccattcccatccctataaacaacaaacatacattttttagattttcaatctcaaatccaaatcattctttgtatcttccaagaaccataataaaatcaagaattaaatattacaattaccagctgagatggcttcagtgaggctttcgagctcgagaggaagagccattttcttgcagttgatcttttattactgtttttgatttccggctcttggtttggtttctgtggaaatctatggaagagggacaagacgttttatatgatgattaagggtaatgttgtggtttatgggagaagagaagggtgttttaggtattcaatacaagatttaagacaaatgctaggggcattgttgtaacaaggagtaacgcccacgcaattaattgcatatgttaacaactgttttacgcaaacggaatttacatacttcagtaagttcaagacaaattaacacttactgtttttctttgtcttaagtggaatttattaagtttgaccactataaaagttgtacttaagtgtcatcattcatatctataatccaaaacggaggttcttgaacacagataagaagaagagtttattttcttttacagttttcgaaaagtaggaaaattacaacaagaagtagagtctgacaaatgaaagtttctttagtataaaataaaatagtaaagaattatgtaaaagaaacagtaaagaatattatactttctaaagaaaattaagaaagtgaaaaagttatttggagaaattacgttttcagaatataggttctcaaaattagatgcaaagaacataaaccaaagtgattcaagtgatggtttaggatatgatcatatatcaaaattaagatccatgtgtcgaatagctcaaatctgaatttgtcaatattaaaggcaactaatctcactgaatcttaaaacatatataaagataatatctacgaaatagatagtctttggtgccaagaacaaggttttttttttgttactgcgaaacacacatggacctattacagaaaaataatggtttgaatatcatgggcaaaggagacagcttatctcttcttctctgttttttttcttctcattatgtccagactgtcccatttcataaattatgcacacaattgtagtagatggcaagcctcaatcacatttgtttcgcattattgtgacttgtgagactaataattaagcttctataatatatatatatatatatatatatatatattcaacaagtactatcacatgtttttttatagattatatattgctgaatatctatctgaatctgacaatgagatttgagaagattgtacaaccactacatgtgtcgcttaaccaaaatataatttggtcaaccaattaagacccgatttatatagtatatgagaattagtataagcgatttatacatcaaaacgtgttttgcacaacttccgctgaagctgtttaattagcatgttcctcatatatagttcaattttccacagctcaaatgccgccagcatataacccttacgtcaaatttcctcatattttattgtgtgtcataagacttgcgtatatccaattatccatacatgacacgatcgatactgaagaatataatttgaatattaatcacgagataactcactcattaaaattttaaaaagtttacaagattacgagatactcacttattggcattaagaaagtgtgaatcattaatcaacttacgtgtagattccagtactttcgcgccagggtcgattcacatttgtttacattagagtgatcagtttttaatctactacacacgaattttccatcgaaggatcaaaaaattctagagtatgattattttaaaaaagaaaagatcacgttttacacgacgagaggactagcaataatttggatcgaggacagctgtgttgagccgtatcatttgcaaatcgcaatctatttatttatttgatttgatttggttatacttagacttcactcataagatcatcccatcatgttcctaatcttaaatggtatttctatttcgcacatgtcacaacttagacagttgactaaatcataactttatatttaggttttaagtattaaaaatatatcaaattatattataagttttgtaatctctttttgttagtttagcctaccaaaaaaaaaagaaatctctttttgttagttcttcttgtcttttcgtaatcaactactatataacctatatatttatttatataaagacattgttaacttcgtcatcaaaaccatttatttatttgtccatttatttgctaccttagtttatttttagtactatatgaaatatcatacattttattttatcttaaattaaatacggtacaagttaaattcctcattaaaaccattgtacgttgtttttagtcctgttgtaatatcatttatttcattgcaagtttgcaaccttacaaaaagtaaaaatatgaaaaggttattttgtgttaattggaaattattacatagtatgtaggatatgaaaataggttaggagaaaagatgctccatagaactcatcaatacacacaactaatatatgaccctaattttaaatgtcctcaaaacgaaaaatctcgacagaaataggctaattgcgtcatattacagtttcgtcttcgggggcatttatgtcaaacaccatccccagctacataattacacctcctaagtaaataactccgccttgaggaaaaaaaactaaaacggctctaaattgaaaacaaaagaagagagagagagagagagacgaagaaacagagagattctctcgaaaatg

SEQ ID NO: 17345 - DNA, 3003 bp, Unknown; identical to SEQ ID NO: 17344
  misc_feature (1)..( 3003): 2750-1469P.txt file - cDNA_ID_1808620; gDNA_ID_2214558; Annot_ID_185818

SEQ ID NO: 17346 - DNA, 3003 bp, Unknown
  misc_feature (1)..( 3003): 2750-1469P.txt file - cDNA_ID_1808627; gDNA_ID_2214493; Annot_ID_133507
aagggtgaccggcgcggcataaaattgccctggagtcaccaacattcgcaacgaaaagcttattctctactaggagagaggctatagcagtacaaccaggatgccagtctttctgactcaccctttttgactgacgatgggaatccagttcttgtctgaaagctaaatctgtcctaacaaatgcttgtgacaatgcctcgccagcgctgaaaatgaaacatgccaatgggtttttcgaacaaaccatgctgagaatatgaaaagattgaactgagcattaaccttgtggaacataagctttgaactagtcctggcaaaacttgagcagaaaattcagcagctgcagcgcctgcatgtcattcaagatgctattttatatcctatttgatggatagctaaagaatttggagtaaaaagagagagggcacaagtaagaatttggagtttaatgcgtcctggataaaattggcagttggtatacctctatgaccatcgaagatggcaaataagtggatgctttcctcattacacatgtgcggtatgatgaagtgtgtatcttccatggattctcttcttccacatgttgcaaaagacccacaagaaattactgggacatatcttgaaggttcatctgttgaactagaccataatttcacatcaaagacagtggaaacagacgatttcttggataaacactccccttgactaaaccaattaacggtgtccctgtaatctcctgaatttttaatgatgtccgccccatccgtatcactctgggaattagaagttttctcaaggagatgaccttgctgttttcctctcacttgttcccaaattgattctagttccaaaaccacattgtccgaagaaggtcgtttagacggatcagattcccagcagttttgtatcagagatagcaaactctttggaaggtgcaatccaatttcagcaagagctggtcgcagaccagaagacacaatggcaactgtaagttgctgttctgtgtaattcatctctaaaacagtgtgagcctgccatcaagatatgcaaagggaaacactatgtgtcatgaatgaaaagaacaagaatgcattcatataaactgctatatgtccataaaatcatatatatttatcacagaaatcgtaagaattgggcttgccaagatatagcaatatcattgaacggcaaatgaatgcaattcaggagcctgaatatatgaaaatacagtatatcgtatataaaggcttctcccagagataataatgtcaaaatgcgaaatgaggaaagaaaattttaacctgagcttctgcacgacgatcagtatatggaacaactccagttaaaagctcactgcaatgtaagatggaaaaaaaattcataaccacagggatcttttaggaagaaagctaaatatactccaaacgaaatataagatctaaagaaaagttgaatgtaagaaaatacgaagaaaaaactttacaatttctactcaaagataattcttacttgatcaaaatcccaaagctataaatatctgctttctcagtatacatgtctttcctcagtatttcaggggccatgtaaataagtgttccgaccatattctttttgtggaatccaccagttggcttcccagacgatctccaattctgcagattaacttcgcgcaaattcttcttgtattcagctaaaccaaagtcagccagatatgggaaaaacttctcgtcaagctgcaacaacaaaagctcacttaagcatcacacacaaatttcataaagaaacagaagaagtacctatcctatatgaaataagcacataacaagatagagaatctagagaatggaagaagagaattacaagaacatttgctggtttcacatccctatgaacaatcccgttgttgtgaagatattgcaatgcctttgctgaaaaaaacgaaacagatagaatcagatattcaaattagtaaccattgaaaagtttatgacaagaagaagaaatcgtcagagtcacacacgaatggcaaaaaagaaggttcctttgagacaagtagagtcacatacccaagtgaagcgtgatcagtaacacttgatcaatactcggagaccactcctcgacgtgtaacttctcagctaaagtcccagactcgtagaagtcaaagaaaaacatgtaatttggaggcttcgcatgtgctgctagtaacttagccacaccaggatgattgagattgcttcaccaatccacagcaaagtaagaaaaaaacaacattttgaaaatggtacgaaatttaaaatggaaatggaaaatgaaagagagaccatgagagctgcaaattcctgtggaacttgtcaaggtcatcggaagtagacaagataggcttcttcgctgctactcttcggccatcgagaatcgcttcataaacaacactctctgatcctgaaaatttctccagacaaatcgaattcaaacgaatgaagattgcgggagtgagagggagagggggaactggggaagagaagaaacagtacctttagcgattggggagagaagagtgaaggaagaagaagggagatgaagagggatcgattcactggtgcaacatcctctaatgcatgtgtttggtttcacaatttccatcaccatttttctccaccggaaaaacaaacgacgaacagagaaccgatcgagcgtgatgacgacgacgaattccccaatttcgcagtttcaacagtaacctcgtagaatgcataccgttttcatgtgtttggaacgctctcaaattaatataaaccacacacagcgtgccgctttttgtttttcttatctctttgacctttcagagagaacgaaacgcacagcctctcaggtgaagacacgtgtcatttgttccttgacttgtcactttcataccttaatcgccaagtaacgtaaaagataccgacatggccaaaacctacgaatctgaaatttgaagaagcataagtttgtctattaaagatg

SEQ ID NO: 17347 - DNA, 3003 bp, Unknown; identical to SEQ ID NO: 17346
  misc_feature (1)..( 3003): 2750-1469P.txt file - cDNA_ID_1808627; gDNA_ID_2214493; Annot_ID_183733

SEQ ID NO: 17348 - DNA, 3000 bp, Unknown; identical to SEQ ID NO: 11622
  misc_feature (1)..( 3000): 2750-1469P.txt file - cDNA_ID_1808635; gDNA_ID_2214506; Annot_ID_133760

SEQ ID NO: 17349 - DNA, 3003 bp, Unknown
  misc_feature (1)..( 3003): 2750-1469P.txt file - cDNA_ID_1808655; gDNA_ID_2926238; Annot_ID_142794
catataagagaaactgctaaaacacactaaaaacttcatctggaagaactccattagtaagcaaacaacagaaacatttgcaaaaccatgactttagcagttaactaagaaaccaacacttctgcttaactcagtaaacttcattaggggactcactgaaatatacggaaagaaaaatcaaagtccttgcaacattatctcaaaatcttgtcggaaatagagaaaagagagaatgtagctacagataactaaagcgaattacaagattgcatctttatacattccgattcatcacaaacaaaaaacagttaagcactaaagaggctccaatcataaagaaagaaaccctaaggttagagaatcccgatcctttagattcacagctattgcaattgaatcaacacattaaaacaaaaaccatttccacataaaaaaaaacgatccagtaaatgaaatagattcaagaccgatcgtcgagcggtagagaaagtaaacaaaacaaagacagagaattgaagaaactgtgtacctgcaaaaataccaatcagatgggtctccgccaaagtaatctgcttagaagttttgtaagaaaaaacaattaaaggcgtttcatttattgaattttccggttgtttgattctcaggatgagattgcctatttccttcaaaaaagaactctttaatttacacagaaaagctctgaaaatttccacagaaaatgaagaaagaaaagagcgtaaaaggggaaagagatgaaatgggttattaaaaaaagaagcagtggatgagggaagagaggattaagaggcgtagagattacatgtgatgaatgatactatcttttcttacaaacacattttcgtgtaattaaaatttaatttggttccaaagattttaatcaaaagaagtttggtaaattgaaacaggcagacataatttattgtaaagagtttttatttatttattcatgacgttgcttgatggtgctttaccaattttcttctcctacgttagatttttttcacttttttttttggtgtttgtaataaatgtgaaaaatggaccgtttaaaaacttaaagacgtttgattactatataaagtaattgtttataatagaaagttaattgagacgtgaaatggtataatattattgtgtaacagttgtgtacacgtagctctcatgcagttttagtggacccatatggcttgacttgtattctgtttttgggctattaaagtccaaaacagagacccctctcaagcccttcctattaatccatctagctaatagaaactataaacgtgtcctctctctcaattaaataagctagaaacatactcaaccattcgcattacgcacttcatagcggtaggtttagatttgtctaaaatacttaaaaaaatttttgtctaagttgttgtccgttacaaagtttttttctttgtgacaacttgacaacattgacaaatagaaaaataaatttcgatgaaacctatgaaatgggctatggcccaactaaaaagagtgggaaattaaagatgggatggttcaagtgtatacttcgaacttccgacattagggtcaaaggatttttaaaaggcaaccatttgttccactttctcgaacaaaaacgagccatttattaatatatagtacggctgaattggttttgttcgtcattgtgtaaacacaaagtcattcgaattatgttagggtccgttgataatatagacggcccatcccacgcacatattaagtgttcaactccatagaatatcatatgggacactgtttttaatttataatcaccatttaaaatgtttaaatgtttatgcaaattggatggcttcttcacacaacatttatttattggcctttcattccatcaaagtaaaatagcttttcaaatacattatactctatactcctatacatgtaaataaccatatgcatatatatttttttcaaatataggtcaacgccatttaatataattttaaaaaaatttgttcggaaaatatcacatttctttcactagacaagccttgttaccacacaatgtatcaatatgatctaaagggcaaacgaaagatcctgacatgaaacgtttaattctcattttctccaaattttattttttatgtgaagtagataaattagtatatatatatatataccaaactagtgtgttatgttatggcaaatgttatatcaattcgaaggttccgctattgcaatattcattaattttttcataccaatactatttttctttctcttttattttgttttttaataaataaaagaaattaaggatgattagtaaggaagtcgcctaccaagagattcacctaccacggtacacttcaacaccgaagcagagttgttgaatccactttttattcccttctctaatctctactcaccaagtctccacttttttttctctttattatatacatttaaattatttaatatacgccaactacatacatatccagtgtaatttctcgttacgtcacacccctttcgtaatcgtctaatttcagaaaaatatccagaggtttaaatacatattcccatcattaaatctagacataaacacatcatactcacaaaatttggcagcaaacagttactacagacccataaatgaaaaaacgtattcacttgttttcaattttcacataaccacttccctgagtttggtctcaatttgattgccccgccgaggcattactacgccaagtgcgattaaggtcccatacagtgtaacgggacccactataagacagcgaccgaccaattgcgtgttaggagagtttcaccaaccccggaccggtttttaccggatataacagaaccggtacgaaccggtctcattatcttccatcttctttatatagacctcatgccatgtgtgtgactcaccaagaaaaacacaatcgtttaatctcacccaagaagacaaaaacacagagagagaaagagagagaaatg

SEQ ID NO: 17350 - DNA, 3003 bp, Unknown; identical to SEQ ID NO: 17349
  misc_feature (1)..( 3003): 2750-1469P.txt file - cDNA_ID_1808655; gDNA_ID_2926206; Annot_ID_141754

SEQ ID NO: 17351 - DNA, 3003 bp, Unknown; identical to SEQ ID NO: 17349
  misc_feature (1)..( 3003): 2750-1469P.txt file - cDNA_ID_1808655; gDNA_ID_2926206; Annot_ID_202229

SEQ ID NO: 17352 - DNA, 3003 bp, Unknown; identical to SEQ ID NO: 17349
  misc_feature (1)..( 3003): 2750-1469P.txt file - cDNA_ID_1808655; gDNA_ID_2926238; Annot_ID_203939

SEQ ID NO: 17353 - DNA, 3000 bp, Unknown; identical to SEQ ID NO: 11728
  misc_feature (1)..( 3000): 2750-1469P.txt file - cDNA_ID_1808663; gDNA_ID_2214513; Annot_ID_133887

SEQ ID NO: 17354 - DNA, 3000 bp, Unknown; identical to SEQ ID NO: 11728
  misc_feature (1)..( 3000): 2750-1469P.txt file - cDNA_ID_1808663; gDNA_ID_2214513; Annot_ID_184338

SEQ ID NO: 17355 - DNA, 3000 bp, Unknown; identical to SEQ ID NO: 11797
  misc_feature (1)..( 3000): 2750-1469P.txt file - cDNA_ID_1808666; gDNA_ID_2214517; Annot_ID_133977

SEQ ID NO: 17356 - DNA, 3000 bp, Unknown; identical to SEQ ID NO: 11797
  misc_feature (1)..( 3000): 2750-1469P.txt file - cDNA_ID_1808666; gDNA_ID_2214517; Annot_ID_184481

SEQ ID NO: 17357 - DNA, 2810 bp, Unknown; identical to SEQ ID NO: 11771
  misc_feature (1)..( 2810): 2750-1469P.txt file - cDNA_ID_1808676; gDNA_ID_2214516; Annot_ID_133950

SEQ ID NO: 17358 - DNA, 2810 bp, Unknown; identical to SEQ ID NO: 11771
  misc_feature (1)..( 2810): 2750-1469P.txt file - cDNA_ID_1808676; gDNA_ID_2214516; Annot_ID_184442

SEQ ID NO: 17359 - DNA, 3000 bp, Unknown; identical to SEQ ID NO: 13794
  misc_feature (1)..( 3000): 2750-1469P.txt file - cDNA_ID_1808682; gDNA_ID_2214652; Annot_ID_188669

SEQ ID NO: 17360 - DNA, 3000 bp, Unknown; identical to SEQ ID NO: 13794
  misc_feature (1)..( 3000): 2750-1469P.txt file - cDNA_ID_1808682; gDNA_ID_2214652; Annot_ID_136443

SEQ ID NO: 17361 - DNA, 3003 bp, Unknown
  misc_feature (1)..( 3003): 2750-1469P.txt file - cDNA_ID_1808696; gDNA_ID_1620751; Annot_ID_49825
gggcccttacttaatcgtgaggcccaacatttaacctagtctgaatgtttcatttgctaaaaactttgtttgttgctactgggcccaaaggtttgaaaggccagttcaattgaaatatcgcataatcaaattgaatttaatctgcaagaccaattcgttaatcaataagagcatactaggatttcaaaccaaatgattcagttcaacgatgttttaaattatcatctagaaattataaaatgtgtaataaagcattttttttttttttaaacttgacaaaatctctaaatgtaaagtctaatataaaccttaaaatctaaaaactaattatgcttgtttttgagaaatttttaaaaaattgtgaaaaagaaaagtaatgaaaaaaatattgagagtgagtgattggaggaaaataacacaacgcaacaatctaacaaagagagaccttatcatcatcagcatcaccttaacccatataacattcctcttcgaaaatgccaacaacaaatttcatagagaagcagaaatggcgaaatcactcctttgttcatcaaccttaaaccctttcttctccaccactctctcctcttcgaagaagaaccaaattgcatactcgggaaacagcaagaaccagacatcgtcgtctctgttatggaaaagaagggaactgtcgcttggatttatgagcagcttagttgcgattggtctcgtgagtaatgacagaagaagacacgacgcgaatgcagcgattcttgaagctgatgacgatgaagagcttctcgagaaagtgaagcaagatcggaaaaagaggattgagagacaagctgttcttaattctgctgtcaaggaaaagggtacttcttcaattttcctctaatctttcatttatgttcctcccctgctacatgaagtaaattgaacaaattgatggaaaagtttactcttttatggaaaaatgtgtgttctttgtgttatggttcctaggctagttacattgaaccctagtctggttttgtttcatttatcttggctacatgaagtaatcagaacaaactgatggagaagttttactcttttgaggacaaatgtgtgtcctctttgtgttatggtcccatggctagttacattgaaccctagtctggttttgtttcatttatcttcattcaaggccgtatgaagtaatcagaacacactgatggaaaagttttttactcttttgaggacaaatgtgtttcctctttgtgttatggtcttcacagaatcatagttaaatggtttgttccagtgccatttacattgaaccctagtttgattttgtttcatttttcttccttcaaggccacatgaagtaattggcacatattgatggaaattttgtgaactcttttggggacaaatgtgtttcctctttacgttatggtcgacatagtaaaatggtttgttccagtgccatttacattaaaccctagtctgattttgtttcctctatcttcatccaatgctacataagtaatcagaacaaattgatgggctcttttggagacaaatatacttaggtcttcttggttctctaactaaaagtatatagtgtacagggtatttgcaggatcttgtttacaagttgagcaaggtaggacaagccattgagaacaatgatctaccagctgcaggtttggttttggggaaaggcattgataccgaatgggtcaaaaccgttaatctggctttcacaaaggtctttcttgctcattttaactttcactaaggtcaaatctattggtccaatgtagaaacaactggttaaaacatcaatattgtctctccctctctttacataaggtagacttttttttaatgtttatgttactgtttgttgaaaagtccttgtttgtgttcttggaacagttgagtacaagcccagaagagaatacagaggtggaagcattcaattcatcattggcttctcttatcacatcaggtcttgtacttgtacttgtacttaactttttcattcacaagaatcaaaattgtcattaaaacattgcagtgatctctttgaaatgtggttttgattccttttttcgcagtgaacaagaacgatatagagtcatcgaagctcgctttcgtttcatcagctggtgcatttgagaaatggactactttgacaggtcttttggaacagcttaagggactgtgataggctggctacaaattctttactctttttttgtattttccaacagatttgtcaaagagggtcttttttttctccaaataatcctttgaataatcatcattcactttcttaacttctttggttattatttacctttatacattttgttcatacttactatgcatcaatatcaacaaggttgatttttccatcgaattccaccacaccaaaaggaaccaagaaaccataccaaaacttctttggttatttatctgaaactaattcaaaaagatctgatcagtaaacctttgttctattgaatctcacattaagagaaacccttttaacttgagaaggcatacagatatagagcatcacaaaatccccgaaacaaaaccgaaccagtcataaccaagaagggggaaagctactagatgaagctagtaggtggaagtttgagtcatttggcctattactacgcactagttatgatcttttctctgatacattgaatactttattaaaaaccattacataaccaatgtaaaagcaaatatttaaacgttaaacagtccaattcagctttgaaaaatcctcccagaagaagaagactagtcaatattggttgcgatggccttgtagaggcattattatctgttagataatattaaacattaatgagaaagtagaaatgcttctgtataaataccttcattacttgtgtcttatttcatcaccttcaccttcaacatcaaacatcacatttcttcctcttttctctcttttttctcagtcttcaaagagtttcttagtaacccaaatcaatg

SEQ ID NO: 17362 - DNA, 3003 bp, Unknown; identical to SEQ ID NO: 17361
  misc_feature (1)..( 3003): 2750-1469P.txt file - cDNA_ID_1808696; gDNA_ID_1620751; Annot_ID_166807

SEQ ID NO: 17363 - DNA, 3000 bp, Unknown
  misc_feature (1)..( 3000): 2750-1469P.txt file - cDNA_ID_1808696; gDNA_ID_2926183; Annot_ID_140668
cccttacttaatcgtgaggcccaacatttaacctagtctgaatgtttcatttgctaaaaactttgtttgttgctactgggcccaaaggtttgaaaggccagttcaattgaaatatcgcataatcaaattgaatttaatctgcaagaccaattcgttaatcaataagagcatactaggatttcaaaccaaatgattcagttcaacgatgttttaaattatcatctagaaattataaaatgtgtaataaagcattttttttttttttaaacttgacaaaatctctaaatgtaaagtctaatataaaccttaaaatctaaaaactaattatgcttgtttttgagaaatttttaaaaaattgtgaaaaagaaaagtaatgaaaaaaatattgagagtgagtgattggaggaaaataacacaacgcaacaatctaacaaagagagaccttatcatcatcagcatcaccttaacccatataacattcctcttcgaaaatgccaacaacaaatttcatagagaagcagaaatggcgaaatcactcctttgttcatcaaccttaaaccctttcttctccaccactctctcctcttcgaagaagaaccaaattgcatactcgggaaacagcaagaaccagacatcgtcgtctctgttatggaaaagaagggaactgtcgcttggatttatgagcagcttagttgcgattggtctcgtgagtaatgacagaagaagacacgacgcgaatgcagcgattcttgaagctgatgacgatgaagagcttctcgagaaagtgaagcaagatcggaaaaagaggattgagagacaagctgttcttaattctgctgtcaaggaaaagggtacttcttcaattttcctctaatctttcatttatgttcctcccctgctacatgaagtaaattgaacaaattgatggaaaagtttactcttttatggaaaaatgtgtgttctttgtgttatggttcctaggctagttacattgaaccctagtctggttttgtttcatttatcttggctacatgaagtaatcagaacaaactgatggagaagttttactcttttgaggacaaatgtgtgtcctctttgtgttatggtcccatggctagttacattgaaccctagtctggttttgtttcatttatcttcattcaaggccgtatgaagtaatcagaacacactgatggaaaagttttttactcttttgaggacaaatgtgtttcctctttgtgttatggtcttcacagaatcatagttaaatggtttgttccagtgccatttacattgaaccctagtttgattttgtttcatttttcttccttcaaggccacatgaagtaattggcacatattgatggaaattttgtgaactcttttggggacaaatgtgtttcctctttacgttatggtcgacatagtaaaatggtttgttccagtgccatttacattaaaccctagtctgattttgtttcctctatcttcatccaatgctacataagtaatcagaacaaattgatgggctcttttggagacaaatatacttaggtcttcttggttctctaactaaaagtatatagtgtacagggtatttgcaggatcttgtttacaagttgagcaaggtaggacaagccattgagaacaatgatctaccagctgcaggtttggttttggggaaaggcattgataccgaatgggtcaaaaccgttaatctggctttcacaaaggtctttcttgctcattttaactttcactaaggtcaaatctattggtccaatgtagaaacaactggttaaaacatcaatattgtctctccctctctttacataaggtagacttttttttaatgtttatgttactgtttgttgaaaagtccttgtttgtgttcttggaacagttgagtacaagcccagaagagaatacagaggtggaagcattcaattcatcattggcttctcttatcacatcaggtcttgtacttgtacttgtacttaactttttcattcacaagaatcaaaattgtcattaaaacattgcagtgatctctttgaaatgtggttttgattccttttttcgcagtgaacaagaacgatatagagtcatcgaagctcgctttcgtttcatcagctggtgcatttgagaaatggactactttgacaggtcttttggaacagcttaagggactgtgataggctggctacaaattctttactctttttttgtattttccaacagatttgtcaaagagggtcttttttttctccaaataatcctttgaataatcatcattcactttcttaacttctttggttattatttacctttatacattttgttcatacttactatgcatcaatatcaacaaggttgatttttccatcgaattccaccacaccaaaaggaaccaagaaaccataccaaaacttctttggttatttatctgaaactaattcaaaaagatctgatcagtaaacctttgttctattgaatctcacattaagagaaacccttttaacttgagaaggcatacagatatagagcatcacaaaatccccgaaacaaaaccgaaccagtcataaccaagaagggggaaagctactagatgaagctagtaggtggaagtttgagtcatttggcctattactacgcactagttatgatcttttctctgatacattgaatactttattaaaaaccattacataaccaatgtaaaagcaaatatttaaacgttaaacagtccaattcagctttgaaaaatcctcccagaagaagaagactagtcaatattggttgcgatggccttgtagaggcattattatctgttagataatattaaacattaatgagaaagtagaaatgcttctgtataaataccttcattacttgtgtcttatttcatcaccttcaccttcaacatcaaacatcacatttcttcctcttttctctcttttttctcagtcttcaaagagtttcttagtaacccaaatcaatg

SEQ ID NO: 17364 - DNA, 3000 bp, Unknown; identical to SEQ ID NO: 17363
  misc_feature (1)..( 3000): 2750-1469P.txt file - cDNA_ID_1808696; gDNA_ID_2926183; Annot_ID_200429

SEQ ID NO: 17365 - DNA, 3000 bp, Unknown; identical to SEQ ID NO: 3594
  misc_feature (1)..( 3000): 2750-1469P.txt file - cDNA_ID_1808704; gDNA_ID_1620652; Annot_ID_47767

SEQ ID NO: 17366 - DNA, 3000 bp, Unknown; identical to SEQ ID NO: 3594
  misc_feature (1)..( 3000): 2750-1469P.txt file - cDNA_ID_1808704; gDNA_ID_2926215; Annot_ID_142180

SEQ ID NO: 17367 - DNA, 3000 bp, Unknown; identical to SEQ ID NO: 4073
  misc_feature (1)..( 3000): 2750-1469P.txt file - cDNA_ID_1808716; gDNA_ID_1620682; Annot_ID_48362

SEQ ID NO: 17368 - DNA, 3000 bp, Unknown; identical to SEQ ID NO: 4073
  misc_feature (1)..( 3000): 2750-1469P.txt file - cDNA_ID_1808716; gDNA_ID_1620682; Annot_ID_164487

SEQ ID NO: 17369 - DNA, 3000 bp, Unknown; identical to SEQ ID NO: 4073
  misc_feature (1)..( 3000): 2750-1469P.txt file - cDNA_ID_1808716; gDNA_ID_2926181; Annot_ID_140560

SEQ ID NO: 17370 - DNA, 3000 bp, Unknown; identical to SEQ ID NO: 4073
  misc_feature (1)..( 3000): 2750-1469P.txt file - cDNA_ID_1808716; gDNA_ID_2926181; Annot_ID_200264

SEQ ID NO: 17371 - DNA, 1542 bp, Unknown; identical to SEQ ID NO: 11194
  misc_feature (1)..( 1542): 2750-1469P.txt file - cDNA_ID_1808720; gDNA_ID_2214483; Annot_ID_133299

SEQ ID NO: 17372 - DNA, 1542 bp, Unknown; identical to SEQ ID NO: 11194
  misc_feature (1)..( 1542): 2750-1469P.txt file - cDNA_ID_1808720; gDNA_ID_2214483; Annot_ID_183415

SEQ ID NO: 17373 - DNA, 3003 bp, Unknown
  misc_feature (1)..( 3003): 2750-1469P.txt file - cDNA_ID_1808734; gDNA_ID_1620621; Annot_ID_47030
attaatgagataatttaaactcaccgacgcggtttcgtcttttcttcaagtgaaaaagtgaaaaccgatgttaaggatcatgcattcaaaagagatgtatagaaatataccggatatgttgtatccatagttcacgtagattcataactactatataagttgttaaggatcaatcatgatatctgactagatcaatcacatatcaatcactccacgatatcttcttctatttatgtaaagtagattatgtaattagatctatcacatatattcctccttttgtactcaataaagattctctctttgaatataaacatttataaaaatctttttttttacaatatgtaacagtttattttattaaagtttttggttatttattatcattaaatttaataattcacatagattcatatctatataagtctcatcttaaaataatactaaaatttattttgtttacttacaattacgataggaatcaaacgaaaagatcatttttacatgaaaaaaaaactgtaaataacgtgaagaagagaagaaatataaaatcaacgtaataatgatcgagtgtttttaacaataccctttgttggaaggtgtttaaacttttgttttctttcttttgaattcttttcaagattctattaaatcatgtggatgtatatatgtgcttcagttcagagacagactttgtactaaatcaaggtaaaatatgtaattatgcggcataatatgccttacttgcttgtaagttataacatatggattccttttgtgcttaaatgcatatgtttgcttgtcatatgaggcatattactacacttccttgctaatcttttttgagtttccttaattctctttcatgttcattgtgcttttgtcctgtcatgtattagctagctatgtgttcttgttattcattcttgctaaaattacgaacacaatttagtaagaagcgttgttgctctttcttccaattcccggcagcttacttccaaactctccctttttggctaatggaatctctacgatcaaattgcaaaactctcatcaatgtgagcgacccggagaaccaaattgatttctttccaagtagatcaaacatattagaccatagtaacaaatgattgacataatgttcaatctttcagagcataaactgtttcggatgctgcaacagagaaaggcgtttagttgtggaagtcgatgagccatcaaagggactcaaaatccaaggaaagatagtgaagaaagatagtgcttcatcagatgacttctggagcacaagtacgtgtgatatggaccacaatataacgattcagtcccaatcttcaaacccgccttttgatccccaatgcagcacaagcaactctaccgaatttgtaaaccatggtaacttttgaatgttctaacttctaaggcctaggttgttttggatgccaaaaacttatgttatgaagcaagcagtatttattactcattcagttattctatacactaaaagatacactactacttattcatttccttccataaaaggacttattttgtggaaccacacgagacaacaatggcgtgaatgcttaaccagacaacaatgtctagttccagaacctgcaataaggtgacaaccacaaacagttacgaatattgaacgaactatttttatgtttatataggattggtctactgaattcgtcaatgttaaaatgaaactttgaattcatatgatttcagctggaactcgacgtatgatagcttattgagcacaaacaagctttttcctcaaccaatacctcttaaggtgatttgatttggttaattagttgttttctgctaatcataactcttaattttaattaacttacagcagaagattctttatcccccttagaacattttcatatcaggatttgaatctagtatatatcattgttgctaggaaagttttttttaaattgatgatgatattggtacaggagatggtgcatttccttgttgatgtttgggaggaagaaggcttgtacatatgattcattaaaaaaatatttttatactatataaagaaagcagaaaaacacagtttaattgcttttttcaagttccatatcatttttagtgtatatttattgcccttttataaatgaaattaggaaatttggatcaccttatggtcaatttctttatttttttagttataccacatttatactactgatgatgaaaatcgattttttgtatcgtgaacacttattaactggttttatcttgaataataaaacttccatagttattccgttattgttaggtcattgtaaaaaatcatcagcaattagtcattaaatatactatcaaagcttgtcagtcatttctcatcaattctagcaaaattattcgatatatccaaatccaaatgtcttggtttggtcatgactcatgaccgtggaaataagttcaagaatgcaaaaagtaacttatttgtgggacagaatcaaattctttgatccagttacttacgtctttccgtagccaatcaaattgaaatattttctttaggggtattcgattatggtggtcctgaagcctataacaattgttttccgataagatttgatatatataaataagggaacaatccccaaaaatgatatctagttaagatagtcgtagaatttacagaaaaggctacttatgtttttggcctgataatgcaaatactttcaaaatgttttatttgctaactagcttttagtttcgttctcgtatctaaagttagagattaacttactattcttgtattacgataacgttttgaatgaacatgtaatgatgcaagggtgtaaccaaaaatgataaaactttggggtcaatttgataatattgactaatagtgtggggcttgacaagaaccggaaactccatgatatttttgcagtctaaatatcttttcatctctcttctcttcctccactgaaatattccccacaagaactaacaatg

SEQ ID NO: 17374 - DNA, 3000 bp, Unknown; identical to SEQ ID NO: 4132
  misc_feature (1)..( 3000): 2750-1469P.txt file - cDNA_ID_1808734; gDNA_ID_1620686; Annot_ID_48448

SEQ ID NO: 17375 - DNA, 3000 bp, Unknown; identical to SEQ ID NO: 4132
  misc_feature (1)..( 3000): 2750-1469P.txt file - cDNA_ID_1808734; gDNA_ID_1620686; Annot_ID_164605

SEQ ID NO: 17376 - DNA, 3003 bp, Unknown; identical to SEQ ID NO: 17373
  misc_feature (1)..( 3003): 2750-1469P.txt file - cDNA_ID_1808734; gDNA_ID_1620621; Annot_ID_162302

SEQ ID NO: 17377 - DNA, 3000 bp, Unknown; identical to SEQ ID NO: 4132
  misc_feature (1)..( 3000): 2750-1469P.txt file - cDNA_ID_1808734; gDNA_ID_2926202; Annot_ID_141543

SEQ ID NO: 17378 - DNA, 3000 bp, Unknown; identical to SEQ ID NO: 4132
  misc_feature (1)..( 3000): 2750-1469P.txt file - cDNA_ID_1808734; gDNA_ID_2926202; Annot_ID_201910

SEQ ID NO: 17379 - DNA, 3003 bp, Unknown
  misc_feature (1)..( 3003): 2750-1469P.txt file - cDNA_ID_1808738; gDNA_ID_2214573; Annot_ID_135105
tatgtgtatctctatcatgacgaatcaatccagatctctccgtccaccggaaaaattgaagagcatgctcaagtttcttagcaccgtgcaatacattatagactaaagaatgatcccattcaggtacaagatctcggattgagttctgtaaacgagtcgtccaagcacgattatccatcattctacatattgtatcctctagcttttcatggttttgacgcttacctcgttggaacctctctctgagtggtctcgtctctgtagaagtcagattcttcttcgtctcggattttgcatctggagattgggtttctgggtttgcgtttgctggagtttgggtttcttcgatggtgctgaatagacgagggagtgagaagagagatgagtttgatgatctgggaagcgagagataaaccctagcttttgattggtagcgtttagatctggaaatgaaagccattacaggaaatggaacctttgtctctgagtttttctgaaaattttcaattcgacatggaaggacaaaggaagcaagagtttttagtgatgagtagggttttagtttagggaagaaatggagtcctggatccaaatcttgttccgggtcgggtattttctgaacttgaacccggcctgttaagtgttactatccagcccggtttcgtgcataacagatgggcctagaatcgtatctagtgttgaccaacatgtaatttccacactgttatctataatttatttgtttttattaatgtttaaagttcttatgaggaataacaaacatgtataaagtaatttgaaatgtaaccttaaacaaatgttggatggtgataggagatgcctaagctgacatattttgtgggacttcaagatagtaatctatagtcttacctttgatcaactatgttatcatatcaatagagacaaaattgtttcgataactggattatgtgaatttgatgtacatctttatttggaaataaaaatatatatcttctagcaagggccacacttatccttcgctgatctcgactcataagtcataatgatcatcaaaaatcaagaaacaatgatcattactttcggtctacgacttgtctttttttctttccctacctatatatcaaatgtggtcgttgtgattgtggtaatggtgttttatggatttagttgagtatccgggcatagcagtgtcgttactgttttttaaatatctatttttcgattgcgattctttcaactcttcaagcacaacacgctttaaggatctcttcaacaggcgggtcatcaccggcttctttgtcctgaaatccgcaaacaaattgttgaaaacaacaatgtgtttgaaaagatatatcggtatactaggttcccaaatatgaggctagtttcacaatcaagattagacgaaagagattaccttgcgtatataagagatgttatctttcccagggccagcaactaagattccgccttgttgcctgcacaaggtccgtgacaatagttgttaagaaaaacggaaagtaatctcatcgatctctaaccagaaggaatgaatgattcatatactcttaaacttaccagccgcctctttcaactgtatctttcataaacgagagtttccagtcttggcggtatccttccatgtaagactctagtatcttcatagcagcctataataatgccacagaagctactgagagtctgagaccacaaaagcagaacattttggttacctaattataatatgctaagtagaagtcactctactttgggtgtaaatgtaacagaaacccctgaaacgaactcaagcgcctcgtatgatgcgtggtttggatccgcatagacctctgtattgagagaaagttgattacagataattagatcatctcataaaaggaactactcaccaggcttttttagtaatcaagagaaaacatacctcctttaaacttagtctgttccacaaaagtattagcctgcatacatagatggtcataacgtgagaagcagcagcttaaaactgcttacgcttacaaaaattgcgtattcaaaatgttgtttacctgatcgatgcttcccggtccgatcagaacaagagcaacaccagatgcatccatcacatcctaaacaaaaatctcaaaggtatcactcaatgacttcaattgtgtataaatggccaatctttttaaaccaaagatcattctgttaccttcttttctgcaagataagctgctcgtttccgacagagcacacatctgaaaacataacaagcaatcttagatagttacacatagtcataaaccagaatcatcaaatataatgagaaaattacccaaaatgacgagcaaatgcaacaacggccttcctatctttccataaatcagaaatcggaatctcatttcctctcaaatccaagactttcactgtatctagcgaatcagctgtacctttccctattccagctcctgtggagaatcaatataatctagtaagtaatctagaatctccgtattcaatataatatagaaagagaagacacttaagctcaccggaagaagctccggtaatggccgacacgaccacggcgctacgccggagagagacactacgaaagtgagatttgaccgaataaccaggaagtactgtccctaatccatgaatcgtcttcagcttcggctgcagagtaatggacgtgatcgtcgacgacgacgagagagcaatcgccattgttgcttccagagaaagctgaaaataataataatcccaatttaaaatcgaaatcgattttctcataccgttggttaatctcgtggagttgggttattacacgtgtcagatgatgtaaccatgatctcagagaaaaagtcacatgccacgtcagttaactttagggcaaaatgggaaaagaatctaaagagcatatgttcgtgcacgttcttgtttagggtaagctcaaagctcaagccgcttctatctctctacatttctctttctgcaatg

SEQ ID NO: 17380 - DNA, 3003 bp, Unknown; identical to SEQ ID NO: 17379
  misc_feature (1)..( 3003): 2750-1469P.txt file - cDNA_ID_1808738; gDNA_ID_2214573; Annot_ID_186241

SEQ ID NO: 17381 - DNA, 3000 bp, Unknown; identical to SEQ ID NO: 11146
  misc_feature (1)..( 3000): 2750-1469P.txt file - cDNA_ID_1808741; gDNA_ID_2214480; Annot_ID_133239

SEQ ID NO: 17382 - DNA, 3000 bp, Unknown; identical to SEQ ID NO: 11146
  misc_feature (1)..( 3000): 2750-1469P.txt file - cDNA_ID_1808741; gDNA_ID_2214480; Annot_ID_183308

SEQ ID NO: 17383 - DNA, 3003 bp, Unknown
  misc_feature (1)..( 3003): 2750-1469P.txt file - cDNA_ID_1808749; gDNA_ID_1621175; Annot_ID_57320
gactttgtttgtaaatgtccgaatattttttcaagatatttatgtatttggtacttcaaatctagtacccaagccttagatcattaaaatttagaactcagtatataactaatgccattttttatttttggattcgatatttttttttttagtgtaatattaaattatatttaaaaaaacaaatatacgtttttataatttgtgcttcgtatgtttgaaaaagtaagctctaaagatttctgatgatttttcgaaaatgtttaaagaaaatgtttaaacaagctaagagtcgaggttaactagtcatgggagtgaatccagttttaaataggcatcgtcatactgcttgtcgcctaataatcgtattgctgaaatcagatttcgaatttgtttatcaacccatatggtgataccctttatattatgatcccacgcacctcaaaaatttcggcgttggattcatgtcactcctagctagcaacctcagggctcgcagtatcccattcgtcttaattagttaagattttttttaaaaatttattttgttcagttattattcatttcattcgaacgattaaacaaagattattatggtctcgtgatttatatgttgacccttctaatattctaaatttaaaaataagaaaaaagaggaaaattgaggcaaaacacatgttgccgagtcattatcaactaggggtgcataatgatggaacaaagcacaaatcttttaacgcaaactaactacaaccttcttttggggtccccatccccgaccctaatgttttggaattaataaaactacaatcacttaccaaaaaataaaagttcaaggccactataatttctcatatgaacctacatttataaataaaatctggtttcatattaatttcacacaccaagttactttctattattaactgttataatggaccatgaaatcatttgcatatgaactgcaatgatacataatccactttgttttgtgggagacatttaccagatttcggtaaattggtattcccccttttatgtgattggtcattgatcattgttagtggccagacatttgaactcccgtttttttgtctataagaattcggaaacatatagtatcctttgaaaacggagaaacaaataacaatgtggacaaactagatataatttcaacacaagactatgggaatgattttacccactaattataatccgatcacaaggtttcaacgaactagttttccagatatcaaccaaatttactttggaattaaactaacttaaaactaattggttgttcgtaaatggtgctttttttttttgcggatgttagtaaagggttttatgtattttatattattagttatctgttttcagtgttatgttgtctcatccataaagtttatatgttttttctttgctctataacttatatatatatatgagtttacagttatatttatacatttcagatacttgatcggcattttttttggtaaaaaatatatgcatgaaaaactcaagtgtttcttttttaaggaatttttaaatggtgattatatgaatataatcatatgtatatccgtatatatatgtagccagatagttaattatttgggggatatttgaattattaatgttataatattctttcttttgactcgtctggttaaattaaagaacaaaaaaaacacatacttttactgttttaaaaggttaaattaacataatttattgattacaagtgtcaagtccatgacattgcatgtaggttcgagacttcagagataacggaagagatcgataattgtgatcgtaacatccagatatgtatgtttaattttcatttagatgtggatcagagaagataagtcaaactgtcttcataatttaagacaacctcttttaatattttcccaaaacatgttttatgtaactactttgcttatgtgattgcctgaggatactattattctctgtctttattctcttcacaccacatttaaatagtttaagagcatagaaattaattattttcaaaaaggtgattatatgcatgcaaaatagcacaccatttatgtttatattttcaaattatttaatacatttcaatatttcataagtgtgattttttttttttttgtcaatttcataagtgtgatttgtcatttgtattaaacaattgtatcgcgcagtacaaataaacagtgggagaggtgaaaatgcagttataaaactgtccaataatttactaacacatttaaatatctaaaaagagtgtttcaaaaaaaattcttttgaaataagaaaagtgatagatatttttacgctttcgtctgaaaataaaacaataatagtttattagaaaaatgttatcaccgaaaattattctagtgccactcgctcggatcgaaattcgaaagttatattctttctctttacctaatataaaaatcacaagaaaaatcaatccgaatatatctatcaacatagtatatgcccttacatattgtttctgacttttctctatccgaatttctcgcttcatggtttttttttaacatattctcatttaattttcattactattatataactaaaagatggaaataaaataaagtgtctttgagaatcgaacgtccatatcagtaagatagtttgtgtgaaggtaaaatctaaaagatttaagttccaaaaacagaaaataatatattacgctaaaaaagaagaaaataattaaatacaaaacagaaaaaaataatatacgacagacacgtgtcacgaagataccctacgctatagacacagctctgttttctcttttctatgcctcaaggctctcttaacttcactgtctcctcttcggataatcctatccttctcttcctataaatacctctccactcttcctcttcctccaccactacaaccaccgcaacaaccaccaaaaaccctctcaaagaaatttcttttttttcttactttcttggtttgtcaaatatg

SEQ ID NO: 17384 - DNA, 3000 bp, Unknown; identical to SEQ ID NO: 4556
  misc_feature (1)..( 3000): 2750-1469P.txt file - cDNA_ID_1808757; gDNA_ID_1620714; Annot_ID_49080

SEQ ID NO: 17385 - DNA, 3000 bp, Unknown; identical to SEQ ID NO: 4556
  misc_feature (1)..( 3000): 2750-1469P.txt file - cDNA_ID_1808757; gDNA_ID_2926217; Annot_ID_142296

SEQ ID NO: 17386 - DNA, 3000 bp, Unknown; identical to SEQ ID NO: 10404
  misc_feature (1)..( 3000): 2750-1469P.txt file - cDNA_ID_1808761; gDNA_ID_2213647; Annot_ID_132414

SEQ ID NO: 17387 - DNA, 3000 bp, Unknown; identical to SEQ ID NO: 10404
  misc_feature (1)..( 3000): 2750-1469P.txt file - cDNA_ID_1808761; gDNA_ID_2213647; Annot_ID_181488

SEQ ID NO: 17388 - DNA, 3003 bp, Unknown
  misc_feature (1)..( 3003): 2750-1469P.txt file - cDNA_ID_1808768; gDNA_ID_1620818; Annot_ID_50656
ttactcaccaccaccaccggttcactcaccgccgcctccggtttattcatcaccaccaccaccacatgtctactctccacctccaccagttgcttctcctccaccgccatcaccaccaccaccagttcactctcctccaccaccaccggttttctctccaccaccaccagttttctctccaccaccaccatcaccagtatactcaccaccgcctccaagccactcaccaccaccaccagtatattctccgcctccaccaactttctcaccaccaccaacacataatacaaaccaaccaccaatgggagctccaacaccgactcaagcaccaacaccatcctctgaaacaacccaagtgccaactccatcatcagaatcagatcaatcacaaattttgtcaccagttcaagctccaacaccggttcaatcctcaaccccatcctctgaaccaacccaagtgccaactccatcatcatcagaatcatatcaagcaccaaatttgtcaccagttcaagctccaacaccggttcaagccccaaccacatcctctgaaacatctcaagtaccaactccatcatcagaatcaaaccagtcaccaagtcaagctccaacaccaattcttgaaccggttcatgccccaacaccaaactctaaaccggtccaatcaccaacaccatcaagcgaaccggtctcatcaccagaacaatcagaagaagttgaagcaccagaaccaacacccgtcaatccatcatcagtaccatcatcttctccttccactgacacatctattccaccaccggaaaacaacgacgatgatgatgatggggatttcgtcctaccaccacacattggattccaatatgcatcgccaccaccaccaatgttccaaggatattaaaaccaatgtagtagtgacagtgttacccatttttaacatttctgtccattttttccatgtgaattatttgtatcaaacgaaaaagatattacaaagatgaaaaattaaaatgccaataattatatagtagattatctttcagcagatttttttttgttgaaattgaagtattgaactataacacgatgcgatttgttttttcggggtaaagaagttatcatttgttttggccattttatgacttctattctattatttgagaagcaaaacataaatatctatatttgtaaaatttaatatcttactagctacatatagtttaatattatacacatttaatctttcataactatgtcatgaattatttgacatttttcataagtcatgataaataaaattatgtatgaaataattgaattagggtttcatgttccaccagatgattgaacttgttctttattcggatagaattatgaaatttttatcttctattaaaaaatatattaacaaaattagatttaacatatattgatatctcattaatgtacttaacatgtgttaacaattttaaatttttttactttatataataaaattagaattttattaaaattatataatatctaaaatttgtactaaataataattcttgctgaattataatctagtttttttttttgatagcataaagattataatccgttaactttaaaaaaaaagcaagaaagggaaataaataaattattatatcctttaaagaggacaaaaatattaattatattgcgaaaaaaggagataaaaattaggtggaaaaggggaagatggtggggacgataagtttttaattagctaaccaaaaaacaaaaacacgaaacgagtcaactcaccggttccattacgagtcaaggagaaacacacattgacacgctcaagcttttttttttcaaggtcaagttggtttttttttttctttcttaaaaatatttatgttgggtcaggcttaaaccagagagagagtgtgtgtggtcgagccatttgaccaaaagcaaaaacttaaaactggtttcagatctgaagtaaaagggttttgcttcggattctccggcgtcgtttaaatgatctctgacccatcttccttggcttaataattctggtccctccttttatctctttttactgttgatttatctgaatatgccacgctctttcttccacatgtttattctctcttcctttcttcaacacaagcgtctggtaattgatctcttctctctcaaattgtgtttcgttctttttggttctgtatttggtttctgacaaaattgaggaaactggtgttgggtttgagtctagaactgccaaagatgtgattttgttttttgggtactgaaaattgagtgagatgaagtgataaagtgtcttttttttttggtaaattattcgaatggaacttgggatcggaactctgtttctttgttagggttggttgaaatctgaatctagtcttgatttttgtggtgaaatgagaggtgagtcagtgaaattttgaaatgtctttgattcaatttgacatcagaatactgctcaggttgtgtcttttgtcagatttattgagaattatcagcttccgactgtagatttgactttggtctcagtttaaagactatgagtggactttatagatctagaagcatgcgttgttttgattataagaaataaaaagagagtttttgctttaagctgtttgactaataacttgacttgggattatgatttaaccagcaaaactctcttttctccagccactgtgttttatgaatgtttgttgattccaaataatagtatgtgttgatcaaagtgaagtcatttggtcattacttggttctgagctttcagttgtttttgcacttacaatacctgatggtcatgtttgcatgtaggactaaggaaagccaacaacaaaatctggtttcaagacggttggcaggagtttgtcaaccgtttctccattcggattggtttcagatacaaagttacagtctacattttcaatttatcctccacactctgagatcaaccaccattctagtagtgaagctcttatg

SEQ ID NO: 17389 - DNA, 3003 bp, Unknown; identical to SEQ ID NO: 17388
  misc_feature (1)..( 3003): 2750-1469P.txt file - cDNA_ID_1808768; gDNA_ID_1620818; Annot_ID_169339

SEQ ID NO: 17390 - DNA, 3000 bp, Unknown; identical to SEQ ID NO: 4249
  misc_feature (1)..( 3000): 2750-1469P.txt file - cDNA_ID_1808775; gDNA_ID_1620692; Annot_ID_48620

SEQ ID NO: 17391 - DNA, 3000 bp, Unknown; identical to SEQ ID NO: 4249
  misc_feature (1)..( 3000): 2750-1469P.txt file - cDNA_ID_1808775; gDNA_ID_1620692; Annot_ID_164833

SEQ ID NO: 17392 - DNA, 3000 bp, Unknown; identical to SEQ ID NO: 4249
  misc_feature (1)..( 3000): 2750-1469P.txt file - cDNA_ID_1808775; gDNA_ID_2926202; Annot_ID_141562

SEQ ID NO: 17393 - DNA, 3000 bp, Unknown; identical to SEQ ID NO: 4249
  misc_feature (1)..( 3000): 2750-1469P.txt file - cDNA_ID_1808775; gDNA_ID_2926202; Annot_ID_201931

SEQ ID NO: 17394 - DNA, 3000 bp, Unknown; identical to SEQ ID NO: 7397
  misc_feature (1)..( 3000): 2750-1469P.txt file - cDNA_ID_1808779; gDNA_ID_1621143; Annot_ID_56688

SEQ ID NO: 17395 - DNA, 3000 bp, Unknown; identical to SEQ ID NO: 7397
  misc_feature (1)..( 3000): 2750-1469P.txt file - cDNA_ID_1808779; gDNA_ID_1621143; Annot_ID_172923

SEQ ID NO: 17396 - DNA, 3003 bp, Unknown
  misc_feature (1)..( 3003): 2750-1469P.txt file - cDNA_ID_1808783; gDNA_ID_2214700; Annot_ID_136839
gttccaattgttgttttgtttttcaatctggtttcgataagaatgtgtttgcttagatgtgtcgaaaaaagttttgttttttttaaatgtacggagattgtttccccaatttcaatttctttaatgctttttttgattaaaatatgaaaatggtatcaccaggaagaagaagtagaatctgactacttcaaaatgttgactttgatgattttaacgatgacccttttgaaaaaatgttttctttaatgatcctggaaccataagattgggaaattttcttgctttgccaaaactctgctttctataaactgagatcatgttttgggaagcttatactatgttttgtggaatgtgcagattcatggtttcaggtggcgttcgttttgaccaccggtataaacagcgcgtatgtgttgggatattcaggaacaattatggttcctttaggttggattggtggtgtggttggtcttcttattgctactgcaatctctctttatgcaaacactctaatagctaagcttcatgagtttggtggcagaagacacattcgctatagagaccttgctggattcatttacggtaaataaaagaccaaaccagctctcttaatctcttctctgttgttaccttcattggaatgatctctctttttatcaggtaggaaggcttatcatcttacatggggattgcaatatgttaatcttttcatgattaattgtggattcattatcctagctggttccgccttaaaggtagtaaaacattttcttctcttgattcttgatttcgttagacgagttagttaattttggttgtgtgttctgtttctgcaggctgtttatgtgcttttcagggatgatcataccatgaaactacctcattttatagccattgctggtttgatttgtgcgattttcgctattgggattcctcatttatcggctcttggggtctggcttggagtttcgaccttcctcagtctcatctatattgttgtggcaatcgtgctatcggttagagatggtataactaatcaaatgatcatcaagattcaacattactaatgagtttaactactgcaaaaatctaattcttgctttgttttgtttgtttctaggagtaaaaacaccttcaagagattacgagatacaaggatcatcattgagcaaactttttaccatcacaggagcagccgcaaatctggttttcgcattcaacaccgggatgcttccagaaattcaggtgacttttccctagacttcaaagttcaattgtttgtttgtgtttgcttttatgtattagtgtaccttttgttcaagtaaaacctgcatcttaaacaaagtttgtttgttaatcatattgacactataatttccacaatgttaggcaacagtgaggcaaccagttgttaaaaacatgatgaaggctctatactttcaattcacagcgggtgttttaccgatgtacgcagttacattcatcggatattgggcttatggatcctcaacctcgacctatctactaaacagtgttaatggcccactctgggtcaaagcccttgctaacgtctctgctatccttcaatctgttatctctttgcacgtaagtttcttagcgccaagtctacgcttttttaacaaagactgtcgtctctaactatatgtctgactcaattctttgttgtagatatttgcgagtccaacatatgagtacatggacacaaagtatgggatcaaaggaaacccatttgcgataaagaacctgctgtttaggatcatggcgagaggcgggtacatagcggtaagcacgcttatctcagcgctgttgccgttcctcggtgacttcatgagcctaactggtgcagtgagcacattccctctcacattcattctagccaaccacatgtactataaggcaaagaacaataagctgaatgctatgcaaaagctatggcattggcttaacgttgtcttctttagtttgatgtctgttgctgcagccattgcagctgtcagactcatcgccgttgattccaaaaatttccatgtttttgcagatttgtaattcattatattatatagtcaattgtgtatcctttattcttaggcaggtttatttctcctgtaagcttgtattctctctctatttgtcttaccattagagcctaaataaataaatcaagttctaaaatctaaaaagcatataaaagaccactttcatcataatcattctgaaaatttaccaacaaagaatactaagttgcatgattaaagtctctattagaaatgtaaatcatagtattagagaagaacataaaaacacctaacttaaaaaaaccttaatttagtgagatagagaagagaagaaacagaattgttgttggtttaacaaaaacctaatctttcaatgattagctgtttaatttgaaattataacaataatttagacaggccaaagtggaaccccactgtctccaccaaagctctagataaaaaaaaaaaaacgaaagcgttagatattttttatcaatcgtgctccgtaatcattacctttcttcttcatcttcatcttcacgcagcgacttctttgattctctctttttattctcagctccaatttcaacctgcatttctctcttctcaattttgggtttctttttttgatatctcatttgatcagatcgacgaagaggtaaccattttgccgtttgttagttcttaacgattttattctgttaaaaatcagatttttttttgcaatgcttgtagaaaaagattcgatttttgtgtactgattgaatcaaaatatgtggttatggatccatggattgatttgtttgaactgatgcaaatggctaatgtgaaaagtcaagaatgtgttaatgtagttttttttgttaaacctctttgtgttgttgggttttgaaatgttgttgttacagaggaagaaggtttgagctgagagatctttggaggtagaaagaagatctcaaaaacgatg

SEQ ID NO: 17397 - DNA, 3003 bp, Unknown; identical to SEQ ID NO: 17396
  misc_feature (1)..( 3003): 2750-1469P.txt file - cDNA_ID_1808783; gDNA_ID_2214700; Annot_ID_189625

SEQ ID NO: 17398 - DNA, 3000 bp, Unknown; identical to SEQ ID NO: 12401
  misc_feature (1)..( 3000): 2750-1469P.txt file - cDNA_ID_1808795; gDNA_ID_2214547; Annot_ID_134607

SEQ ID NO: 17399 - DNA, 3000 bp, Unknown; identical to SEQ ID NO: 12401
  misc_feature (1)..( 3000): 2750-1469P.txt file - cDNA_ID_1808795; gDNA_ID_2214547; Annot_ID_185465

SEQ ID NO: 17400 - DNA, 3000 bp, Unknown; identical to SEQ ID NO: 5248
  misc_feature (1)..( 3000): 2750-1469P.txt file - cDNA_ID_1808799; gDNA_ID_1620775; Annot_ID_50262

SEQ ID NO: 17401 - DNA, 3000 bp, Unknown; identical to SEQ ID NO: 5248
  misc_feature (1)..( 3000): 2750-1469P.txt file - cDNA_ID_1808799; gDNA_ID_1620775; Annot_ID_167671

SEQ ID NO: 17402 - DNA, 3000 bp, Unknown; identical to SEQ ID NO: 5248
  misc_feature (1)..( 3000): 2750-1469P.txt file - cDNA_ID_1808799; gDNA_ID_2926205; Annot_ID_141688

SEQ ID NO: 17403 - DNA, 3000 bp, Unknown; identical to SEQ ID NO: 5248
  misc_feature (1)..( 3000): 2750-1469P.txt file - cDNA_ID_1808799; gDNA_ID_2926205; Annot_ID_202131

SEQ ID NO: 17404 - DNA, 3000 bp, Unknown; identical to SEQ ID NO: 6757
  misc_feature (1)..( 3000): 2750-1469P.txt file - cDNA_ID_1808803; gDNA_ID_1621104; Annot_ID_55951

SEQ ID NO: 17405 - DNA, 3003 bp, Unknown
  misc_feature (1)..( 3003): 2750-1469P.txt file - cDNA_ID_1808803; gDNA_ID_1620864; Annot_ID_51302
ttattgggggaagaatggaaataaatattgcggcaaaaagataatttaaagaataaaactacttatatccttttatcaattgggtaactatagttgtctacttgtctttgttgtcgtatacccctaattataggaccactcacctaggttcaaatgtcaaaacatatggactattaagttcattgttagtaagtgatatatagtaggcctaacttaatcggtggttatatagtttttaataaaacatgtgtgttttaccaaaagaggactacattttaaaaagactccaaagtgaaccccaactttttggaaatcaggaaccactccaataagagacacaatgctcatataaactcatgataatatatgtgagcatttgtctacatatcacaaacatagtcgaattaaaccatctatattcctttgtacggtctacaaaatgacacaaatttcaattatggtgataaaagaatggaacataccttcaacatcaagctcataatggcatttgtcgactaacaatagtttgcttttatcctgcttgcctctgtaaatgtgagcattaacctgatcagaaagaagtaaaaatgtgcgtacaagcaatgatagattcagagataagagtcacctctcaagaacagagttggaaagaaccgacttgtctacgtaaggaatcccaagaagcatcctcattgttggaatgactagaatttcaaactttgtgcatttctcaaacaaatcttagttgctgacaaaatcttacttgttaaatgcactcttgtatgagaaatatcacttcaaaaaatgatagacattttgtctcttcatattccattgtcttctgagtaaaaagacacgtcttaacgtgaacttggtctctcagagacattaatcaaacaagttgaatgcaaaactgcaagtaacaacaaaataaaatttgggcacaataggagaggaaaacaaacacgagcgactctgatctgtattacaaaaagactagtgtctagtgacataagatcgtcgatgatctgagatgcgacggacgtttggtatctgtacaatctctggctagggtttcttgacttgccgatcacgacaccttcagcctcgcatgggccgctataatagctcaataatggcccactactaaaaatccatatttctgttattgagtaatcaataacttaacacatgttttaaattccccgccaaagtatgatcatgagagagaacaaaaattatgaactttttaaaatggaaattgatcttcttcttctttttctggttaaaacattcaacatttgtattgtagtatatgtagtaaattttatggactaaacgaaagatagaaatatataggcaaatccaagggaaataaaaattctaaatatatatatgaaattgcatggactgccacgcagtacgataaccaaatatccaaatttatacaacaaagaaatagtattgcgtcaaaattaaaatacactcgggagtgaaagaaacaaatttaatttgatagaaagacatcataccccaaagatcatgtatgtcattttcttaacctacgtgatccgtaccgttttacagttagatgtgtcgattatttatttaacaccggaatgttaggaagtcttgatatatatttgtcataactagtataatggtatattagttgttgccttggtggtacgagtgaatagaatttttcacatataaggacgaatcaaccatatcgccattagaaaaccttatacgtccagaaacggcaatgtaacaaacaaacaaaaaaaagaattggtgatatattgtttattaaaacctctacgttggtctgaaaatagatataattgcgtgtcatgaaacaaagaaataaacgagttagataagaaataattggattagcaaggtttagaggaacaagaaatgattattcaaatggaaaagtaaatacttttgtaagaaaataaaagcttattgaaatgaagaattgtgcatgatcatttgataaagccaagtcatggactgattcttctgtttcacaggacggttcaaccaccatgcacctctttttctttgggcgtttaatgacacaaaccacatttatctttttatatccttttttgttttgaatttatttggttacaactgttatttacctcttttatcttccaatctttctcaatttctaagttttttccatactaagtattttgttcatctgaagaatctggcacctttgtacattcaagaaagttttaaatgttttcactgcaagacaaacaatactgtgtgtacaattatgatagaaaacatttatatatggagaataatatagtcatgtgatacaattatgtaccacatctatacatatagaagaaacaaaaaccaccaatttgtcactcccaacttcattcacaactcacaagttaagaaaatacacatagtttctcttacacgcattactatggaaccttctgaattcgtttccagcaaaagttattttcttatttcaaaaataagttccatttttttatgtataaaaaataaagttaattgcaataaattcgccatcttcctatcaacatatatagatttttcgacaaattcatataaggagagtctaaaattaactcacagccacatgttatttagccaatgtttttaataccagaccggtcaaaccggtggatccgtgaccttatatagtaattctagagtctttaacaaaatctcaacttatgacatcatattatatattaatcacgtatcatctatagactatatacattcatacgactctctgattcttcgtttctctccataatatctcctagtctcaactctcaaatagagagagaaaaacagaaagacagagagaggttctatatattatagataaagtacattacacaattgtacaagtggaaaaatcatcacggatctctcttcaaatatataaagaagatttgtatatcaaactctctaagcttttgttgagccatg

SEQ ID NO: 17406 - DNA, 3000 bp, Unknown; identical to SEQ ID NO: 6757
  misc_feature (1)..( 3000): 2750-1469P.txt file - cDNA_ID_1808803; gDNA_ID_1621104; Annot_ID_171528

SEQ ID NO: 17407 - DNA, 3003 bp, Unknown; identical to SEQ ID NO: 17405
  misc_feature (1)..( 3003): 2750-1469P.txt file - cDNA_ID_1808803; gDNA_ID_1620864; Annot_ID_170412

SEQ ID NO: 17408 - DNA, 3000 bp, Unknown; identical to SEQ ID NO: 6757
  misc_feature (1)..( 3000): 2750-1469P.txt file - cDNA_ID_1808803; gDNA_ID_2926184; Annot_ID_140725

SEQ ID NO: 17409 - DNA, 3000 bp, Unknown; identical to SEQ ID NO: 6757
  misc_feature (1)..( 3000): 2750-1469P.txt file - cDNA_ID_1808803; gDNA_ID_2926184; Annot_ID_200510

SEQ ID NO: 17410 - DNA, 3000 bp, Unknown; identical to SEQ ID NO: 6757
  misc_feature (1)..( 3000): 2750-1469P.txt file - cDNA_ID_1808803; gDNA_ID_2926185; Annot_ID_200524

SEQ ID NO: 17411 - DNA, 3000 bp, Unknown; identical to SEQ ID NO: 6412
  misc_feature (1)..( 3000): 2750-1469P.txt file - cDNA_ID_1808894; gDNA_ID_1621093; Annot_ID_55582

SEQ ID NO: 17412 - DNA, 3000 bp, Unknown; identical to SEQ ID NO: 6412
  misc_feature (1)..( 3000): 2750-1469P.txt file - cDNA_ID_1808894; gDNA_ID_2926160; Annot_ID_139692

SEQ ID NO: 17413 - DNA, 3003 bp, Unknown
  misc_feature (1)..( 3003): 2750-1469P.txt file - cDNA_ID_1808910; gDNA_ID_1971820; Annot_ID_58317
ttcgagatcagtcaaattcaaccgttgtttgacatattgagcacaatcagttctttaagtaaaccgattgactcgggaatacgtccttcgaatctgtttccggagacatcgatggttttgtaaatcgtgaaaacactcccaaccaactctattatcgatcctttgaccgtcatagtcactgagttataatagtttcctgagtcacgtccagcatacctactcggcataatatctacgatgtctacggctgatgacattgcactccaacccgcaaagaaatctgatcgaaggactccattgaagcggttttccgaaatgtcaaagattcgcagcttggggaagctcaaagaatctccaagagaagatattggaccatgaaactcgttagaacgaaggacaaaaatctgaagtttgggcaacattctcaaccagaatggaaacttgtcattgattatgttgtcttccacgttcagaaactcgagacgagtgcagttgatcaaagacttgggaagttctcctgataaccggttgcgaccaacgtcaagtgatctcaagtgatcactgatagattcctctggaaactcaccggataagttgttattccgaagatgcaaaaccgaaagagtagtattaaacttctcgaaacaccgaggaatggagccgttgaagttgttgttggataaaacaagtgtatcaagagaaaccaatttgcatatagtcttaggaatctctcccgaaaaccgattatcagagcctaaaaagatcgttgtcgagtttggtaacaaaggaaacggatcttggaatgtgtttgaacttatgtcaagcataagtaattctccacatctttgaataacatctgctggtccttcaaagccactgaaagaattttgagaaatgttaacatactgcaactccggtagactccacaaccattgtggtacttggcctccaattttattggcagagatgtctaaataatacaaagtggtttggttttctagaaaattggggaactcaggaatattgcaagatgataaaatcaaggtgcccatgggtgagggaagacttagagttgaactgatcttcaaattaatcccggaaagatccaaataaccaagtgacaagagaggtgagaatatacttatgtcaaccatgcttcttgtattaatataagagaggtcaaggaacgtaagtgacttgagatgcaagaaagtgttgaaatcgaccatgcctctctttgtgttccataaagagaggtcaagataaaagagaccaactagtttcgatatagactccgggattggcccattgaaattgttttctagaagggacaaaactccaagattagatggtgaagagatattaccaaagtcaagaggaccgttgaagtcgtttcttcccaaaacaagagaggtcaatgaaggtagcatgaagagagacgatgggatagatccggaaaatgaatttctatcaatcccaaaatacaccaatttagagaggctactcatattagatgggagcatacctccgaactggttagaaccaaggtcgatcaacgtaagctcgctcaaattgagtagcatactaggaaagttcccactgagcttggccgatccaagatgcaactctgttagcttgtttaaatgtcccatcgaatccggtagctccccggtgaaatcattaacagaaagatcaagattagtgagataagtaagatttccaagtgaagaaggaatctttccaaagagattacaatcaccaagactcaaaaccctcaaatatttgaggctgcctatggaatccggtagaatacccgaaaaattattcgagccaagatccagattatgaagatgttgtagtctaaacaagctactatcatatctcaaaggaccattaagaaaactgttcatgaggtctaactctaccaccttacccgttttaggatcacaagagataccatcccaagaacagcaatcggtgttgttcctccacttctctgtcttcttaacaccaacaatcccattggagttgaactcatggacataaaactcgttcttaaactccaaaagagcattcttctggtcttgacgacataagtgcttaacatgagaagccaaaaccagttttgaattagaaagggacaagattaaacacaagctccatattgtcatcttcatctgacctcaacaatgcaataaactttttttctttgattttttttttctcagaaagtgaaatgaatgatgttcaatgtttataagtgatggctctagtaatagacccaaagactgtcttacattttgtggaaaaaagaaaaagcttgacttaacaagtctcttgtaaaaaaaatggcgtcatcttccacaaagatatatgaatttccaaatgaacgctccacaaagtcaattatgtctcctcttgcataaaagtattaaccctaaaaataattcaattacttgcggtgtggggttaccgcagtacaaaaagtagagcgtgtggggttacctcagctgtgtggtgagtgctacgcaattgcgcaaacgctctttaacggggcacgctcgtgactcgtgagagagtcagtcacacaccgtaaaagttaccgataaactctcaaaaagtcttttttggctttgccaaatttctaaaattcaatcaacattttctttcttcttttcgtttacatttttgtattaaaaaaaaaactctaatgggctcgtggaggtagctgaagcccaaaatatgggataagggctataaggattgtcgatcatatcttcttgcgccgtcaaaaagcttccagtcgcaaacgatgacaactttccattaaactaaaatgacataaatacccttcaaaatccacatattactctcaactgtttcatctacctccctccctctctccccattcccaaactacacattacacattaccaattctcatattaaaatccacaaaactcaaatccccaaaataaacaaaccctaaaattcaaaacaatg

SEQ ID NO: 17414 - DNA, 3003 bp, Unknown; identical to SEQ ID NO: 17413
  misc_feature (1)..( 3003): 2750-1469P.txt file - cDNA_ID_1808910; gDNA_ID_1971820; Annot_ID_176136

SEQ ID NO: 17415 - DNA, 3003 bp, Unknown; identical to SEQ ID NO: 17413
  misc_feature (1)..( 3003): 2750-1469P.txt file - cDNA_ID_1808910; gDNA_ID_2926158; Annot_ID_139607

SEQ ID NO: 17416 - DNA, 3003 bp, Unknown; identical to SEQ ID NO: 17413
  misc_feature (1)..( 3003): 2750-1469P.txt file - cDNA_ID_1808910; gDNA_ID_2926158; Annot_ID_198563

SEQ ID NO: 17417 - DNA, 2981 bp, Unknown; identical to SEQ ID NO: 12066
  misc_feature (1)..( 2981): 2750-1469P.txt file - cDNA_ID_1808920; gDNA_ID_2214529; Annot_ID_134245

SEQ ID NO: 17418 - DNA, 3000 bp, Unknown
  misc_feature (1)..( 3000): 2750-1469P.txt file - cDNA_ID_1808949; gDNA_ID_1620745; Annot_ID_49708
tttaagggagatcctgcttatgtaagagctgcgtgtgaggctagtttaatgcgagtagatgttgcctgcattgatctctattatcagcatcgaattgatactcgtgtccctatcgaaatcactgtaagcactcttcttgtcaatcttccttcatggttttgcaactttcaaatgaaatggaagttatatagttcctctcacttctcagtgagcttcacacatgtggctagagacatgttgggactaatatagagtcgaagagtttagctttcagaactatgttttctgcttgggtcactctttctgaaattactagcttattcatgaagaaccattgtctggtgaaatgatcttatcatctcccttagaatttttcgtttgaatagactcctttaggtttgactctgagctcacacttcatgacctatattgaaagccagcaactttagctgaacttgacaatctcttttgtctgtcaatttcaaagattggagagctgaagaagctagttgaagaaggtaaaataaagtatatcggtttgtctgaagcttcagcttcaactatcagaagagcacatgctgttcacccgataaccgctctgcaaatagaatggtccttatggtcgagagacgtggaagaagatataattccaacctgcaggtaaccagatttcatttcatcctcattcttgatgcactatctattaaatatgtaacatcttctctctctttcttcagggaacttgggattggaattgttgcttacagtcctctgggacgaggtttctttgcttcaggacccaagcttgttgagaacctagacaataatgacgtcagaaaggcaagtacacaggctttatatgacttgtttgattgatgaactgttggtaatcaactcactgtttatctgttcaattctgtttcttatcgcagactctaccaagattccaacaggaaaacttagaccacaacaagattctctttgagaaggtttctgcaatgtctgagaagaaaggatgcactcctgcacaactagcccttgcatgggttcatcaccagggagatgatgtttgccccatcccaggaaccactaagattgaaaacctcaaccagaacattggagctttatcagtgaaacttactcccgaagagatgtctgagctcgaatcccttgcacaaccaggttttgtgaaaggagaaagatccattagcatcctgaccacgttcaaaaactctgagactccaccattgtcttcttggaaagccgcttaaaatcgtctgagtttctctgattgttgtggggttcatgtcatttaagtggtctaagttatgtcagctagatcaaggtaataaaagtgctgtgtcttcgagagtggattatggtaggttcattcccagggaaagccaaaactatcaagggttgatgcctttaagagtaaataatgtatagagttccccaagtgagaacttcaatttacatttcatacattttgaccaaactctataaagaaagttatgtttagactttttttttgctaaaaatgttaattttcattatatgaataagaggcttttacaaaaacgaaaggcctatacaagagtagccgaggcaaaaaataaaacaaggctacaatagagatttagggaagatataaggttagcgaatccaaagcaccatgaggttgcgccatctctttctgtggtaacgagaggagatgatgttacgaatctcgcggtcgacaatcttgaagatgataataggagcgatcctaagattgttatggaggacattgttgcgctgacgccaaatgttgtagatgatagcatgggctgagacttttctgaggagggaaggcgccgaagaagaggaagaacgcatccaagagaggagctctgcccaagagcaaaacagcctctgacgcggacataagcgagaaaacgctaatctccaaacttgagccgcaaattcacaggaaaaaaggagatggtctctggattcagtctcaatagtgcataagcaacaatcgaaagactggatatggccccaagaggctagcctttgacgagttgggagtctatccaactgactaatccacatgttgaaggcatgcttaggaacagcacccttgaaccaaacagcctttgcccagtccaattccggtgctcttggtctaatagcatcccaagtccttgccgaagagaaaccttgacaaacaacaccaccaacaacccaatcaaaggagtcttcaattgtagcaggagagggggtcgtgatggtagagatgtggtcatggatggcttgagctggagcagaccgagaaagggggagcttccagccattaaccccaagagcctcaaccaccctagcgttaagagggatgcgaagtgatctggagccataatcacccataacctttatcagcgggccaagggaagtccaactgtcatgccagaagtgagctatgcggccattacccaagttgcatttaacaaattgctccgccaaaggtctaaggaacaagagcatacgccaagaccaaggatctgatggggaaggagccacatcccaaaaagacctgcttctaagatgtttagactactgatacaaacttaaataacccaactctatatcgtcaaaaaagactatctatatcgtcacccaactctatgaaggatatgtgcgactaattgtatcggttccttctctttcgttcttgaattttttttttttggaggtttatagtttctcacaagtgagacatgttatttattattattttattttttcccccgaccaaatcacaagtgagacatgtaccaaccagacaaaagcgaccacacggctttttcttcatcatcacattcacaccatcaccaccaacaacaacaactccactaaaaaattcatagctctacaagagtcacctcatagagaagtgaagagacagagatagttgtgacagagagattcatggcggaagcttgcggagtgagaaggatg

SEQ ID NO: 17419 - DNA, 3000 bp, Unknown; identical to SEQ ID NO: 3999
  misc_feature (1)..( 3000): 2750-1469P.txt file - cDNA_ID_1808953; gDNA_ID_1620678; Annot_ID_48301

SEQ ID NO: 17420 - DNA, 3000 bp, Unknown; identical to SEQ ID NO: 3999
  misc_feature (1)..( 3000): 2750-1469P.txt file - cDNA_ID_1808953; gDNA_ID_1620678; Annot_ID_164319

SEQ ID NO: 17421 - DNA, 3000 bp, Unknown; identical to SEQ ID NO: 3999
  misc_feature (1)..( 3000): 2750-1469P.txt file - cDNA_ID_1808953; gDNA_ID_2926213; Annot_ID_142087

SEQ ID NO: 17422 - DNA, 3000 bp, Unknown; identical to SEQ ID NO: 3999
  misc_feature (1)..( 3000): 2750-1469P.txt file - cDNA_ID_1808953; gDNA_ID_2926213; Annot_ID_202771

SEQ ID NO: 17423 - DNA, 3003 bp, Unknown
  misc_feature (1)..( 3003): 2750-1469P.txt file - cDNA_ID_1808967; gDNA_ID_2214524; Annot_ID_134128
aaacagccgtcagttcttaataactatacacttcaaaaataagtacatgatatattttggtcaaaaataagtacatgatatatttatctctaactcttttatacttgcctcttctccaacaacttgtcgatttcaggtaggacacgcttattaacgtagacacgtcattgcgttcgtattattataacgtggcagatttagccatgtcatatatcccaatcactctgatttttttttgccaccgtccccgtgaagatcaaccaattctagtttgcccaaaaaaaaaaaaaaaaaaaagtttattttcaacttattttcttaaagaggttttttctaacgtcttactttattactttgttaatttaaattatggattacatatgtaaacattgcttataagtcaatttactataattgtccacacacaaaaaaaaaaaagattacatagttttggttttatcgataggacaactaatacattacaaatgtttaggtataacaatgtaatcagaaaactatgtataacaatgaaattacacttactttctttcataaaatcttacacattaactaataattatcaaatctgttttttctttataagttaaaaaaaaaaaaaaaaaaaaaaaaaaaaaaaaaaacgagtttcactaaatagccccattggtgcagtatcaccccattggtgcagtatcacatgaaatttcttttcttggaaaaaataaataaaaatttgataaatataaatattaacgtagaaaattgtctgtattcagttaattttggtatcacacttatgttctaatagattttaacccgcggtataccgcggagacaattcattttttaaaattaatatatatataatttgtaaattattttatagtttacaattgttactaagtaacgtcctgccaaacccgtcccgccaaacccgttcacaaaaaaaaatatttattttattaatgttgatcttatttataatatgtttatgaatcattgtcaaaagattttattcgttgcgggatgttgaacccacacatttttcgccaattagttaatatatgttcattcttaaaatttcgaatcacaaaatatgaagaattttgtttttagattttttaaactctatatattctataatgatgttaagtttttttgatatattaaactttttataaatttaaatattattaatgttttatgaattttaaatatataaataataataattaaaaaattaatattttttgccttttaggtaatgatataataactctaaaagcaagaatttagaagatttaaatctttaattaaatattttcatacctaaataattaatgtcagtaccatgacattgtaaataagttcaaataaatgatttgtttatttaaaaaaaaaaagtttagtaagaacaatatttatttaaacaaaaaactttgttttaaaatattgttaacaaaatacttttatgctaattttaagggattgatgtgaagtttgtttggattaaatttgattgataatgtgattgacaatttaaattaagaatttaaagtaaaattaattattttgaaaaaaagatttaatgctaatggcattgggttgtaaataagtcaaactcaaagatttatttgttaaaatggctgcaaaaatgtatatatagattattcgtgaaaataaaaatttaaagatattcctctgctttttaaagaattaataactagtattaaagtaaaatataaaaaaaaatacccgtaaagactatccacaaaaaccataatcatgctcgacaatgaaattaaataacattcaatggttaaatctcgtagcttcttggccatcaaaatcatagggcttagtgtatgccaaagctaatcatctcttcatgtacgaaaatgaaagtaatactaataaatgagaaccatatatgaaatgcatggtccttcctttttatgatttattaatattgtaattattatacgttattatcagataataaatttcagatcatgcaacttatacacatccccacatcgatcaccatcagacatatactacgctttagccaaaattaaatgcatcacgaacataacatttgtggttgatgtgaatagaatagaatacagaagtaacaaatctactcgaccaaaagttgaacggtaatataatttactattcaatattttcaattttcaacaaaccttatctaacacttccaactaccatacgttgataaaaattgttagtttattagtcaatttgcactcctctattaaaaaaacattggagaacttgttagtttatagtcaatttgcactagttctctattaaaaactttttaaaaattaacttttagggtttaaacacataaatagctgagaaaaatctagatatatagaattgagatttaaaagaaaaaaaacttcaaaaaatcaaccggaataacatttaaacagtataatcctttttgataaactacgaatttactggtcgaactacatacatttccctaagcaagatacatttcctagtttaacgcttcagcctaaatatcttactatttttcaaactttttatcgactgcgacatacatacttacattctcatatcgactggtccatttatctatatccttaataaactgtctattaacccaaaagaagagccgtcattagtcaaaattgagcaaacgaattcaattcccaaaccacagtccctaaactcgtaattatacaccaaaacaaatggcaaacaaatcacaacacagaagctgtcatcctcccaacttacttaaacagcctgtcattgtccccacttgtcgttcaaacttcaaaataaatattaaaaacacataatcacaaaaagacaaaacaaatccaatgtggcatattctttttatatatataaacacacaaaaacacatctcacttctcatctcctttctactattcccttttggccggaaaccgagtcgactcattgagtcaaaccaaaccaatg

SEQ ID NO: 17424 - DNA, 3000 bp, Unknown; identical to SEQ ID NO: 3481
  misc_feature (1)..( 3000): 2750-1469P.txt file - cDNA_ID_1808991; gDNA_ID_1620648; Annot_ID_47648

SEQ ID NO: 17425 - DNA, 3000 bp, Unknown; identical to SEQ ID NO: 3482
  misc_feature (1)..( 3000): 2750-1469P.txt file - cDNA_ID_1808991; gDNA_ID_1620648; Annot_ID_163321

SEQ ID NO: 17426 - DNA, 41 bp, Unknown; identical to SEQ ID NO: 326
  misc_feature (1)..( 41): 2750-1469P.txt file - cDNA_ID_1808991; gDNA_ID_1563839; Annot_ID_148384
  misc_feature (1)..(1): n is a, c, g, or t

SEQ ID NO: 17427 - DNA, 3000 bp, Unknown; identical to SEQ ID NO: 3481
  misc_feature (1)..( 3000): 2750-1469P.txt file - cDNA_ID_1808991; gDNA_ID_2926214; Annot_ID_142132

SEQ ID NO: 17428 - DNA, 3000 bp, Unknown; identical to SEQ ID NO: 3482
  misc_feature (1)..( 3000): 2750-1469P.txt file - cDNA_ID_1808991; gDNA_ID_2926214; Annot_ID_202847

SEQ ID NO: 17429 - DNA, 3000 bp, Unknown; identical to SEQ ID NO: 7521
  misc_feature (1)..( 3000): 2750-1469P.txt file - cDNA_ID_1808995; gDNA_ID_1621149; Annot_ID_56830

SEQ ID NO: 17430 - DNA, 3000 bp, Unknown; identical to SEQ ID NO: 13873
  misc_feature (1)..( 3000): 2750-1469P.txt file - cDNA_ID_1808999; gDNA_ID_2214663; Annot_ID_136548

SEQ ID NO: 17431 - DNA, 3000 bp, Unknown; identical to SEQ ID NO: 3022
  misc_feature (1)..( 3000): 2750-1469P.txt file - cDNA_ID_1809003; gDNA_ID_1620620; Annot_ID_47026

SEQ ID NO: 17432 - DNA, 3000 bp, Unknown; identical to SEQ ID NO: 3007
  misc_feature (1)..( 3000): 2750-1469P.txt file - cDNA_ID_1809003; gDNA_ID_1620620; Annot_ID_162276

SEQ ID NO: 17433 - DNA, 3000 bp, Unknown; identical to SEQ ID NO: 3022
  misc_feature (1)..( 3000): 2750-1469P.txt file - cDNA_ID_1809003; gDNA_ID_2926190; Annot_ID_140989

SEQ ID NO: 17434 - DNA, 3000 bp, Unknown; identical to SEQ ID NO: 3007
  misc_feature (1)..( 3000): 2750-1469P.txt file - cDNA_ID_1809003; gDNA_ID_2926190; Annot_ID_200960

SEQ ID NO: 17435 - DNA, 3003 bp, Unknown
  misc_feature (1)..( 3003): 2750-1469P.txt file - cDNA_ID_1809022; gDNA_ID_1621108; Annot_ID_56036
aatagagaagtggtatatcaaacaaacactactgaataaccgtattggttaatatgaattaaaggagactttgttggtttttctcatgtgggagttggtttactatcgaacctttctaacaacaacgtattcaccagttgataagctgagctcgacatctgtcacaccgtgatatgggaacaagacctgaaaacgtttttaaaaagggaaataatatgttataatggcacatcaatgaggaccaaaaggaatctagatgtagcctgtctttttggttctctaatcaaaaacagtttatgtacatccagttcatacgtggagaacttataatccaattatctctttgatacttttactaccaatataaaccaaagttttaactctaaaaggaaggtattaaagactgaaaagcatacctctcctaagaagtaacccatgctatctgttgacgtgtcatgcatctgagatgcaaacactccattagcttcctcatatgatggaggtggcggcatactgtctgcgcttgagggagtagagggagcttctatacgttgcctctcagataccatctgtaggttcaagaatgttccattttgtccttagttgactcatataatgatgaactgattgttcgacaagaatactattatcacaggaaactgaaagctgtaaaactaatgcacaccaacctctccttcgagctgatcaagtatttggaggactctttgatggtaggcgcgttcagattcaacctgtgatcaggaatgaaaaatacagttgttacatatgggtaagtaaatcaaagttgacctagaaatggatcttgtaaccaatcgcactaccattgaaagaagtcgttcaagagtcaatttctgttgttgatcttcaacggaagctaaagcagaagcagcttctttccccaatattgtcatatttgattttaggtcgtgaagttttgcttcagcagattccagtttcatcaagatgtcaggattaccttgagactctctcgcctttgcttggcgtctggcaacttctgtagcctgtttggattaaagcaggcgcataagtaaagttctatcatgcgaataataaaatgactagttcttggaagaggaaaaaacccatattctactaacggtaattaaatagcttcatggtattatctttcaccgtacctgagcttcagcttcttggcgcattctgtcatagcgttgagcaagatgtctagcatcctccaatggagctcccaaaaccattgcccgtaatggctcagcaacctaacaaattcaggattgacatatgattgtagtagccaaaccgcaataaagaaagaaccaagtgaacaccatgacattaattgacttttaaagagtatgtaacaaattattccagataaaagaaatagatcttcccacaaatggcagtcattccactaacaatggcaggaaagtaattatttgtgtagttatattgcatgcaacagatatgtgctattgcttaacactttgatggaagatgaaaaagacaaacctgtgtaccaagagccttcaacatatttccacgttccttctccatttgtgctcgagcacgcccatagttcagtgcagcccgtgttaatacgttaccattcgtacatgtattctctgaaccatatttcctgctatcctcagacaatttcgtacctgatgaaaaatgagtgcaaaatgaaagacaggcctgtgagccaattcaagtctataacagacataaaaaaatacaataagttaaaactcaaagggtcaaaaaaatcacctatttcaacttgttttgaccctgtaactatataaccttccacaccacgaacaatatctctttggtaatgctgaaaacgaagaacgaatgagtccaaaatcaatagtaatcaaaacttcaaactagtcaaaagcttaagaaaaacaaccttagcagcacgagtggatatgtaaagcttttctagcttctgatgctgattgagttctgcttcatcagctaaaccagagccatatccccctcctccaaattgcttaaagacagccttaaccattccacaaaaactaagtcagtgtactaattaacctcaaactcaagaacacaaacacccaatctcatggtaacttggaacatgtagcaccaatatgttaatctatcactacaacatctttcaaatcccagctcacaaaactgaaacggattctcacataaaagtatcctaaattaccctttgacaaaaacttctccaattctacagaattttacccaatctcacatcgaatcaacgtattaatcacactcagatccaattactcattaagtcaaaaaccatcgatccgaaaaaaagctagcccctttatcatcatcacattattgattcattcaccagaaaccaacgactcaacggaatcacaagagaagataaaaacaaaatctagaaaaaaagatacagaatcgggatctaagcaaatgggcaaaccaaaagttaagaactttaacctgctgctgtctcgcaacttgttctctcaacctgctagcttgttttctaattgcatccattcttcaccagatcaagagctattcacaaatcttcttccttctctctttctcctattcttccactttacgagttccctccgattacttggaacaactcagagaagacagagattcgaaatcgtcaaaaatggcgttgagctcagaacaaatttctctgctttcgaacacgaagaaatcaaagatagacaaagtctctgtttcaccaagaaggttaatattgggctctctataatagcccattgggcttgaaaataaaatccagtaagctataaatttatatcatctcaaaataactaaaaagacgcaaaaccctagacatatataaatgaaaagccagtgaattagggctttctctcacttgttgaagccgcttcttcttcttcctcactgtagctcgtcgtcgctacaccatctagaagacccttaaccatg

SEQ ID NO: 17436 - DNA, 3003 bp, Unknown; identical to SEQ ID NO: 17435
  misc_feature (1)..( 3003): 2750-1469P.txt file - cDNA_ID_1809022; gDNA_ID_1621108; Annot_ID_171690

SEQ ID NO: 17437 - DNA, 3003 bp, Unknown; identical to SEQ ID NO: 17435
  misc_feature (1)..( 3003): 2750-1469P.txt file - cDNA_ID_1809022; gDNA_ID_2926207; Annot_ID_141816

SEQ ID NO: 17438 - DNA, 3003 bp, Unknown; identical to SEQ ID NO: 17435
  misc_feature (1)..( 3003): 2750-1469P.txt file - cDNA_ID_1809022; gDNA_ID_2926207; Annot_ID_202339

SEQ ID NO: 17439 - DNA, 3003 bp, Unknown; identical to SEQ ID NO: 17435
  misc_feature (1)..( 3003): 2750-1469P.txt file - cDNA_ID_1809022; gDNA_ID_2926208; Annot_ID_202371

SEQ ID NO: 17440 - DNA, 3000 bp, Unknown; identical to SEQ ID NO: 12448
  misc_feature (1)..( 3000): 2750-1469P.txt file - cDNA_ID_1809029; gDNA_ID_2214552; Annot_ID_134695

SEQ ID NO: 17441 - DNA, 3000 bp, Unknown; identical to SEQ ID NO: 12448
  misc_feature (1)..( 3000): 2750-1469P.txt file - cDNA_ID_1809029; gDNA_ID_2214552; Annot_ID_185594

SEQ ID NO: 17442 - DNA, 3000 bp, Unknown; identical to SEQ ID NO: 6828
  misc_feature (1)..( 3000): 2750-1469P.txt file - cDNA_ID_1809097; gDNA_ID_1621108; Annot_ID_56018

SEQ ID NO: 17443 - DNA, 3000 bp, Unknown; identical to SEQ ID NO: 6828
  misc_feature (1)..( 3000): 2750-1469P.txt file - cDNA_ID_1809097; gDNA_ID_1621108; Annot_ID_171662

SEQ ID NO: 17444 - DNA, 3000 bp, Unknown; identical to SEQ ID NO: 6828
  misc_feature (1)..( 3000): 2750-1469P.txt file - cDNA_ID_1809097; gDNA_ID_2926207; Annot_ID_141798

SEQ ID NO: 17445 - DNA, 3000 bp, Unknown; identical to SEQ ID NO: 6828
  misc_feature (1)..( 3000): 2750-1469P.txt file - cDNA_ID_1809097; gDNA_ID_2926207; Annot_ID_202319

SEQ ID NO: 17446 - DNA, 3003 bp, Unknown
  misc_feature (1)..( 3003): 2750-1469P.txt file - cDNA_ID_1809105; gDNA_ID_2214498; Annot_ID_133615
acaacaacaacaacaacaacaacaacaacaacaacaacaacaatacatggcgagcttcttcaggttttggcccgatgacggttacaatggctcaaccaccacctgcacctagccagcatcagtatctgaacccgccttgggtattcaaggacaatgataatgatatgtctcctgttttgaatttaggtcgatacaccgagccagataattgtcagataagtagtggcacggcaatgggtgagttcgagttatctgatcaccatcatcaaagtaggagacagtacatggaagatgagaacacaagggcttatgactcttcttctcaccataccaactggtctctctgacttgtctttgcatcagagaatcttcttacaatgaacgattctgcaatatcttatctttttgcttctttgtttattctgttatctgctatcaataaaccagacaattgttgccagataatggcttttgattttgatttgttgttttatctccatgaaaatccaagttatgagatcagattgatttctttagcacatcaaggttccatataatgaatctataatcatcctagtatattagtcaaagcaggagctaacattaccttttaacttaaggcttaagccatagcattatcatcagctttgctcaaactcaacatcttaaacacttaattagactcagagatctatcgaccaacgaagtgaactgctttttccccaaaaccctaaccacccactttcaaagattcgtcctttatggatttagctcccctgtttccaaatgaaacctcaaaaaacttgaaccatatatactcatcagaagacaacttaactatggcagcttttcaaatatgattcttatctttataaaaatctttcgtcagaaacagtaaaagtaagacgatgatagagacctttcttcctaaagatctctcatcatctttcatggtcgtcagagctttgctacagagacgtgaagagagaatatcataaatgggctatataatgggccctaagaggcccacatgaatttccgtatgattcttgtaattgggctttctctggctctactgactcgtctcctgaagaacaacaacaaaacatatttcattgagctcctccactgaatcgctctcatccttcgcttcttcgaattccaaaggttagactttcctgaatccttcaataatctctcttcgttgtcttctgtaacatttcttctattgttagtgatggattccattattttccttgtgttacaactttgatgagctcaatgctttcacaaactaggtttcggaatttttgtttcaatccaatgtctctatttgggtctttaaaccagattatattgaagatctggaaaatgggtttataattttgtaaagaccgcgactttgaaaacttcaatttggtgaaattctttcaaatccgcatcttgtaaaaatcacatttttatatttttgttgattgatcttgttctctgttgaatgtttaacttgtgtgcgttaggtagaacagtagaagaaatcatggatccagctgaaatgagatatttggaagaagaggatggtccgttgatgaagacaatcaaaggtagtatcactggttttggtgctgggactatttacggaaccattttagccacatggaaagatgttccaagagtggagagaaatgtggctcttccaggacttattagaacactgaagatgatgggaacccatgggctgacttttgctgctataggaggtgtttacatcggtgttgaacagctggttcagaattttagatccaagagagatttttacaatggtgctattggtggttttgtcgctggagcttctgtgcttggctatagaggtaatggtttttcttcttcactcatggttcgttcgttttcattgtgtttgcataaaacaatgtctcgatggttaagtagtttagaactgatgtgattttggtgaagaccatttgaagttactggaattagcagtatgtagttcacttcatgtgttttacgagcttagtagttattgatggacaaacaatgatctcgagtgggagtaactaaaggaattgtaatgggaagaaattgattcttccttacctcaagttaatgttatttggtgcctagtgtagcaattctataggatagcacaagtgtcaagactttgatattgagtgtatacaggaaactctcaaaatcatatatatgtaaagatcgaaagtacatagctttgagtgagagatgatgctatagattcgtgcattcttatgatgctatacttaattgttatttggtttactttggttttcctctttttttacagcaaggagcatcccgacagcgatagctgcaggtgcaacactagctgttacctctgctttgattgattctggaggtcagaccacaagagtagacaatggcagagaatactatccttacaccgtcgagaaaagagctgaagctgattcctgatttctcttttggtcactgagattaataagatgtgcattcgctgatccggggatcttgagataatctcttttgtttattttatctggatatgtgatatcatgatactctttgctcttgtttcttcttgttttcttgagagcgactttctcacatcttttgtctgaatgtttcctgcaataaaaattcaactttgtctgcagatgtaaacaaatgttttagctttcagtaatcattttaatcagacatttgcttgcttctgttaacctcaagctagtttctttatctgaaactataatagatttgaacatgacaagcataaggaaacaaacatgtaacatgtataacaatcagatgatatggatttggagatctacatgtaaaagtagagtgaatacgtggcaataactcattggctatcttaaatttccttgtggtatggctaatctagtggttcttgtccaagtaactatcgcatcacagtgacgagtttttttcctagagacctctgctgcaatg

SEQ ID NO: 17447 - DNA, 3003 bp, Unknown; identical to SEQ ID NO: 17446
  misc_feature (1)..( 3003): 2750-1469P.txt file - cDNA_ID_1809105; gDNA_ID_2214498; Annot_ID_183901

SEQ ID NO: 17448 - DNA, 3000 bp, Unknown
  misc_feature (1)..( 3000): 2750-1469P.txt file - cDNA_ID_1809108; gDNA_ID_1620749; Annot_ID_49756
tttttttcgttttatttatcttcggacatatactaacgtaacttgctctgttgatgtatagaagagggacggtttagcttctccagacaatggaaatgacgattcactttacccacaaaagaaaaaggtgatcactgattagatttggtttaagcccataaagtacatatatttgttgctaaaggaaggtgacatggactattggaaaaggcgttttgtttctagcgttagcgattagaagacgcaaacgccattgatgacaatgggagaataatctgaagaagaaagagacagaaacatggaaaaacaacccttttggctccaagctaacaaacacggcacaatcgagcttcctttgagaattcaaacacatgaccattgattggactttcaactaaatggagccttaattcaattcatcaagctatgaccattatagttttgaatgctagaaaagacagaactcgaattgaactaaaagcaagtgtctttgttccaacacacaattccagaaacaccaacacacaacctcaagcgtatgtaaaaatgaagactttggctccgcaataaattccaaaacagagcactttgatggtaaaaattcaatctttgaatcgaacagagtttgatgagaaactctgataacagaaacagaagatacattaaacagtaccagtacactagtctttagaaggagactcagacggcgtcttggagacgatagaaagagcgtgcaatccagtatccaactcttcccggagcaaatgatagaccaacctgtgtctcttcaccaaattcattccctcgaatcctttagaaacgatcttcacattgaaatgcgtctcatcgtcggttctacctttcattccggcgtgaccagcgtgctgatacgaaacatcttcgatcactaactccactggttcgagctctttttgaagcttctctctcatcctgctcgctcgattctctattgctccagaatccgacccggttttctcaacgctgctcattgctacggatcttgaaccagttcccgtcgattttgactcagagttgaagaatttaggtacggagatgaagacgctcggagaatttaccggcgattttaggggttgagtccggtggaacccagatacgattaacctaatcgaagatgaaaacattgccactgtcgaagaaactcgaaactatattagacgctgtcgttttgtcagcttatcatcttcacgaatctactattagaggcgttatttgcattaaggtccacaaattttcaaatataataacatcaccccacatttgtgagaaaaaaattacaaaaaaacaaacaaactctaaaagtgtatcgaaacaccctcatacttcttcacatttgtgtgagaaatcaaataacaaatacattcgaaaaatgtttgtgtatatgatttaatatttttttggtgtggttaaaaaacttaagacataattaagtaataacaatttacaattgtaacgtggatattttttgaaatgttgatttatgaccaaaatagtattagatgaattctccaagaagatcatggtatgataagaataagatggtatagtgctaaaacatacccaaaactgtaatcagtttttgaagtaaaggcaatatctttgatttgggtaatagtttgtttcgataattttggatgtacaaaattaatttttaaagtggttctaagctgctcatccaaattttttaaggatcctaatctctggtctaaacttcattaatgaatcataaaaaaatctacggaactaaaagaagaaattgattatatccttcaaattttatagacaaacaatcgtgcagattaaattgtaaatatgctaattttgttcctgtgtataatattttacattgtagcatcctttggtagtgtagatgttgagaaaactaatattaattggtaaattatatatttcgaaaaacaaaattcaggtaaatagatttggaggaaacatatgaagttaaaatgttatggataaaaacagaataaacaaattattgtagacgtaatccaaaatagtataaaataaataattttgcagtaacgtaagattgcattcgaccacacgcatctatatcactgcgtttttagctgcagctttcgatagtaggtcctacatcctattcggatctgacgtggatccttgatcacactctctactttagggactcaaacactctcacatttacgagaattgccactaccacgtccctcagtgggaagggtactttcgtaaaaccaaaaaaaccactttccggtttccgcaaaaacccgtcaccgccgctgcatcctcccttcattcttttctctctttcaacgcatatacatacacttatatacgttatcaatatattttatttttaataagtccagtttttgtctgtgcatcgagtttaacaggcaatgctcgtgtctctctctctttatatgtttagattctttatctggaacttggaagctcttttgttagctatatctaatcggtgatctcgaagcttattcaatccctctttcttttttcgtgagtttttatcttcatgttgattcggtttatattggtttatatgatgatgaaacgtttcttataattcttttgcatgtattgatctaaaaaaatctagctttcttctcttctgatctctgttttctttttgttctttcccttttttacccgggaaaaagttacggtttcatgtttaggattggcgttactattatctggtggcctatcatgattggttgattgttttgtgtgttatactggatttgagaaaatgggtatcacggcattggcacttgtggcatctaactaatatcactaaaaagtttgattcttttgaggaattgttttttgactggaaagtgttcctttttgttcctggatggtgacaacaaaggtagctttgctttccttattggcatatttcatgtgaatttagatttgcatatttgtgttgtaggaatg

SEQ ID NO: 17449 - DNA, 3003 bp, Unknown
  misc_feature (1)..( 3003): 2750-1469P.txt file - cDNA_ID_1809116; gDNA_ID_2214602; Annot_ID_135578
gtacctaatgtggagattagtcttgaaaagtgtttgaaaaatatataataagaattaagaaactatccaatgttataaattgacagttttggtctcaagagtaaatatataaattgatgtttagatacagtatagattaattaattgagctattaataaatagatagaaactctaaataaatttacggagaccccactaatcaaacacttggaaattagtacgctcctaacgaaaaggaggttttgtcaaaagatcttaaaatcgagaatatataaagttattattcttaaacatatactgttgttcttaaaagcaggacccatttcgattgcttggagttggactagagatataatcccaatgaacaataatttgtgggcggtcaaatacattctaagatcatcatatacattctaagatcaaaaacatcatggatcttgcctcactcataagatccatatataccatataaagacattacaagcttttcaatgtaatgaaacaacaactaaaagatgagggaaaaaaaataacatattatagataattactgagtaaaccactcgtaagcagacaacgaagagttgaagataccacaaggagattcaagcttgattttgtcgacagccttttagtatttaagtaattaactctagactaagatacttgacaattagagaagcactagttaaaccaaaaaacatttgcagccaataatttgttgttttcaaaaaaaaagaatgagtagaactgaaagagatatcaacatgtgatatgcaaattagttggtcccaaagttattgccgtatcatatacgaaggcgaaactcatattttactggaagatatctagatttaaactaatattttcgttaacgagtccttcatatatatactcattgttctgcaagaaagttttgtatgatttccaccgttaaatctgaaagaaagctatgctaatacgttttctttatatacatacaaatctcagctcatttttttttcaatcttttatgctctgcaatgttctataaatgtcacgatgtaatttaccaatgactaatttaggaaaagaaataactacctcaatgtagttctcttaaaatacttttttagatcatgttgatataaactttctagcttcaaatacaaagcaatgtgtcccaaaaagtgaatctagcagcaagagatctcaacaaacaactagagagcatacagacaaaaagtacaaaatgttaaacttttctagtaaaaaggattagctaagtagaaccaccgatttcctcttatagaaaagatctcggccgtcaatttttctgaacccaacgtgtgaacataacaaaacattaaaaaatataaaaccacagtgttcgatctgaatcatatagagagggaccagaggaaccaaaaaaaagagtgagagtttcagtaccaaaaaatccttagacacaaaaagagatgaggttttcttcatctagacccgtttcgagtccgggtcgaaccgaaaacccgcctctactcatgcggttcttgcggaccaaaagcagaagcagaagccgttctcgttcaagaagacctatctttttccgtcggaaaaatgcttctgctgcggcggagacacaagaaccaacttcacctaaagtcacttgcatgggtcaagtaaggataaaccgatcaaagaaacccaaacccgaaactgctcgagtctccggaggtgcaacagaaaggcgacgccagagccgtcggtgcgggtgggtcaagaacgcttttccctgtcattctttcaccggaataatcaaacctacttgctttagccctgtgtggcgtaaatggaaatcattttctcatgctagtttctcgaaaaaatcagagaagagatcaagttcgtctagaagtgaacctatctttggccgctccacggtggagccagaggaaccagaagagactcgaaaagaagaaaaccaagaagaagaagcaagttcatgtaaatcattcacagctacaccaccgagaaacgcttttttactaactcgatgtagatctgcaccatatagatctccttcatcagctaatagcttatttgaagatcaagaagagacaaataaagctcctttccaacgacacgcttcgtcggaaaatgtatcagtttcggaagaaccgaagacaagcgttacagaaacaacagagagattagaggattcaagaagagaatcagcagcgagtgaagaaccaaaacgaagcgttttgggatcaccacgacagtgtctgatcctcacgcgctgtaactcggagccagcgagactcgttcccgagatgggttatcgacagaacccaaggttgggatttacgtgatgcgtttacattttttttctctttcttttgtattttttcgagaaatttacattgaaacgattactatattctttgctggatttacttggggaagtttcgctgaaatttagagctttaaaagctttctttatcgtagagaatcttgtggttccctgaccatgtaatatttttcaattgtcctatctatgacaatgtaactaaacaaacaatttcgttcgtacacttatacactaaacaaaaaaaagtctttgatatagttttatttttctgttatgccaactatgtttgtgttcttaaaattctacatctctaaaaacagatatattttccttatattacataaaaatggtttacccataaattgatgagttttatcaagagacttgcaaaatattgtggagatcacgaaaatgccttgaggcccagatattaatgggcttttaggcccatatgttaatgagatccaaatatttccaagttaagtaattggtaatgacggtgaaggtgcctttgactatcttaacgcgtacgggacggtcgataaatttagttaaagtctctttcttcttctttactttttcttcttcttttagatcaaagaaatcgttttgtgcagatttgatcttgcgttaattttctaagcaaaatatg

SEQ ID NO: 17450 - DNA, 3003 bp, Unknown; identical to SEQ ID NO: 17449
  misc_feature (1)..( 3003): 2750-1469P.txt file - cDNA_ID_1809116; gDNA_ID_2214602; Annot_ID_187090

SEQ ID NO: 17451 - DNA, 3003 bp, Unknown
  misc_feature (1)..( 3003): 2750-1469P.txt file - cDNA_ID_1809125; gDNA_ID_2214566; Annot_ID_134971
ggtgttccttgggtcagcttcatggtttacttggagatcgaggttttattgatctgggtatctcatcttcttgttcagtggcggaagcgctttctagtcataggaggagaagccatcgcgatgacatcttaaatgacatcgaagaagagttagaaaagcttctgtgtcgcggtatttgcacagaacaagataggtctctttgtcgaagtattgggggtcagtttaaggctaagtttttctctccggaaatttggcatcagataagagaacaaggattagttaagcaatggcacaaggcgatctggttctccggagctacgcctaaattcacgtttatatcttggcttgctgctcatgacagattaacaaccggtgataaaatggcatcttggaacaggggaatctcctctgtttgtgttctttgtaatatctcagctgagtcaagagatcatctgttcttctcctgcaatttctcttcacacatttgggatagactaacccgaagacttcttctttgccgctacacaaccaactttcctgctttgctcctccttctttcaggacaagacttctcaggtacaaagcgtttcctcttgcgctatgtatttcaagcaacgatacacacattatggagagaaagaaacaagcgtaggcatggagatctgcctataccatcagatcatatcatcaaattcattgatcggcaaactcgaaaccgtttaagcacaatcacaaagcaaggcttgcacaaatatgccgatggcctccgcatatggtttgcagcgagagacaacttaacgccaaatcattagtatttctttgtttttttccttttgattttaagtctaaatcaagttaataaatggctgcatatattgtaaaccaggttttttctttgaataaatttaacaatttttcaaaaaaaaaaaaaaagaacatctggatgtcgtacaatagcttcttgcaagatatcaagaagctgatcagcaaagaaaagctcggtaatcttcctcgcgtcttgtggcaccaatcgaaacgaaacagagccactgactccatcgtgtagcatcgcgattccattttcatcgagctttcgcttcttcaacatatccatggtcgaagatagcagccaaggaactttgtgggaagaatgagtgaagttagaagagatcacatgttcgtaggacataattaagcctagctctttttccttaaaatataactatagcattggtacaccaaaagaaattaaacgtattcgtcaaattcatagtttaattgattagagtagatgagaaaaccatttgctgtttcatacccgacttttttccaatcacgtgaaacgtaaaggtaaaacatatttgtaactaaaccatatttttctttctttctttctctcgtgtttgttttagaacctaatctgatctgaatattaacacacaaaaagatgataaatgagaacatataacaaatcatgaaatgagatgagaacatacttctctagaaaattttctaaaatatccgaatcaattgatggcgaacaactaaacagtagaatacaatatgtatattaaacagaaaatcaaacgctaaggaattaaaaatcatgaaaagattattaacacgagagatgagaacttaactctccgaaaatttgtcctaaaacatccatttcaattttctcgcaaagaattaaaacttagaacacaatatatcaaatcaaacgtgtatgaattgaacttaaaaatttacatgttacatcagcatctaaatttttataaattaattcacgacttatggattagtatgtatattcaaaaaaatagttggcacgatcaaaaaagaaacattaggtagctataatctgatagtgaattaaatgaaaagtatttataaaaaactaagaggctgctcatgatttaggattttacctttttacaatttccagaaacacacaaaataagaaaatttattttgtgaagttacattaacatttatatccaatattacacactaaaaaaacgaaaccaccatatattcattattataaacatatggcttattaatctaaatctgttaaactatatatctaaatctgttaatctaaatctgttaaattatataaatatgttattataaacatatccttttattatataaatctgttaaattatatatctaaatctgttattataaacatatccttttatcttctaaatcttactaatctaaatctgttaaattatataagggtgtttaaaaaatggatatatatgtttttgtccacaaatgaatatatacatttatatcgattttttttatatactttcgtaaatgttaattgatgacatgtccaaccgtaatttgctgtttaaaattttatgtggacggcatacgaatcaaatagcctcgacttttctatagtataaattgtatgtaacttgtaggctctctctaaggcggaacgctcccctaccgatgtattttgacatcccacagcttcggcccatgtagtctattggttatttttgtggttcagtttaaattttaaatacatgtatttatcctcaaacttttttttttgcgattctcaaactatttaattcaaatccagaaacggtttatttctccccaaaatacatgtatttatccatgttaatttttttatttctttggcttaagtaataattagatcaatacattttagaccaataaacgtttgaacgtctttttgcatcagaacgtgaaattaatgtcaaacgcaaacgcatgtacaaatcctgaacaaacataccgcttaggtgatggatggttgcgtaagaacaaaacaccttaaacggcagcgttttgtaggagcaccgcttcgcacgtttcttccatatctctgatcacgtgatagtcgtcttcttcagatcttttatcactttcttcttcccggagaaaatttggccctaaatcactttcccgggaaaatcaaactctggggaaagagttgaaacaatg

SEQ ID NO: 17452 - DNA, 3003 bp, Unknown; identical to SEQ ID NO: 17451
  misc_feature (1)..( 3003): 2750-1469P.txt file - cDNA_ID_1809125; gDNA_ID_2214566; Annot_ID_186025

SEQ ID NO: 17453 - DNA, 3003 bp, Unknown
  misc_feature (1)..( 3003): 2750-1469P.txt file - cDNA_ID_1809128; gDNA_ID_1620756; Annot_ID_49884
aactgtctccaccggtcatgcaatatttatctttttgtttcaagatattaaaaaagccaaagaataatgaaaactaaatttttagtaaaaccatagacgtttttcaagctaatattctttaattattatagattaataatatgtcggtattactcaaatttcatttgttaaagagataattcctaatttgatgacataataaaatgaacaaaaaatctgttttgaagcgttgtcctaacttaggtgtacggtgtgtaacctctgggtttagtctgtagttaatgtattaatgattagctttgctcgttttaaaagaagaagaaataatattgagtttgtagtctttaaacatgtggggctacagaaactggctcaaaaaggttacaaaaatttaggtgtttgcatcaacaattttagaactcacttgacccaagacctgatctttgtttctgatgttatcaaatctcagctacctctttgcttccgttgatcctcattgatgatgcgttcattacatagttgtgagttgtgacaatagaatcccaactggttctgttgttagcacatgctgatggtgtttctgcctttacgagttattgacctgcccattcttaagcggcgacctgttagtgagtccagtagtatgaccaaagcttcctcgactgcatcagcttgtttgtctaactcgtagctgcttaactgtgggagaaggctaagctcagataggagtccaattgctgctgcagccgtgcaggtccggtcccatgatggttgtggcctgtacgtcagagatcaaatgaggaaggaagggcactattttggcagacagagactggaccaggaacatgagaaataaagactatttttaccggagtttgtgcattgcggatgcaccggttgcaagagatatacaaggaagatcttcgtctccccatactgactttgcatgatcctacagatgagtttagagtttaagcatattttcgtgtagttctttagagaaagggggaaaagatgaaatccatgtgagatatgatcagcctgtacctttaaacgcttgagcattgcagcagaattgttccacgtgccatcaagcaaaatgaaatgcagagttttatcctcatctgtctgggaaatatagaaagtgtagagtttcactctatatccttccacaaccttatctaatatttttctgtttgaaataagtaacgatagaagaacagagagtccatagtcaaaacattgcaatctttaccgtggatgatacatgattctctgaagccgaactaccaaaagcgtctttaaccgagaaagttacttccgagttgtggttgggatagaggcaacggacttggctttttcctgagcatccatcagaacaaaaagacaagatttttagcaaaatcatggagtgacatctatgtaagattaaacaaatgcatctacactaagacttagaagaatcaacaacctgcacgcttgaattcattccacatgatctcttcgtcttcagctattccaaagacgcagagtgtagctgattggacgccaaatatctgccacaacagcttccctgtgttgttctggcgtagaaaatcctgccaacagctaaacagcatatcaatacataggaattggcgattggaatagctaaaactagtgggtacaatactaaccctaggatgcatatacagccaaaaacgtatccgtttccataaaccacatggcttaacatatgaacacatgcaatcctccatagcaagccaacactgcatattcagaaatgtttcatctttaggtattgagttgtttattcatggcaaaatacaacaattcaagaagagtaaatgaagtaccttctggcataaataacccctgctcccaagcagccgacaagcaacctgtcgagcagaaaaaaaacgaaactttttctccgggtcatctaatgcttcatatgtagccctatgcttcttatcttcgtatgcaccaaacggtccctgtgatagttgtcacacaagtagaagtattataacctcactataacatttaagagctcaaaacatcaagtcagaaaccactggcacatagcaccacatacgtaaccatagctcaaatatctaacttaggttactagtttgaacacaaaaattacaaaaccagattcatagttatccaatagagagcactaaacaatccaagcataaaacgattgaaaggaaacaagcaacgaggtttcattatcatgatagtcatcggcatttacctgtaacttgccaccattaccaccaaaatctatcggagaatccaatttgcactccagaactttcaaatcatccacaatctgtttgaccgcggatggaaatggagacaccggaccccatttccgccactcctctaccgagatgattccttcatcgcaaacgtcgaattccctcgtatgagaacgcaaaatcgaggaagtcataagcaatctctggccaacagctacgagattacggcggtgaaacagtagcgacggagagaaatcggctacggatgctccagcgatacaacgcatcgtttttactgtttgggcttctcgaggaataataatttaattttacggggtaagtgaatactattgggctttaatgaaactaaggcccagtgagctttaaccttgattgatacacttcaagttaattggttcgataattttttgtttttccgaaaacgagaaatattaatgggctttaatgaaactgcggcccaatagtcttagagcttgaataatagggaatttatttaatcggataaaattaaacaatagtagctctaaagaaaaaaggattcctaaaaaatcagtcactcctcttaatcttctcctatctctcattttcgtgggttttgtttttgttcatcttcttcgtttggatattattacatttgggactcaagaagaaatcgaatctatcgtgtgtgtagattgcttctctctatctcttctctcgctacacaacaatg

SEQ ID NO: 17454 - DNA, 3003 bp, Unknown; identical to SEQ ID NO: 17453
  misc_feature (1)..( 3003): 2750-1469P.txt file - cDNA_ID_1809128; gDNA_ID_1620756; Annot_ID_166964

SEQ ID NO: 17455 - DNA, 3003 bp, Unknown
  misc_feature (1)..( 3003): 2750-1469P.txt file - cDNA_ID_1809138; gDNA_ID_2214497; Annot_ID_133594
tgaaggatctatcttgctctttgtagaagaggtattttctgatatgcagccattgatccgttctgttcttgatggatacaatgtctgcatatttgcatatggtcaaactggatcaggaaaaacattcacaatggtaagattagagttgaataaattttgaagactgttaacatttgaagctagagaattttaatgtttccatttttgtaaattttctagagtggaccaagagatctaacggagaagagccagggagttaattacagagcacttggtgatctgtttcttcttgctgaacaaagaaaagacacattccgctacgatattgcagttcagatgattgagatttacaatgagcaagttagagaccttttggttactgatggaagcaataaaagatatcctttttcatgaatggatatacttcttaatgttttgattagatagagagagagagatcattttcatgtttcagtttcatattccttaacattttttggtacgttagagatcaggaatagctctcaaaagggtctaagtgtaccggatgcaagtcttgttccagtctcttcaacatttgatgttattgatctaatgaaaactgggcacaagaatcgagccgttggatcaacagccttgaatgatcgaagcagtcgttctcataggtaaaagacaaaatgttttcaagagcagcgagaacaaaaaataatcttcaagagtcttactcaatataacatttttcaatcttatttttttttgcagctgcttgactgttcatgttcaaggaagagacttgacttcaggagctgtgcttcgaggatgcatgcatcttgtggatctagcaggcagtgagagggtagacaaatccgaggttactggagacagactaaaagaagcacagcacatcaatagatcgctctctgctttaggagatgtgattgcttcgctagctcacaagaacccacatgttccttacagaaacagcaaactcacacaactccttcaggactctcttggtaaaaggatacaagtaatttagtcctgaatatttgcagctaaataaaaactcacctttttcttaacttgggattgcaaatatgttatatcaggaggacaagcaaagacattgatgtttgtccacattagtcctgaggcagatgcagttggggaaacaataagcactttgaagtttgcagagagagtagctacggttgagcttggggctgcacgagtgaacaatgatacttcagatgttaaggaactcaaagaacaggttttttttttctctttttgcattaactgaatctgatggtttcactttcttggttgatagtatttgattgtctcacacacatgggcttttgctttgtttacagattgctactcttaaagcagcactcgcgagaaaagaagcagagtcacagcagaacaacatcttgaaaactcctggtggctctgagaaacacaaagccaaaactggtgaagtagaggtgattcttcttttctcaagcaccttctctatgatttaaaatcagatctcaaagtggacattgttttctgagtgattgcagattcataacaataacatcatgacaaagaaatctgagagttgtgaagtggaggagattacagtgaactcaccaccttggccaccagtagcaagtccaggacaagcctacagagaggatgaccgaagtttcgggtccagcgagtgggttgacaaggtgatggtgaataacagacaagacgagatgagaagagtggagagtctttggggaggagccacaacagagaatggtattggtattctgccggaagatttttacaggagagatttggcttcagacacttcaagaatattctctgaacattcttacaacatcttcatgggaaacaacaacagcacagacgatctagatgcagccacaagtgactcatctgagccagatttgctctggcaattcaaccagtccaccaagatacctacaagaagcaatattgagtcaaaactcaagaaacccgtctcaaaacctataagaagtcctcaatccaggtaagtgtcctttactcggtcaaaaactaaatgaaacaacaatatagaaaatctttaacagtttcttttgaatggttccaaaaaaaatgcaggaacaactcaaacaacacggtttcacgtcctttggcttcacagaaggtagggaatggtcctcgtggcatgaaacagttcggtcctgctgatatgaagcggaaagctactaacgccagacattgaaggccactcactcacacggatacatacatacacactcacatggcttcttattggttttgatttgtttatttttcatccattggtttttattgtttcttcttctctcgtttggttgtgcgagcttttatatacataacacagacaaagacaatagctagacaatgcaacaacagtttcttcttgttgctctctttcttgggttttgttttacttttctgttctatgtatattcttccactagctgaacataaaaaatatgaaagatttgtttgttaactatttgcttgagagtttttttagtatattctataatgcttcaaatcagagacttgttgcatttcttctaattagttacaacttttgcaatctttgctagtataaaaatattttattagaaatatgtaaaatttgggaaagtattatttcacaacagaaaaaaaaaaagcatagtacttttcaaatatcgaccaaccttctgattcgttgaatccgtttctcgaatattataattttatttttgttgtttgccctatctttctttctccctctgctcttgtgcaacttgatccgtcgtcttctctcagctctccatctccgtcttccaaggtttttgtttttgctatttacgtttacagattcgtaatcctatcctggattgagaaatgcgtagtttgatgattcttcgctcgcctctttgttgactgcagttttactgtcaggtagaagaatccatg

SEQ ID NO: 17456 - DNA, 3003 bp, Unknown; identical to SEQ ID NO: 17455
  misc_feature (1)..( 3003): 2750-1469P.txt file - cDNA_ID_1809138; gDNA_ID_2214497; Annot_ID_183865

SEQ ID NO: 17457 - DNA, 3000 bp, Unknown; identical to SEQ ID NO: 6776
  misc_feature (1)..( 3000): 2750-1469P.txt file - cDNA_ID_1809157; gDNA_ID_1621105; Annot_ID_55966

SEQ ID NO: 17458 - DNA, 3000 bp, Unknown; identical to SEQ ID NO: 6776
  misc_feature (1)..( 3000): 2750-1469P.txt file - cDNA_ID_1809157; gDNA_ID_1621105; Annot_ID_171557

SEQ ID NO: 17459 - DNA, 3000 bp, Unknown
  misc_feature (1)..( 3000): 2750-1469P.txt file - cDNA_ID_1809195; gDNA_ID_2910741; Annot_ID_193676
tatatactatatttataaaaaggagcaatacactttgtcaaatttaatccgatcttttagtatttcaaaattacgattattaaactagacctggtttgcttggaaaaactagatctactcaaatgttatcttacctaacctaattttgtatcgtttgggtgagaaatggtggctcgcttctaacaagttttcttcttataatcgggactcgggtagaatcaacttcaaggagattaaatttaaacattcgtaaacgtctggaaatcaaaataataccataaaattgggggaaaaaaaaagaacaagatcatttttcggccttcattattttcttacccaaaaatctttttttcttcatgctttcatgatactaaatattttcattaaaaagtttaaattcttacatgaacaaattgtttaggacatgtgtagtgtgactaatttgttgtgctgactagtttttgtttctcggaaatggttgaataggtcttttcggaatttaacgtttgatacataaaattctttacatattgcattattaaaattagctagcttcttattaattctagaaatatcatcagtatattagttgaataatctctctttttcttggaaatggttgaataaatccagaaaatcatggccataaatcctcatttcttttttgtccgaaagtaaaaatccattctataaaatatgagccgtcaataacacagttgaaaaaaaagaaaaaagaaacagaacccattaattgttgagactttttccatccgataacgtcatttttcactaaaagaatatatactatatgtataattagaaatggatgcaatggaaaatgtgcaaatggattttaagatataaaagcttgttaccatctaatttaatcagaagtaacatgtaataaatctctaatagcaaataagatgaaaacatagaaatcaaagtgcatggaattagtctaaatttttggcagtcctaaacataatttaaaatgagcaactcacctactttaaatagttttcgttggactatatagtttttaaaaataaattgtgttccacaaacacatagagaatcagctaagtctctttcatacaatagctatagcttcaaccagaagattatataaaaaaaatactgaaaactattgaacaaaactaaagaatcaatgattagaatatatctccgtggactaattaatctcctacgaaaaggactttgaactaactaatagcttttattcactttttagctatattttttttaagtagattattttattcttagacggctttagttgatgcaaaaataaacaatcaatctattatgaatgatgacatattaaaaataaataacaaactgtattgtacaacgacataataacataacttctccatcactataacaagatagtattgaacataaatcaccatttgttatccacgaggtaccaaatgttgtctatgcgaaactaaggatcccactactatgatctaggtccattcacagaaaccctccataatttttacgttgataaaaaaagttattgtgtatagtatactgtatataccatgcattacttggctaattttatttttgttgagatgatggttaaattatattcatgatactaatatagaaatacaatggggttaaatatggatacgattacgaatacatggagcatgtgatcctcgaggacttcagatacgaatctctttttttttatttctttaatgtcaattcagtgtcaatttctatcatcaatttctttctatatggaactattattttttgttaagagttacgtctagctgattgttaacttatagactctaactaaatttattgaacttgaatattaaaaactctaatttagaagggaaaaattgttttctttttaccttttttttgttttatgttggaagatagggtaaacatgttttgtaaatgaatggatttaacattgatgaggacgaagaagacacaagacaaggtattaaagaggttaagaaaataagaagattgtttcccataaatggcgacacgtgaagtaaataactcgtctgttctgtaattaaaacgctgtttcttctttaccccgcgaacttgatgggtcaatcacatccccaataacactaatttactgtttctctgtaataataataatcattaaaatggacaaaataaaatattagtaattaaaaacagagaaattaaagagagagaatttaacgggggagaagacttttgggaatgatccgaagaaaacgggttactaaagaaaacagtggtgcggttcttaatatttctcttaagaagatctctctctttctgtttctgttttattattgttattgacacgaaaagacagagaaacaaatagaggcagagagcagaagaaagacgaaacagaggattttcatagagaatcctctttcttcctcctttcttcgccttcttctgttcttcttcttctcctggttagttttcttgatttcatggttaacaaatgattagagttttcgttaaaaacaatacttggttgtgttttcaagattttgtttcttatctttcacgtttcataaaaaattcaaatggctgcatttgttgcgtttgatgttatcgatgtttaatttgtttatttaagtattcaaaatttcagacccaagtaagcaacaaatttaagaaaataaacctcattcgattttttttcttatatgaagggtcttgaagatacatgaaacaacatctcattgttatgaatgttgatgcattcttttatgtaaacttaactttttacaggtgacctctctgaaagattgtaaggtaaaaatagtctatcttttttggcatctgatttttgatttctagacaagatcatgtatatcttggtaatggtcttattcttgttttatgtcttgatacaggttccttacaaaaatttgatttcgtttggtgaatgaaatagttagaaattctccaaaacaaaatatg

SEQ ID NO: 17460 - DNA, 3000 bp, Unknown; identical to SEQ ID NO: 5830
  misc_feature (1)..( 3000): 2750-1469P.txt file - cDNA_ID_1809195; gDNA_ID_1620821; Annot_ID_50683

SEQ ID NO: 17461 - DNA, 3000 bp, Unknown; identical to SEQ ID NO: 5830
  misc_feature (1)..( 3000): 2750-1469P.txt file - cDNA_ID_1809195; gDNA_ID_1620821; Annot_ID_169461

SEQ ID NO: 17462 - DNA, 3000 bp, Unknown; identical to SEQ ID NO: 4070
  misc_feature (1)..( 3000): 2750-1469P.txt file - cDNA_ID_1809214; gDNA_ID_1620682; Annot_ID_48358

SEQ ID NO: 17463 - DNA, 3000 bp, Unknown; identical to SEQ ID NO: 4070
  misc_feature (1)..( 3000): 2750-1469P.txt file - cDNA_ID_1809214; gDNA_ID_1620682; Annot_ID_164482

SEQ ID NO: 17464 - DNA, 3000 bp, Unknown; identical to SEQ ID NO: 4070
  misc_feature (1)..( 3000): 2750-1469P.txt file - cDNA_ID_1809214; gDNA_ID_2926181; Annot_ID_140556

SEQ ID NO: 17465 - DNA, 3000 bp, Unknown; identical to SEQ ID NO: 4070
  misc_feature (1)..( 3000): 2750-1469P.txt file - cDNA_ID_1809214; gDNA_ID_2926181; Annot_ID_200259

SEQ ID NO: 17466 - DNA, 3003 bp, Unknown
  misc_feature (1)..( 3003): 2750-1469P.txt file - cDNA_ID_1809253; gDNA_ID_2214479; Annot_ID_133220
acttatttgtaaatgcgtcacatgtcttcttcgctctgttcggctgcttcatcgagcggaagtctctagccaattaccgtttgttcgtggactcgaggttcgttgttcttagatttcccagactcatctgtttctgcaatccatttcaaagtttctctttttacttaatccaagtcattcgcgcatttcctaattggtctgaggtttagggttttagggcacatagttttgtttgattcgggagtaatcgttgagatgctacgagtttggtattcaagatgattccttttctcaaggtctttatgtaatttgattgatttatggatctcgaattgctgacatgaatttgttgcttaaagttgttggctttgtgggatattctgaggggtcttgtttgatttggatctaatttggtgggcagatattgtggtttcttagcaaagaagatgagtggagttggagagaaagcttctggaacaactaagacacctgctgatttcttgaaatctatccgtggtaaaccagttgttgtcaagctcaactctggtgttgattatcgaggtctgtctctctctctttctgcattttgtgttctcctctaagatgtatccagttcaaattctttttttttttgccttgtgtgatgatatcttatagtttgcttctgattttcggtggttattaagctatcggaagtctatgtaaacttctttatcactttgggtttagatgtctcaatgcctttctttctcgccatgttactggaacctttggatgttggtttacagaatgactcttttctttgtctaagaactgcttgcttgattctcatttgatttgaaagtcccatctctgaagattcatttttgttgagcttgcttgttttttccctatcttgtctctgtgtttgagaaggaataatacatttcggcttgagatatttgctttggattttgagaaatataatctagatgagcaggaaattaacatacggctttgaaacatatgctttttggaatttgagaggaatattagattcagatgatagctttgtgaattgagagagcttctctcatgagataacagacccaaatgtggttgaatttgagatgcatttactcttgcttctgatagaatatggactctcaccttgctatggagcctttatcacctgaaattaagaccttggtctcttgaactctataatataacttacaggactaggagaacttctagcttgaatatctttctttggtttatctacaaaagtcagacttattctttctttggcatatcatgttgtatcaatctacatatgacactttgtctctcttcttgtttgcaggcattcttacttgtcttgatggatatatgaacatcgcaatggagcaaaccgaagagtatgtaaatggccagctgaagaacacatatggcgacgcttttgtccgtggcaacaatggtaaaaaccaaatcacattcatcatcactctttaaatcggtttagtatgtttttttatatccaattctgaaaaatatgctctatgttggccacagttctttacatcagcacaacaaaggggacattgtcagatggagcatagctctctttcatcaccatgaatgttcatcttcttctctacctctggcatatgacaaatgtaggatttgtagcaaccagagtttatcaccactgcatgaattcgacatgtctttttcttccgcaactcagtttgtgtctaaatcatctccaaaattctgagatatagctagatttttatttgttatgaaattttttttaatcactgttggtctttggagcctaattatcgtgttttgatgacgcaatcactgcgtcacaatctgatgtcatcttaacaatcattaatgtattttttttttcttttctcgtaatattcttaattattcttcgacagcaaaggtttaaaaactccttatttcaatcattaatgtatttatgatttgatcgaataacaataatatagcttattttgttctattctatcgtatttgattcttctttcgttttttttttgtttgacttaagaaaccgattgtttatagtagtaaacatttgtttttaatgttgctcgattccagtgcacatgtccaggctagacacttgtcgttataaaggttgctttggttcaatattgatccactagagatgttacaactattgttgacatctgagattgtgtgataagaaaatatgaaactggatttagtgaaagttacaatatataatcatacatcatagataggaaataaggaaatgtcagatatacttgaagaatacatcaaatagacaaggtcctttttcttattgtcgactattatagagccgtacagaaccttttcacgtctttagtaattagtacattctccatttcggctctctcttattttttttccatctcttttacttctccaaataataacaataaaagcttcgattttgtgtgtgtttgtatttacatcttgacatcgatattcttttcatcaattttttaccaaaaatgtaataaaaacaaaaaaaaaccaacgctgaacacagacatggtttctccatccgtttatattcatcgtttgtatgtttacttaacaacttatttcaaaatagtacatatcatggttgtgtttttaaaaaaagtatacagaacagaaaagcacatggtagacaaaataatgaagccaaaattaatacaaagaagaagttcaacttgtatttattaacacattttctttccttgtcaaagacatgcaaattggttttgttttcttattcccattttttttttataataaaaagaagaagagtaaaacaaaaaaactatcatttcttcttatcgcaaaactcttatctaagcaagaaaccgacaaaacctatatctacatatattctcatcaacatctcttgagacatattcattttggttaaagcaaaagattttaagagagaaagggggagaagtgagagagatg

SEQ ID NO: 17467 - DNA, 3003 bp, Unknown
  misc_feature (1)..( 3003): 2750-1469P.txt file - cDNA_ID_1809283; gDNA_ID_1621163; Annot_ID_57165
ttagatcgacgaatcgagagttcgcgaagcttcccggaggtaagtccgactaagtcggtggcggcaaccaaagcttttttccctgaagacgttattaaaccttcgagatctccatttctcgctctttgtaactccggtgactgattatagatctctttcgctacaagcgaaacaccattgacgagcctggtaaagctcttgctccacgaactcatcacgaagccgcgtgcaaagttactcttcttaatcgtggatttgactttcctctttttttttgttttccatttttgtcaatttggttttgaagaattttctcgagaaagtatataatgtgtgtgtttttgcgttagaccacgaagatcggagacgtcgacgaggaaccgaggtttacgtggggagccgataaccagaaactgctcctccaaggtttctagtttcggccggcccaattagcctattctttttttattgtcaccatataaggcccattgggctataaaggagttttacgagtagcttccttaaccatttgtgatgttttgttggattgctcccgtaacatgtagttttaattgtccaaatatatttcatcaatttatgatgtgtttttttgtgtgtgataagaatgtaatgttaataaggtttaggaaacgacatcagtaagatcctagatacattgtcccatgccgaaaaggtaaaaaatatggaagcatagacaatcgagaattagatcatcactacatctttaagccgtgaagctttagacaaagctatgaaatgaacgcgataaaaaaattcctctaagcaaaacatggcaagaaacaagagctataaaagaaaaagaaactttaaaatgattataaagcgaagcgaaaatcccttcaacgtgagccccaacctaagaaggagcgatgcaacatgagctaaaggcggcaggcaatgctgttttctaccaacatccccaatcagtagcatggacaaagcaacttcttatcctccaaaagtcatactaacatcttcagaacactatgaaacaatcctataacacctcaaccaaattgaagcttcagaagacatatactaacacctccaatactaacaatttatgatgttaatcaccaaaaaatattttaaagatatgtatgtattagtaatacagtatcaccaatctttggctggtctaactcaaacatttagagagagaccgaacttaaataagagagactaatggttgtaaataatgagattcatgagactagcaaatcttcatgtctaagttgaaaattatcggatccgtcatgtgaaatccaaaaataacgatacagttttgttttctcagataaagtgaaagtcaaaccaaaaaactatataattggctgctttacattaacagtagaaaaccaacaataattgaattttatgctgctactaccaatgttgtaatatgtataagcgttcattatttaaatttatatacaatggccgccaaaaaaaataaaaatatgcttaagtacaatgcatctccactcataaaaggtaacacgagaaagaaattatataatacgaacaaacaaaattgagacccctaagtaaatatgaaaatcatctttgaaactattaatcttctctaactaattttcttaacgtaaaagaggactttattttaactttcggtgatattactccaatcttagggtacgaacaaatattgttattaaaccatttcgaatataaaattggtcaagccactcagaattgtcaggatggtaggcaatatagtatattggattaattaaaaactataacacagtgattagttggcattaaactacaggtggtcatcattttgtctatacatataaaccaaattgtatttagtcttgagatcttcaaaaacatctgagagctttgacaaaaaaaaagacgaagagaaaaatgtccattagagctcaagaaattcaaacccttgaaggtatagtaactctcaatctctctcttttaagttttaacggtttatacttttaatccgttttacatcatttgttaagcttttgctaacctctctaagatcctgagatccaaaaacatacttaagattttgatccacctggtttatattccatctcttagaagttttatttgctttctagattagatcggtttgactatatcgatcatattatatttgatttataaactataagtataagacttctgtttaggtgaaaatcacaagtcctttagtgatattgttgaagatttcctcttgaagatcattagcacaagttaattcaaatccgttattgtttaaagatcatcaacctaaaacattgccaataagtttcctcaaaagttcatttggatctataattttagttttttttttgtcttttattttcataatgcaaatagagagtcaatgacaatttagtgaaagatatatagttaataactttaagtgggtgaataatattggcattttaaatttacataatttatagtggaagattcaattaatacgtcatattttaattttcttttgggggtattttcattatattaaaaacttttaaaaaagttttttttttattttaatttaagaattataaacttataatatataaagttacatccgaaaaagaagagaaatttattctaaattgtagaccgaaaatgtataaaaatacctttactttaacaaaaaaaaaaaaaaaaaaaaatacctttaaaaaatatctataaatacacagcacaaacaaaacttttaaatgtttccaatctaggaaaaaaaaatattttggtttcgacgtaaaaaagaataatattgtagatagaaaacattttgaaaagtttttaattatgaatatatttaattaaatccataatttatatattttaaatgggcccattttgactttaagaaaatataaggcccaaatagaaagcctatagctcaaagcaagcctgcttttagaccgctttccagatctagaagaaacaatg

SEQ ID NO: 17468 - DNA, 3003 bp, Unknown; identical to SEQ ID NO: 17467
  misc_feature (1)..( 3003): 2750-1469P.txt file - cDNA_ID_1809283; gDNA_ID_1621163; Annot_ID_173766

SEQ ID NO: 17469 - DNA, 3000 bp, Unknown; identical to SEQ ID NO: 7792
  misc_feature (1)..( 3000): 2750-1469P.txt file - cDNA_ID_1809286; gDNA_ID_1621163; Annot_ID_57164

SEQ ID NO: 17470 - DNA, 3000 bp, Unknown; identical to SEQ ID NO: 7792
  misc_feature (1)..( 3000): 2750-1469P.txt file - cDNA_ID_1809286; gDNA_ID_1621163; Annot_ID_173765

SEQ ID NO: 17471 - DNA, 3003 bp, Unknown
  misc_feature (1)..( 3003): 2750-1469P.txt file - cDNA_ID_1809286; gDNA_ID_2926161; Annot_ID_139726
ttcgaattgaatcgcggagaactgtcgccaaatcggcaggtgaaacatctacgagaagaagctagcagtgtcgaggaaggcgaaaaagaggttatcaggcgatattttttagtcggagagtgtgaattcgttaggccggaagtggtggctaacgcggcggcgcgtgggtggtgaaaggcggaagagaagtctaataagatcggagaagattgcattgtttcttctagatctggaaagcggtctaaaagcaggcttgctttgagctataggctttctatttgggccttatattttcttaaagtcaaaatgggcccatttaaaatatataaattatggatttaattaaatatattcataattaaaaacttttcaaaatgttttctatctacaatattattcttttttacgtcgaaaccaaaatatttttttttcctagattggaaacatttaaaagttttgtttgtgctgtgtatttatagatattttttaaaggtatttttttttttttttttttttgttaaagtaaaggtatttttatacattttcggtctacaatttagaataaatttctcttctttttcggatgtaactttatatattataagtttataattcttaaattaaaataaaaaaaaaacttttttaaaagtttttaatataatgaaaatacccccaaaagaaaattaaaatatgacgtattaattgaatcttccactataaattatgtaaatttaaaatgccaatattattcacccacttaaagttattaactatatatctttcactaaattgtcattgactctctatttgcattatgaaaataaaagacaaaaaaaaaactaaaattatagatccaaatgaacttttgaggaaacttattggcaatgttttaggttgatgatctttaaacaataacggatttgaattaacttgtgctaatgatcttcaagaggaaatcttcaacaatatcactaaaggacttgtgattttcacctaaacagaagtcttatacttatagtttataaatcaaatataatatgatcgatatagtcaaaccgatctaatctagaaagcaaataaaacttctaagagatggaatataaaccaggtggatcaaaatcttaagtatgtttttggatctcaggatcttagagaggttagcaaaagcttaacaaatgatgtaaaacggattaaaagtataaaccgttaaaacttaaaagagagagattgagagttactataccttcaagggtttgaatttcttgagctctaatggacatttttctcttcgtctttttttttgtcaaagctctcagatgtttttgaagatctcaagactaaatacaatttggtttatatgtatagacaaaatgatgaccacctgtagtttaatgccaactaatcactgtgttatagtttttaattaatccaatatactatattgcctaccatcctgacaattctgagtggcttgaccaattttatattcgaaatggtttaataacaatatttgttcgtaccctaagattggagtaatatcaccgaaagttaaaataaagtcctcttttacgttaagaaaattagttagagaagattaatagtttcaaagatgattttcatatttacttaggggtctcaattttgtttgttcgtattatataatttctttctcgtgttaccttttatgagtggagatgcattgtacttaagcatatttttattttttttggcggccattgtatataaatttaaataatgaacgcttatacatattacaacattggtagtagcagcataaaattcaattattgttggttttctactgttaatgtaaagcagccaattatatagttttttggtttgactttcactttatctgagaaaacaaaactgtatcgttatttttggatttcacatgacggatccgataattttcaacttagacatgaagatttgctagtctcatgaatctcattatttacaaccattagtctctcttatttaagttcggtctctctctaaatgtttgagttagaccagccaaagattggtgatactgtattactaatacatacatatctttaaaatattttttggtgattaacatcataaattgttagtattggaggtgttagtatatgtcttctgaagcttcaatttggttgaggtgttataggattgtttcatagtgttctgaagatgttagtatgacttttggaggataagaagttgctttgtccatgctactgattggggatgttggtagaaaacagcattgcctgccgcctttagctcatgttgcatcgctccttcttaggttggggctcacgttgaagggattttcgcttcgctttataatcattttaaagtttctttttcttttatagctcttgtttcttgccatgttttgcttagaggaatttttttatcgcgttcatttcatagctttgtctaaagcttcacggcttaaagatgtagtgatgatctaattctcgattgtctatgcttccatattttttaccttttcggcatgggacaatgtatctaggatcttactgatgtcgtttcctaaaccttattaacattacattcttatcacacacaaaaaaacacatcataaattgatgaaatatatttggacaattaaaactacatgttacgggagcaatccaacaaaacatcacaaatggttaaggaagctactcgtaaaactcctttatagcccaatgggccttatatggtgacaataaaaaaagaataggctaattgggccggccgaaactagaaaccttggaggagcagtttctggttatcggctccccacgtaaacctcggttcctcgtcgacgtctccgatcttcgtggtctaacgcaaaaacacacacattatatactttctcgagaaaattcttcaaaaccaaattgacaaaaatggaaaacaaaaaaaaagaggaaagtcaaatccacgattaagaagagtaactttgcacgcggcttcgtgatg

SEQ ID NO: 17472 - DNA, 3003 bp, Unknown; identical to SEQ ID NO: 17471
  misc_feature (1)..( 3003): 2750-1469P.txt file - cDNA_ID_1809286; gDNA_ID_2926161; Annot_ID_198781

SEQ ID NO: 17473 - DNA, 3003 bp, Unknown
  misc_feature (1)..( 3003): 2750-1469P.txt file - cDNA_ID_1809296; gDNA_ID_1621163; Annot_ID_57161
aggcatcaagtaataatacataagagggaatgatggatcaaacggtgttgatggtatcagtaagacatcggagaatgcaaccgagaccagctctctcagtgagtttctcgtgaatcttcaggcactgatcgcaggtgggtcggtccccagtagaaagtcctctgtacaagtacctgagaattttaagcaaaaacattctatcaaagagcacagacagcctgaggatagagctttccaattcatacatattacaaaacgcattacagcaaaaaaaaaaaaaaccaactttgcacttacttcatgagaatgtcgtaatattcgacatcaagagcattgagcattccgtcaatatccttaatggccattaaagctctgtgcacaactatccaattagccgactgcagttgagttttttttggctcagtaaatcaaaaaaaaaaaaaaagatggtttcggaaagagagagaccttgcaacgttcatcgcgagttttcggaggcgaaccttcaagagccgttttcaaagcttctacatgtttgtacctgcacacattaaaacaccgataagggattaaaccaaaaacaaaagaagactttagggtttagctccaaggtctgatattactgtttgagtaggctttcaatcttcctcgatttggtttcgatcctcgcgattattgcttctgcgttatcagcttcaacgaattctgccattcttcgattcgatctttctctccgatcagagatttcccctctttcccttctttaattgaaaaaatgagagagagagaggaaaacaactcaatcgccatttgaccatttcaaaagggaactgagtgccgtttgtcttggccttaaacggcacgtagtcttaaatgcttatgctgccactgaatgatggatgatggaagcttcattttttttttcattttttgtcaataggattttcatcgataggattcaagttgaaatacaagagccggcaagtacaaaccacttccggagacataagccgatgagtacaagaacactcccgaagccaaataccaaacaaggtaaacaaagggaacaaaatccaaacaaaccaattacactatattcattgaaatttcctcgatcaggttctagaaatccaaaaaagacttacaaatcctaagtcatagaaaattaaaacaaatctgagactaaaaaagacacacaaacgggttacaatacaagaatctccttttctttcttggtataacaattttttttttattataaatctctcttataaatttttaatagtaatatttgttggaccgaattttttatatttatactaatgaacttttctttacgattttgttaccattttggtatcatttttacgattttaatttattaacctccttaattaaaatcgcaacctattctattttattaacacaggtcaaaatatatttttttctgcgctcgaccctaatatgttaacaaaatggttgtttctgcccaaatctcattatatttgtatggatagacgaagagcattttgataatactcttttggaatgtttctttatcattctaattaggatcctacatcgaaagtatactataaatggagtaaacacactcatgactgctaagtgctaacactagtatatatggaacacaaccaatccaatcattacccattggttttaaattagaatctgatgaaacttaacattaactttctctaatcattaatgatattggtagtcttataacaaatatattgccaagattcggtctaagaccacttgatagaactatgtataaaacttcttttttttaactgccaaacctatataaagtggacgtgtaaactaaagcatggtgatcacttcacatcgcaccaatgtagtggatctaaacgtctctttgtgtaatcacgtggtcgaattaatggtcaatcatttagcaattaaccaaatttgaaataacatccgaaaaaagtcggtttagtgggaggagaagtgagaatgatgtttcatgaatgctcgttaggaactcttcgaaagacgataacctcggatggatgtttatggtgtcggcttctagtggttaaacataattagatcgtctactgaaaagttggagatgtggttgagaaactcgtaccctacatatggttactcgtctgctggtttaatcgttgggattgatcgtgtactagtctttcttaaaggccaagaattttgtcgtcgtagttaatatatgttggcgtacgttttactgtttttcttgagaaataattggatcttaagcttattaaaaaagtcgtcacgacttggtccaactcgtacatatcacaagttgctcggcgcttttcatgttagttagccaccgacctcgaactttgaaattttatattttttaacttcaaaaacaattctttgatagttttgttttcattgctaatatttctctcaatttttttttattgtttttatttttgtatagaatagtattcaaaatgaaactataattcagtatggaacactttctgttttatttaatatttacttcataatgaattatgtttcaaattttcaaagaatatatttatatttgaatttggttagtaccttccaaagaagcttaattccccacattaaaattcaacttggtcttcatattaacattattcaattgaattcagactgaaatggttcactttatctggtttgaaatatatgtcatgcattttccaaatcaagaatgaatcttcttgaaagaaaaaaaatgagaaaaaagaagaaggagaggaatgggtctcctaacaatgaaaaagagaataaacccttaaataattgcaactatataaaataaaaagtataaactccactaaaaaaagtcaaaacgtagaccaaaacaaaaacatgtaactaagtcgtccactactacatctctatgactctatataacaacaaagccaaaaccacatcttctcacacaaaacacaaaaaagaacaaatatg

SEQ ID NO: 17474 - DNA, 3000 bp, Unknown
  misc_feature (1)..( 3000): 2750-1469P.txt file - cDNA_ID_1809296; gDNA_ID_2926161; Annot_ID_139730
catcaagtaataatacataagagggaatgatggatcaaacggtgttgatggtatcagtaagacatcggagaatgcaaccgagaccagctctctcagtgagtttctcgtgaatcttcaggcactgatcgcaggtgggtcggtccccagtagaaagtcctctgtacaagtacctgagaattttaagcaaaaacattctatcaaagagcacagacagcctgaggatagagctttccaattcatacatattacaaaacgcattacagcaaaaaaaaaaaaaaccaactttgcacttacttcatgagaatgtcgtaatattcgacatcaagagcattgagcattccgtcaatatccttaatggccattaaagctctgtgcacaactatccaattagccgactgcagttgagttttttttggctcagtaaatcaaaaaaaaaaaaaaagatggtttcggaaagagagagaccttgcaacgttcatcgcgagttttcggaggcgaaccttcaagagccgttttcaaagcttctacatgtttgtacctgcacacattaaaacaccgataagggattaaaccaaaaacaaaagaagactttagggtttagctccaaggtctgatattactgtttgagtaggctttcaatcttcctcgatttggtttcgatcctcgcgattattgcttctgcgttatcagcttcaacgaattctgccattcttcgattcgatctttctctccgatcagagatttcccctctttcccttctttaattgaaaaaatgagagagagagaggaaaacaactcaatcgccatttgaccatttcaaaagggaactgagtgccgtttgtcttggccttaaacggcacgtagtcttaaatgcttatgctgccactgaatgatggatgatggaagcttcattttttttttcattttttgtcaataggattttcatcgataggattcaagttgaaatacaagagccggcaagtacaaaccacttccggagacataagccgatgagtacaagaacactcccgaagccaaataccaaacaaggtaaacaaagggaacaaaatccaaacaaaccaattacactatattcattgaaatttcctcgatcaggttctagaaatccaaaaaagacttacaaatcctaagtcatagaaaattaaaacaaatctgagactaaaaaagacacacaaacgggttacaatacaagaatctccttttctttcttggtataacaattttttttttattataaatctctcttataaatttttaatagtaatatttgttggaccgaattttttatatttatactaatgaacttttctttacgattttgttaccattttggtatcatttttacgattttaatttattaacctccttaattaaaatcgcaacctattctattttattaacacaggtcaaaatatatttttttctgcgctcgaccctaatatgttaacaaaatggttgtttctgcccaaatctcattatatttgtatggatagacgaagagcattttgataatactcttttggaatgtttctttatcattctaattaggatcctacatcgaaagtatactataaatggagtaaacacactcatgactgctaagtgctaacactagtatatatggaacacaaccaatccaatcattacccattggttttaaattagaatctgatgaaacttaacattaactttctctaatcattaatgatattggtagtcttataacaaatatattgccaagattcggtctaagaccacttgatagaactatgtataaaacttcttttttttaactgccaaacctatataaagtggacgtgtaaactaaagcatggtgatcacttcacatcgcaccaatgtagtggatctaaacgtctctttgtgtaatcacgtggtcgaattaatggtcaatcatttagcaattaaccaaatttgaaataacatccgaaaaaagtcggtttagtgggaggagaagtgagaatgatgtttcatgaatgctcgttaggaactcttcgaaagacgataacctcggatggatgtttatggtgtcggcttctagtggttaaacataattagatcgtctactgaaaagttggagatgtggttgagaaactcgtaccctacatatggttactcgtctgctggtttaatcgttgggattgatcgtgtactagtctttcttaaaggccaagaattttgtcgtcgtagttaatatatgttggcgtacgttttactgtttttcttgagaaataattggatcttaagcttattaaaaaagtcgtcacgacttggtccaactcgtacatatcacaagttgctcggcgcttttcatgttagttagccaccgacctcgaactttgaaattttatattttttaacttcaaaaacaattctttgatagttttgttttcattgctaatatttctctcaatttttttttattgtttttatttttgtatagaatagtattcaaaatgaaactataattcagtatggaacactttctgttttatttaatatttacttcataatgaattatgtttcaaattttcaaagaatatatttatatttgaatttggttagtaccttccaaagaagcttaattccccacattaaaattcaacttggtcttcatattaacattattcaattgaattcagactgaaatggttcactttatctggtttgaaatatatgtcatgcattttccaaatcaagaatgaatcttcttgaaagaaaaaaaatgagaaaaaagaagaaggagaggaatgggtctcctaacaatgaaaaagagaataaacccttaaataattgcaactatataaaataaaaagtataaactccactaaaaaaagtcaaaacgtagaccaaaacaaaaacatgtaactaagtcgtccactactacatctctatgactctatataacaacaaagccaaaaccacatcttctcacacaaaacacaaaaaagaacaaatatg

SEQ ID NO: 17475 - DNA, 3000 bp, Unknown; identical to SEQ ID NO: 7786
  misc_feature (1)..( 3000): 2750-1469P.txt file - cDNA_ID_1809299; gDNA_ID_1621163; Annot_ID_57160

SEQ ID NO: 17476 - DNA, 3000 bp, Unknown; identical to SEQ ID NO: 7785
  misc_feature (1)..( 3000): 2750-1469P.txt file - cDNA_ID_1809307; gDNA_ID_1621163; Annot_ID_57158

SEQ ID NO: 17477 - DNA, 3003 bp, Unknown
  misc_feature (1)..( 3003): 2750-1469P.txt file - cDNA_ID_1809307; gDNA_ID_2926161; Annot_ID_139734
aagatgatgattctgttacacctgatcctaaagaggaagatgatatctcttattgttcactttgtgatttagaggtttgctttcttttcttcactagtatttacattagcaatcacttttatttaaaagctaggacttatttagacgtttctttgtgtgttttgcttaggttaaacgcagcagtaagcattgcaggacatgtaaccggtgtgtcgaagggtttgatcaccattgtagggtaaggttttgggggttctttccacctgaatcttacagtttctgagtttttgaaactgctaatctttgtgtgtatttggtgtattcagtggcttaataactgcgttgggaaaaagaattacacgacgtttatactcctgatggttttcgtcttgcttatggtgtgtgttgctctctcaactacttgaaacgtaaaccttaaaagttcttgttcattgaaacaatgatatagacttgcttttgttgcaacagctaataatagaaggtggaacagctcttgccgtatttgtcagatgttttgtggacaagaaaggaatggaaatggaattgaagagaaggctttatgtagagttccctcaatgggctcttgctacaatatctgtaaagtttcatatacatatgctgcttcctcatgacatctacgtagcttctttttgtttatgagtttatgatgttttgtcctcttacagattatcttggtcttgttcacggcttatggctcagccgccatggggcagcttttcctcttccatgtagttctcataagaaaggtaactcttacaggtgaatgaatttgatttagagttctttatttgacaagtagtatcaaacatttgcaggggatgagaacatatgactacatattagcgatgaaggaggagaatcaatttacagaagtggacccttttgatgaattagattcgtcttcagatgaaagctcagattttgattcgcctgaaagattaagaccaacgtttatctccaagtttatgtgcaggaaagcaaatgaggtgattcaacttctcatttctccttgtattgttgtcacttttaaggactctcaaagattatattttgtgttttaacagaatcagcagagactatccataaaaatagaaggagatgaacagtcaccttcttccacgctgatcaacaagaaaccggggtttcatgtaagcataaacccatggaaactgataacattaagcagtgaaaaggctctacaagcagctgagaaagcaaaggaaagactgaggaagacgaaaccagtttccgggactgaagaaaattcacttaagccacttccattagagaccaaattcggacttttgttagatcctgacaataacaacactgtgttgcaaccatcaacaactgcagcagtaaagcttcaggtttcacctggaagattctcaagcccacgaagaaggttctcaggctcttcatcttcaactgtgccttcgccgaagcaaaaatacagaactaactttgacttgaagctaactgaagtctctagggagctggaaagttacatctcaagacaggttttatgttctgtgataaaacaagatggaagtgaagcatcaccaagataaaaaaaaaaaaaaaaactgtatttttgggtgttgtgcattaactctgttacttactttctggttgtttgttctcagtctctgagaaatatttaagatctgcttaaacttttgcctcctcttgttcaactttataccgagtatatatataaatatgttcatcatgagatgcaaaaatgtggttatttattaaaattaaaaagtaggacataacactctactaatgaacgcataaagaaacgaatggaattttaaactaaaagtttcctaatgaagccataaacttagcatcttcttctgttgtgttttgtacaagtaataaactagcaatctctggatccatctcttgaaacaattcgttgtgagtagtggctgtttcacaaggttgctgctgttctgtggtttgattcatagtcatcaccggaacattgttttgttcctcaagttgttgttgagaagccaagtttccaaccacattgtgttgttgttgagtctccataggaacgactgaaagatcattgttttgatgatatggctgacagcaatgtcgttcatctatggcttgattcatcataactggaagctgtgaagagagatgtgtggcttgtccaataatcttgttttgttgttgctccattgagaagtgttgatcttgatgatccaatatgtattcttcttgaagctccattggaagttgtgagggatctgtgtcttctactaaaccttcaaaatcaatccaagtatggaccagaggttccaatccgctgatgctcccccatggcttgagccgagagtgaaggatcagtctcttgtctacaaaactggttctggttctcagccatgtttccataaccataattctgatgcacaaggttgctgcggttctttatgagtcaagtgtggtggctctttggtttggttcattgtcataaacagaacatcgtcttgttggtacgtctccataggaaccactgaaatatcattgttctgtccaagagactgatgatatagttgaccataatgctcctcctccatggcttgcttcatcttaactgcaagctgtgaagaattaaaaattatggatcatgccgattgtcacactaaagaataaaaaaattgactatttcttacaagttacaagtggttcattttaataatgattagtgatatatatattgtcacttgtcagtatcatactatcattattgttaatgaaatattataagagcatcgttgagatcaacggagaagacttttgacttttgacttttgagagagaaagaaacccgagatttcagatccaacctttttcttcttccaaatcttgaagtatatacttttttagattcaacctattttcttcttcttcaaaatcttgtagtttacgaccatg

SEQ ID NO: 17478 - DNA, 3003 bp, Unknown
  misc_feature (1)..( 3003): 2750-1469P.txt file - cDNA_ID_1809323; gDNA_ID_1621164; Annot_ID_57185
taccggtttggttccggttattttacccaaaataccaaaaagaaaaaaaacgaaataaccaaatattcgattaacaaaattgtaaaatattaaaaaattaacaaaactctattgggttataggtttgttaaaaatgtagtgggcttagatgtagttttgtatagggttgaccaaatattttttggttagattttggatttccatagatattcggtttgttcagttatacataatattcaatggatagtgtgactgaaatccgttcgaggatatttagtattatctagaaccgaaccggattcctttttcggtttggcttggttcggttcttcggttccggtttttatgcctaagccgttctaacttctatggttaattgaagaatgtgaaatggtggttaatattcaagaaattttaggaagccgaagtactaaatttagatactgaagaaaagaagaagaagcataagaagaggcctaaatgcccagagaattaaacaaatgggcctttaacaatatttttaacaatcagatctcaaaaagctaaagccttaatatataaacaaacatcaatctctggccgtcaaaggttacatctatcgccgccgctgagaccgccacttaaggccgtctcctccgcaatctccgtaaccaaaaccaccggcatcgcctggtaagctcgattttgtaatcatttcgatctcatatgatgtcgatctgttaaatcttgcgaaatcgatctttgttttgttctgagatttagggtttcacgaatttgtgttctaggttttctggcttaatcatttctattgttttttgttcttattggttcttatgcttttggtgacacaaagatctcgactttttcttgactctctatgcgaatttgtcaaaagtcaaaactttgtaacagtttactctctttcgtgcttgtgtttatgtatgaacaatagcttcgctattgggattgtttatttcaccacacttgattaattatacatactattgaaaatgttatcaatcttggcgataaaaaccgtcattttcatgtgtcttagctctagtagcaccttttgtttagagatcctgagtttaaagaagcagtagctagcatctttggtatagtaaattgtttcactgacaaattgtatatcatttggttataactagattagtgaaatttaatggatgagattatgtagcattgttttaattttgtatggagagaactggtggtgggcttatttccaaaattttcctttgattaagtcaagaccctttattttgagaagtgagagagaggattgtctgagtattgtcgctttctcaaaatctttccggggctaagcagagaaaagctgatagttaagcttaggaatgtgatcttggtcttttaagaatcttgaaactagtgggtaacttggatccatcgaatttgttttccgtaggtgagtgttctttagcctatttctgagtctgaattatacagtgtagacatgaaaataggtttttatgtgatggactcttttgttttatggtttaatggatatgttgagttttgtttttcccatgagtctcttataaagttggaatttgattcatggaatcttggatccagattacttcgaatatataaatgaaagaacacttagatgtatcaaagggaacttaagcgtgtgtactgtttagtgtctcacaacttggaatttggattagcgctttcatgttttggagtttgatttatattcgtgatgtttggatttggatagtaccttggtccattgaactatgtatcataataatgctttggatatggatatcgttttgatgacttacttgataactgctcatacttaaaaaacatttgttctagaaatctagattctcgtctatgagtgtttatatgttgaattcatgtcgaagtcatagtttagagatctcattgagcatttccccttcggaagagtgaggagtcttgttttggggattctttttagggctagacctgtgaggaccttcattaattgagttcgttttattttgtacccaaatatgttttttcggcttatcccattggcattgaaaaagttattgtttacattaaaatgttatttttttctttcattgagattaccttgctagtcattggattttatcggttttaaacttttaatagctgaacaaaaggggttttattctaatgtttacttaacactagtctggtcataaacaagtataaattttgggtttaagttatacttcttttattggaaatacatatcaaattagggcgtttcatagatagttgatatattttcttcacttgcatgtagttatgttcggtattatcgagaacttactgtgtttgaagttcctcggcaggaaaatcctgtagagtttgagccaatgttgtcggtgtgaacctcaaaagttgtgggtgtttttcccgccgataaagctgctggcaagatgggttggggttgggtagaatggtgtgtagggcaaggtaaggatgcttcacttacaaaagaatcatttagaaccgtttctttctttgggatctaaatgtgtttttttcggcttatcccattggctttgaaaaagttctctagtttgtttctttgtactaggagcattcttaccattctttaaacattgggcagtgaaagatattttcttggattagtattctgcttcttgtggtgttgtgtgacactcctagactatgttatttcctgttaacactgtctttgtaggacaggatgtgagaaatatgctgtttctgcaggataccctgaatttaccagtttaccggaatcatatcagaaacataaactcttatgttacaaaattgtaatggattagttgatgcgcattctgtgttttttcagttgtaaatttgcagaattgttgaatgttgattgctcgagaagagtcttgtgagtgaattctatttcttaatatatctgattatcgtttttgttgttgatttaattagcagatg

SEQ ID NO: 17479 - DNA, 3003 bp, Unknown
  misc_feature (1)..( 3003): 2750-1469P.txt file - cDNA_ID_1809326; gDNA_ID_1621164; Annot_ID_57184
ttgtgtctctgggggatctatcaatacttcttggcaaaagggtcaacttctgcgacaaggatcgtttggctctgtgtatgaagccatttcagagtaagtcttactggttgcttatgtttgttgaacttaaatcaattacttagttttacgttatgcctttgctgatggatggttttgctgaatgtagagatggggacttctttgctgtcaaggaagtttcacttcttgatcagggaagtcaggcacaagaatgcatacaacaacttgagggggtatggaagtttcatatatgatcggcagtatatatctcattgatcagacaaaagtaggttgctaatccaccttaccttagccacatgttttcattttctacaggaaattgcactacttagtcagcttgagcatcagaatattctgcgatatcgtggcacagacaaggtatggccctggtgtccctttcttgttctcagttgcagttgcctaagcattttgttctgcaattaataacttatttcgttgtttgcaggacgggtcaaatttgtatatttttcttgagcttgtaacacaaggatcccttctagaactctaccgaagataccagattcgggactcgctaatctccttgtacacaaaacaaatccttgacggtttgaaatatcttcaccataaaggtttcattcacaggttagactagtaaactctcttgtcacagctgtaattcccaagcctctgatttcctgcacatcctaggttacttacttttctcatctgatgcgacaaagggacattaaatgtgcaactatattggtggacgccaatggcaccgtcaaacttgcagattttggattggcaaaggttcttttccaataatagatgtttatagcttttactctaacttaattacttggtccatcgtttatcccccttactcaatatatatgtcatttttttcatttaggtgtcaaagttaaacgacattaagtcccgcaaggaaactctattttggatggctccagaggtatacttcgggatccttcctcctgttttgattgttgtgaatacaatgacaaacatatcatatatcaatagcaatgatggatgttatactgttgcttatatatgttgttgcaaccgttgtgatatgggcttgatagcctcaaaaacccccgattatgtttccttcatagtttgattaaatttcctttatttctgtttataactgtaagtatgtttgtgtaattatacgtaacagatatatttgaattccttccactttcattgtagtttaggctatacttgatcaggttatatgttacagtttttcctaaatggaacataataatttgatcaggttattaaccggaaggataatgatggttacagaagtccagctgatatatggagcctcgggtgcactgtgctggaaatgtgtactggtcagatcccatactctgatctagaacccgtaagtcttcaggattttcaaacttttgaactgtcttataatcttaaacgacattgaagggtctacttaatgggattttatgagttaaaggtcagaatttgtgcaaacgcgcaggttgaagccctgtttaggatcagaaggggtacgcttccggaagtacctgatactttatcactagacgctcggcatttcatacttaagtgtctcaaattgaacccggaagagcgtccaactgcaactgagctactgaaccatccatttgtgagaaggcccttaccatcctcaggctcaggatcaacatctccgctaatccgtagatgaatctaattttattagattgcctccataggtgaagcctctagtttcgttttattgagaatatattaggatcaaacgctatattctaacattgatatcttaatgtatgagagcaggggtaaccagaaggtttatgagatattagaccccatagaaactttaggggagacacgagatatgattctttgatacatatgctgttttggttgcgcagcaagagctaaactttctcgagacatatcttcaggtagtttctgtctcattcattggttggttgttgtaagttgtgtcacttgtgtgtgttgagcttatatttaaaactgaagagccttggttaaattagagttttgggtgcataggtttgtttagttttgttaaattatagtatcatgtaatgtataagaagaaccttagttgatttagagtttcgggtgtataggcttgtttggttttgataaattatatagtgtatgcatgtaacccatatcatgtaatgtgtaattatagttggctcttatatagttcctgcttgttgcaactgtttacacatctcatgtctcgatggatttaatctccaatttttcttatatatatatctgaattatacatgcatacatacactataatttaacaaaactaaacttttcttttgggtgcaaaaacataacctatattcatctcttaattattttacgctgaagaaatctgctgtttcaattaaaaaagtatggtcaaaccaacattttctttgaaattttggtgaaagccactctcattgaagtgtatatatgattcaacttgtttcttacaatatttgccccgttgaaaacttttttgccatcgatgagtttctttaagggcaaagttcctttaagaaatgcttttagatttctttgtatacctatgaatttttaatcaagtgatgaagacacggagaaaaatcctaaattgatgctaaatattttatctgtggacttaaccaagtctcccacaaaaataatacaagaatctgcaacaatttttaaaattcagtattcaattattattcagatactattactagattgaaaattcaactcttgtcataagtcgtcgtcaacttcttttgtttgcttcttcctttttctctaacaggtgcagtgttactgccagttgtttggatatttccacttgtgtatttattctctctatctctttgacgtcgtctacagactacaatg

SEQ ID NO: 17480 - DNA, 3003 bp, Unknown
  misc_feature (1)..( 3003): 2750-1469P.txt file - cDNA_ID_1809330; gDNA_ID_1621164; Annot_ID_57183
atgcttgttttagaaggaagaagcctgtgcgttcttgtcaacgatttatatgccgttgcgcgattagagatgttggatattaagacattctaattttgttgtaagatttataaataattttaaaatataaattaattactagttaatgttcttccttgtatttcttttacagtattgaacatgtacaaaagtatgaaaagctaactagtattaccctaatctaataggaacatgtaattggaaactcaagttttcccgccaaatttttgccgtcaaaaaaatattttccgccaaacatttttcccgccaaattttttttttcgtaacaaattttttatcaaccaaaaaaatagttttaaaaatccttgtaaattttttttggcggaaaatagatttacaagggattttaaaagggttttaaaagatttataatgaattttaaaagggttttaaaacaattttaaaactcttttaaaacaattttaaaactcttttaaaacaattttaaacccctgtcaaaacaattttaaaccctttaaaaatctttaaaaaacctttgtaaatctattaaagtcttttaaaatcccttgtaaatcttttaaaactcttttaaaatcctttgtaaatcttttaaaacacttttaaaatcccttgtaaatattttaaaaccctttaaaaattccttgtaaatcttttaaagcccttttaaaatctcttttaaatctatttcccgccaaaaataattttggcgggaatttttggggggaattttttcgaaatttttttggcgtgaaaattttgtcgaaaaatttattttggaatattttaggtaaagaatattaatattttattttgttaacctaaaacaattttcaaataggggtaaaatggtcaattaaaatttaaagagggtagaaataaaaatggctaaaaaaaggtagagttgaaaaggggcatcgtgaaaagagcattagaaagaatttttaataaaattacacatattgtaaataaagttttttgtaaaaaattagttctgaacctataattaatattaaaagaaaatacaatttattttcattgataacttataaaaaacataatatatatacagtaaaacctctataaattattactcgataaattaataacctctataaattaataaattctttcggtcgcgagttggtaccagtctaaaaagtgacacaaatcgataaattaatcaaataataattttttgaaaatcctatataaacatatggtctcattaatatcataaattaataattatataaaaatatcaactatatatatatatgttataattatatataataactttaatgaaatataattttagtattgtttctttttgcttaaactcactttagttatttttaatttgattttagtaatttttactatatcaaaaactgttcgtgttgttttttaaacatgataattgattttatttgtaattagttctagaaaaatatttcaaataatgaatggaagcttatattttcataaaaaagtttttaaaaaacttatcaaattagaaaaatctctatataaattaataaatattaatttatcgataaattaatacttccataaattaatagaattttgcggtcccaacattatttatttattgaggttttactatatatatatccctatatattataaagaattttgatagatttaaaactttatttacaacccctgttagacgacaaagataggcttcacaaataggtagcaaatgaaaggttaaattggcatgtagcatatggaccgaaaatatgcgaataagtactaataaaaactgaggaatatcgaatattttcaaataagaaaccacaatgtcactttaaaaaatagtattttagctaatggcttttaattttgcgactaatttgcaatatctctatttttttaataaacaattaaccatttatatttttaaaatgggaacgatagaaaatgatacttatggtgattggttcaagctttgaaggctttaacttttttcttgtaaagtctttaaagattgagtttttaccaatcacacttttttattttaaataatttaaaagcttttaaagtctttcttataaatctgaactgtaacatataacaataaaattcacacaaagaactttataataaggtttttatatataatatacatcaaatgtaatatttgatattttttaatatctacatatacatttttgcagccactttgtgaaataaattctcaagttgagaattatttacagtggctgccactggcatttaataattatttttgataattagaaagtaaatcttcgaattaaatatttgacatttaactatttttccaaaatctctctacattaactacacgattagttactaaaataaaacttccaaaatatttaacatcatttaaaaattacaaaattatcatttttgatattgtttttttgtatgactataacaattcgattatacgcatcaacctacatagatatttgatagcagttaattaatacaaaattacaaaatatttagataatgattcataaacatatcataaataagatcaacattaataaaataaatagttttttttacggggcggattggcgagacgggtttggtagaacgttacttaataacaattgtaaactataaaataaaaatattttataaatagatacaatttgcaaacttttatatatactaacttaaaaaaaaaattgtccacgcggtataccgcggataaaaaactagtttttatatacataagtggattacttaagaaaaaaatgattaaaaggtactctttactctttactcctttagaagttacaacactatactggattacttaaaaacaaaaactttcatgaaaaagagaaaataataaaattgttgactggaaaataaaaatacaattaatataaagaaatctctctaacaactttaccaatcatcgtcgctcacatg

SEQ ID NO: 17481 - DNA, 3000 bp, Unknown
  misc_feature (1)..( 3000): 2750-1469P.txt file - cDNA_ID_1809330; gDNA_ID_2926143; Annot_ID_139031
cttgttttagaaggaagaagcctgtgcgttcttgtcaacgatttatatgccgttgcgcgattagagatgttggatattaagacattctaattttgttgtaagatttataaataattttaaaatataaattaattactagttaatgttcttccttgtatttcttttacagtattgaacatgtacaaaagtatgaaaagctaactagtattaccctaatctaataggaacatgtaattggaaactcaagttttcccgccaaatttttgccgtcaaaaaaatattttccgccaaacatttttcccgccaaattttttttttcgtaacaaattttttatcaaccaaaaaaatagttttaaaaatccttgtaaattttttttggcggaaaatagatttacaagggattttaaaagggttttaaaagatttataatgaattttaaaagggttttaaaacaattttaaaactcttttaaaacaattttaaaactcttttaaaacaattttaaacccctgtcaaaacaattttaaaccctttaaaaatctttaaaaaacctttgtaaatctattaaagtcttttaaaatcccttgtaaatcttttaaaactcttttaaaatcctttgtaaatcttttaaaacacttttaaaatcccttgtaaatattttaaaaccctttaaaaattccttgtaaatcttttaaagcccttttaaaatctcttttaaatctatttcccgccaaaaataattttggcgggaatttttggggggaattttttcgaaatttttttggcgtgaaaattttgtcgaaaaatttattttggaatattttaggtaaagaatattaatattttattttgttaacctaaaacaattttcaaataggggtaaaatggtcaattaaaatttaaagagggtagaaataaaaatggctaaaaaaaggtagagttgaaaaggggcatcgtgaaaagagcattagaaagaatttttaataaaattacacatattgtaaataaagttttttgtaaaaaattagttctgaacctataattaatattaaaagaaaatacaatttattttcattgataacttataaaaaacataatatatatacagtaaaacctctataaattattactcgataaattaataacctctataaattaataaattctttcggtcgcgagttggtaccagtctaaaaagtgacacaaatcgataaattaatcaaataataattttttgaaaatcctatataaacatatggtctcattaatatcataaattaataattatataaaaatatcaactatatatatatatgttataattatatataataactttaatgaaatataattttagtattgtttctttttgcttaaactcactttagttatttttaatttgattttagtaatttttactatatcaaaaactgttcgtgttgttttttaaacatgataattgattttatttgtaattagttctagaaaaatatttcaaataatgaatggaagcttatattttcataaaaaagtttttaaaaaacttatcaaattagaaaaatctctatataaattaataaatattaatttatcgataaattaatacttccataaattaatagaattttgcggtcccaacattatttatttattgaggttttactatatatatatccctatatattataaagaattttgatagatttaaaactttatttacaacccctgttagacgacaaagataggcttcacaaataggtagcaaatgaaaggttaaattggcatgtagcatatggaccgaaaatatgcgaataagtactaataaaaactgaggaatatcgaatattttcaaataagaaaccacaatgtcactttaaaaaatagtattttagctaatggcttttaattttgcgactaatttgcaatatctctatttttttaataaacaattaaccatttatatttttaaaatgggaacgatagaaaatgatacttatggtgattggttcaagctttgaaggctttaacttttttcttgtaaagtctttaaagattgagtttttaccaatcacacttttttattttaaataatttaaaagcttttaaagtctttcttataaatctgaactgtaacatataacaataaaattcacacaaagaactttataataaggtttttatatataatatacatcaaatgtaatatttgatattttttaatatctacatatacatttttgcagccactttgtgaaataaattctcaagttgagaattatttacagtggctgccactggcatttaataattatttttgataattagaaagtaaatcttcgaattaaatatttgacatttaactatttttccaaaatctctctacattaactacacgattagttactaaaataaaacttccaaaatatttaacatcatttaaaaattacaaaattatcatttttgatattgtttttttgtatgactataacaattcgattatacgcatcaacctacatagatatttgatagcagttaattaatacaaaattacaaaatatttagataatgattcataaacatatcataaataagatcaacattaataaaataaatagttttttttacggggcggattggcgagacgggtttggtagaacgttacttaataacaattgtaaactataaaataaaaatattttataaatagatacaatttgcaaacttttatatatactaacttaaaaaaaaaattgtccacgcggtataccgcggataaaaaactagtttttatatacataagtggattacttaagaaaaaaatgattaaaaggtactctttactctttactcctttagaagttacaacactatactggattacttaaaaacaaaaactttcatgaaaaagagaaaataataaaattgttgactggaaaataaaaatacaattaatataaagaaatctctctaacaactttaccaatcatcgtcgctcacatg

SEQ ID NO: 17482 - DNA, 3000 bp, Unknown
  misc_feature (1)..( 3000): 2750-1469P.txt file - cDNA_ID_1809346; gDNA_ID_1621164; Annot_ID_57179
tatcagaaacgcgaagttatcaaggtagattcaaagctttttatttatcgtaaactatcataaaatttctgtatacttattcttgattcatgtgtttctttttcaaggctacaagaatgacagtgataatatgtcaattgacataacattgttgttaactgaagagcagatgaagctttttctgaataatgatgaaaaaatcgaagaggatgtcttggaattttgagactatccacaaccattaggaccaacaacatgcgtttgttgaacaaaactaatgtccacacaaaatatgaatctcccgagcagagtaagaatagcccatttttcattgttttgtttcctctctataaataattagttatcacttaattaatattaatatcagttttttggtccttcaagattttaaggaagagaggctaaaatggtgtggtgaaaggaaggtatgtaaatcagacactatgggtcttgttttagttattaaggcaatggtcttgttttagtaactaatcttactcctaatacacatgattatatggtggatattttaacttttgagcggaataagttagagtccaaattagcaattgtccaaagagttctcaatggagaaataaacatcagtcccgatcttgatgtggtcttggaaaagaatggtttttaaaaatatggcaagacagtgaactcatcaagaagctatgactacgtcccagaggatcttatctcgatgattagagatccttcaaaatagatgcattaaaggcataattagattacgtgaataaaagactgggtactatcaactctgaaagccagaagcactctggatcaataagctagatgattttgataaagcacttgaggtatgaatgaattagttttatgattctccacaacaaattatgtgtctgttatttgaactgaactttcttaatattgcaaggactctggtcaagactctcaagttaatggcgattataatatttagtgcatagatggcacaaatataatttccattcttatctataaatgattatggtataactgtctaccaaaggttccaaaattagtatttaacaaaaaaaatatttcaaaagtgaaataaaatgtatacctcccatctcttagatctaattttaattttattacatattttaaggatatgccaatttttcgattttttgttagagacaagttatcatatttcaacatttttaggtatctttatataaagatttattctatatttggaaaattattctttcctaaattattattaaaatctgaaacttaaaaaatatataaaaaattaaatatatgaactaaaatttatacaatctttttcatataaattgtgctttttgtacctcggaccatagtagttctctttgcatctgaagtgttgttgtaaccgatccgaagatggtaaacatttacaaggaaaatattattttggagtgggcctttatacaaaactatcaaatcctacctagctcggggatcataatttttgttgaaaatgtttgcatggcgatttgaagcagtaatatgaaatagattttgattgttatcatcaacttccaatagcaggtcgagacacgaacgaagtagaatttctacaaactcaatgtatccggactttacgacctcaacaagtaaattttgaggtgaagaagtaatttataatttatcttcgaaaatatttacaatccttctcatataaatatacaagtttttccatttttttgttagagacaacttttcacataattatctttattttttgaaattttagtattatattgtttttccaactacacattaattacaaaatactccttgatgaatttatctgagaaatttaccatattttgttatattattattaatttaattttgcgtaaacgggagactatacaattaagtttgagtttcctgattttcaaatgttgggtttgtttgtataatttcaaatgttggggtttaatttgcaatattcccgaatcccgactactcattctaaaatataatcagaccttcgcgtcttctttaacagttagttccataccatcgtcgcaagctctcatcttcttcagctcaaaaagccatctcaaaggtaaaagtttctcgagtttgtcttctccgtttgattgcttcttcatccctatcgagattcgtatgatttacgttctaatttcgtcagatcgatgaaagatccattgacattctctagagatctgaataaaatattttctgttatcgttcacagttttgatgagatttttgtttggctctgtagatttctaagtttttaattgttttcaatttgccattatgatctatcattctcatagcttcagtaagagatctgatcgttaagtttttcagattgagaatcgaaatttgacttagaggttatgtagaaaccttaattttaagatcttccctgatgatctagtactctcttcttagatcttggtgtattcagtgctagttttgtttcttagactaaatgtattagatagatttctcagtttttgttctgtgtgtttgtagtgtgtggttataacacttaatttatcactattttcaggtatattttgaatcaaaaacaatggcagggactaatgtaagtacatctctaagctcattgtatactgttaagaatcattatattgttgtctgtaaatagtcttgtgatgctttatggtttgttacacttatgagattctttgcattgtggtgtaatataatctcctctgtttgtgtataagatcactatgttaagattgattttttcttgttttgtttgttgagtgggtaagtatgttttcagaaggtgtgacgaatcttaggttcatgcccctattgttctaagattgtttgcatctttcaatctggaagcataattaggctttgttactgtctaagtaacataagttctggtagatttttgtaaacgttcttttgctgctgagaaaattccaattgcttatg

SEQ ID NO: 17483 - DNA, 3003 bp, Unknown
  misc_feature (1)..( 3003): 2750-1469P.txt file - cDNA_ID_1809346; gDNA_ID_2926143; Annot_ID_139035
taatatcagaaacgcgaagttatcaaggtagattcaaagctttttatttatcgtaaactatcataaaatttctgtatacttattcttgattcatgtgtttctttttcaaggctacaagaatgacagtgataatatgtcaattgacataacattgttgttaactgaagagcagatgaagctttttctgaataatgatgaaaaaatcgaagaggatgtcttggaattttgagactatccacaaccattaggaccaacaacatgcgtttgttgaacaaaactaatgtccacacaaaatatgaatctcccgagcagagtaagaatagcccatttttcattgttttgtttcctctctataaataattagttatcacttaattaatattaatatcagttttttggtccttcaagattttaaggaagagaggctaaaatggtgtggtgaaaggaaggtatgtaaatcagacactatgggtcttgttttagttattaaggcaatggtcttgttttagtaactaatcttactcctaatacacatgattatatggtggatattttaacttttgagcggaataagttagagtccaaattagcaattgtccaaagagttctcaatggagaaataaacatcagtcccgatcttgatgtggtcttggaaaagaatggtttttaaaaatatggcaagacagtgaactcatcaagaagctatgactacgtcccagaggatcttatctcgatgattagagatccttcaaaatagatgcattaaaggcataattagattacgtgaataaaagactgggtactatcaactctgaaagccagaagcactctggatcaataagctagatgattttgataaagcacttgaggtatgaatgaattagttttatgattctccacaacaaattatgtgtctgttatttgaactgaactttcttaatattgcaaggactctggtcaagactctcaagttaatggcgattataatatttagtgcatagatggcacaaatataatttccattcttatctataaatgattatggtataactgtctaccaaaggttccaaaattagtatttaacaaaaaaaatatttcaaaagtgaaataaaatgtatacctcccatctcttagatctaattttaattttattacatattttaaggatatgccaatttttcgattttttgttagagacaagttatcatatttcaacatttttaggtatctttatataaagatttattctatatttggaaaattattctttcctaaattattattaaaatctgaaacttaaaaaatatataaaaaattaaatatatgaactaaaatttatacaatctttttcatataaattgtgctttttgtacctcggaccatagtagttctctttgcatctgaagtgttgttgtaaccgatccgaagatggtaaacatttacaaggaaaatattattttggagtgggcctttatacaaaactatcaaatcctacctagctcggggatcataatttttgttgaaaatgtttgcatggcgatttgaagcagtaatatgaaatagattttgattgttatcatcaacttccaatagcaggtcgagacacgaacgaagtagaatttctacaaactcaatgtatccggactttacgacctcaacaagtaaattttgaggtgaagaagtaatttataatttatcttcgaaaatatttacaatccttctcatataaatatacaagtttttccatttttttgttagagacaacttttcacataattatctttattttttgaaattttagtattatattgtttttccaactacacattaattacaaaatactccttgatgaatttatctgagaaatttaccatattttgttatattattattaatttaattttgcgtaaacgggagactatacaattaagtttgagtttcctgattttcaaatgttgggtttgtttgtataatttcaaatgttggggtttaatttgcaatattcccgaatcccgactactcattctaaaatataatcagaccttcgcgtcttctttaacagttagttccataccatcgtcgcaagctctcatcttcttcagctcaaaaagccatctcaaaggtaaaagtttctcgagtttgtcttctccgtttgattgcttcttcatccctatcgagattcgtatgatttacgttctaatttcgtcagatcgatgaaagatccattgacattctctagagatctgaataaaatattttctgttatcgttcacagttttgatgagatttttgtttggctctgtagatttctaagtttttaattgttttcaatttgccattatgatctatcattctcatagcttcagtaagagatctgatcgttaagtttttcagattgagaatcgaaatttgacttagaggttatgtagaaaccttaattttaagatcttccctgatgatctagtactctcttcttagatcttggtgtattcagtgctagttttgtttcttagactaaatgtattagatagatttctcagtttttgttctgtgtgtttgtagtgtgtggttataacacttaatttatcactattttcaggtatattttgaatcaaaaacaatggcagggactaatgtaagtacatctctaagctcattgtatactgttaagaatcattatattgttgtctgtaaatagtcttgtgatgctttatggtttgttacacttatgagattctttgcattgtggtgtaatataatctcctctgtttgtgtataagatcactatgttaagattgattttttcttgttttgtttgttgagtgggtaagtatgttttcagaaggtgtgacgaatcttaggttcatgcccctattgttctaagattgtttgcatctttcaatctggaagcataattaggctttgttactgtctaagtaacataagttctggtagatttttgtaaacgttcttttgctgctgagaaaattccaattgcttatg

SEQ ID NO: 17484 - DNA, 3000 bp, Unknown; identical to SEQ ID NO: 7818
  misc_feature (1)..( 3000): 2750-1469P.txt file - cDNA_ID_1809372; gDNA_ID_1621165; Annot_ID_57202

SEQ ID NO: 17485 - DNA, 3000 bp, Unknown; identical to SEQ ID NO: 7818
  misc_feature (1)..( 3000): 2750-1469P.txt file - cDNA_ID_1809372; gDNA_ID_1621165; Annot_ID_173835

SEQ ID NO: 17486 - DNA, 3000 bp, Unknown; identical to SEQ ID NO: 7820
  misc_feature (1)..( 3000): 2750-1469P.txt file - cDNA_ID_1809380; gDNA_ID_1621165; Annot_ID_57199

SEQ ID NO: 17487 - DNA, 3003 bp, Unknown
  misc_feature (1)..( 3003): 2750-1469P.txt file - cDNA_ID_1809380; gDNA_ID_1972120; Annot_ID_178941
gacttaaaactaaacaagctcgttgttggaaagaaaaagaatttcccaacgctaaggagctttgtttcgccaattgtccccctcttgaataatttttatggattctgtcatttcgaagcagatttttttaaaaaacgttgataaatctaaatatgtatgttgcatattcgatttaaggttttttatgacatttatttcgattttagtggattcctttacattaatgttacgatattcttattttctataatttaaattcactgaatatcaaccaattacatttctaaataaaaatatatattttataggtgttagataatccaattacagttgccaccaaaaaatatggaatttaaaactaaattacaagtatatgatatttaatttggatggggtttgttaggaaaagataaaataatttgcatagttttagtttttgagtcaaccaaatggatcaatagattaattgagaaaaagaaaagaaaaaagaaatcaatcataatgttttcgaattttttggaaagcttatacgatggaatcggagacgatgacgccgccgacgacgacgaagacaacaacaacgacgagaaaaccccgaaagcctcaacggaaagacacgatttctcgagaaacgccgttcgtttgtcaccggaagaggaggctcaagcgcgtggggttaaagatgatttgacggaacttggtcataccctcacgcgtcaatttcgtggtgtggctaactttctcgctccgttacctgatggatcttcttcttcttcctccgatctatcgaaccatcccaggtttaaccaatctcggtcttcagatcctggattgaatcaatcgcgttcttcagatcgggacgaatcgtgtgttggaagtgatacgccggagactggaattaggtttaggagctgggatttagaagaaaaattggcagaaggcaatgatccggaggatgaggaagaagaagaagaggaaacagatgaagaagaagaagaagaagaagagatcgctgcggttgctcttacagacgaagtgctagcatttgcgaggaacatagcaatgcatccagaaacttggttggattttcctcttgatcctgacgaagatcttgatggtaacgtatacattgagtcaagtctttcgctattagtcttcattgatttgacttataggcatatcaaaagtttgattatttcaacttttatctaatgtagatttggaaatgagtgatgctcaaagaggtcatgctttagctattgagcgtcttgctccgaggttagctgcattgagaatagagctttgtccatgtcatatgagtgttggttacttctggaaagtctattttgttcttcttctttcaaggctcaataaacacgatgctcatcttttgtcttctccacaggttaaaaaaacctgaatctcaatctcttcttgagtcaaaatgattctttgttgttgctgttgtttattcaacaaaatccttttgcttttgcaggtgatggaagctagagcattgtggatgaaagagcttcagaatcagacacattcttcaaaagaaagtagagatatgattcttgaggaagaagatattacaccatcaacttctaattactacaaccatgctcctcctgagtttctttctccaagaatatatgcttttgaacctccttcgattatgtatcgcgattttgaacacgggtttgaaaacgctcagttcatcgataaagctgttattgaggaaaaaccaatccagaagaacgacaaaaatagtgcaagccttagccaaacatctaaagatgttgttgatgatgatgatgatgattggccagaagaagaagattctgctaattcttgggctccaatgtttacagtgaatgaggatgatgtttctttcagtgatcttgaaggagacgacgatataagtagcttagcactcaagtctaagattacatcaaagggcacagaccaaaaaggaacatgaaacatcatctggcttgttgctttgccctgcctcacgagatcgaatcaatagaattgaacataagtactgtgtgctgagtcaaatcgtggaagtcttttgggtgagtttgattgttttgtggatttatgatgtttgctctcaaagagaaggaagaaagaaagaaaaaggttttgattgaaacatgtacagaagatttactttgacactgcaatttcattgtaatgttctctctcgccaaatgtaatgaaatattgaaaagcactatttcattcgcgtggaacttaaaagaaattgatagagaatggcgcaagtgaattcaagtgtaacaaactgttagaatcattattggattggaaaatcatatgggattttattgcttatgttgaggatttgtatgtatgaaaatgggaacaaccaggaggagctatcatcaattaacaaaataactcctatgacttaactaaaaaacaaatctatgttgaaatgtataacatttgtcaaaatgctagtactttgttaataattaaggggtgttattggtttgtgatttatatagagttttagtgatttaaaaatattatatagaatctgatgttattcaattcaaattttcattttttttttttaatttggtattattagtttaagatttataaaaattaatctaaaatcttcgtaagtaagattgcttccctaatacagagaaagaaagaaaaaccaagtaagattggtaatacgatgtcgtttcgcagaataatgcaaagctgaacccaatttaataagctgcacttttctttctttctcgagtctcccgtcgttttttatgtcagaaccaattcgtcaggtcgtgaataagtgactttatcgacgaaccaccactcagctgcagcaaatgatcgtttagctccggcgaagcgtaaaattcttcagatctctctggaattaataatccgtctgtttgatcgatctgattcggcaaatccttgagaaaacaaggagggaagaagaagaagaacatg

SEQ ID NO: 17488 - DNA, 3000 bp, Unknown; identical to SEQ ID NO: 7820
  misc_feature (1)..( 3000): 2750-1469P.txt file - cDNA_ID_1809380; gDNA_ID_1621165; Annot_ID_173830

SEQ ID NO: 17489 - DNA, 3003 bp, Unknown
  misc_feature (1)..( 3003): 2750-1469P.txt file - cDNA_ID_1809384; gDNA_ID_1621165; Annot_ID_57197
gttagctgccaaatgatacatgccatgccgcttcatccacctctttctttgatcttttctacatttcttcacaattttttagtttgtactaatttaatatttgtattggaatctcgcgaatggccttctctaaagccaaccaccaccacatcagtagttcagttaatagatatgcatatctacggacatttaaagctcacaaaatcaaatgtgtgtatgtttgtagatatcacaatgattcataaaaattacacaaccagtttgaccatatgatccaacaatgcaataatgcaaaatcacacaaccagcttgacctcaccatatgattcacaaccgatctcgtattcatagtatggcgtatatatgcatgcacaataaaaaattatcatatacgtgaaaaattgtgctatccacgataaatatatcgcaatgagtttgttttgacatttacgcaaaagtaaactaggattagaatgtataatcgattttggtgctcaatgcttaactaacaagtttaaggttgtttaattttttcttctctcttaagaatccactaatggtggaaatgtggaaggaagaatatggatttttttataatatgattaggatcttgaacctcacaagttatgcaacatatattatagatgctgaatctcaatttttgaaggtttacattgcatattatttacaagccatgacgacaagtatcaaatttatgtttgccacatattaaatttttaacatgcccatgtccaaatggttgtaactatgaagcagaaaacaatatacataccaataccatttgtaaatactagcatataactctgtacgtattcaaattacattatttctgttcttatcctgtataggttttaaatattgaaaaatataccatgcataatcaagggataggtaatgataattggtgggaataaattaaggatggcatgcatggatgggtccccaacataagcactcgagcatgcattgctaatactcagcctcgcgtgccaacactcccatgtccctaacacaaactacttagtaaattaaaatgatctaatctattatttacaattaattagtactaaactttgttatactcttccactaccacagttatactcttcacgtagttgttcatttatatgtatatttttcaagtagaagttaaaatcttatgaagatataatgctctcgaaaaaatgttgtaaaagaaaaagaaaaaagagagagagtagctgacagaaggaacatatagggaagagagtaaagagaaaaagcgaacttcaagaatcaacaataagaaaaagtaaattatttgcaaattcctctttttgtctcttaaaagatacaaaaaatgtttttttttttaaacacacagagaatgcaaactaacacaagataaaacaagaagaagaaacacagaattttgactgtcattatcataagaaacatagcaaccacaagactttcctttatatttggctatatacatttattcaaacaaacataatatgtttcaggctttgtattgctaattgggaacatttcccctcccccaactttttttttctcttttgaccaacttagcttatattaatttgatttcacttataactacatgttgcatacaatttttgcatattcttatctgctaataagtaaaactatgtgatagtcaagatagcatcaaacctacgggtccaaactaaggtttcaggtctaatattaggtatgggatccatctacactttttgttttttttactgagatagaatttacttattagcagatttcattttaggataaattccgataccaggtaaaatacaaacacaatttgaaaaggaatgattattgtttttaaagagattattcattaacacatgagacatttagactaaacaattactccacctctgttttagctagccatatctatataataggttctaataggtgatttaaggaggaagtgtgcatactcatattcttaagccatggaccaacaaagaaagagagaaaagcattgtagttagattttgcttagtcactttatgtcagtggtcttttatgattttgtcatttttatttcatttttggttcctctgtattcttggaggttaaaaaaaaaggaaaggcatgaatgatttcatcactatccaagccaagtacttataaaacacatataaacatttagactattactttaagacaccataattccataaaccccttttgaaactttctctcgtctctctctctctctttcttgttagcataaggccccaagaagacataagagtgttttcatgattctttatttgggttttgttatgaaaaaatttagcttctatagctttggaaatggtgagagcttgagaggattataaaaatcaagggtttttgtcttcttttgctcacttgctcattctttaatatcgagaaaacgttttgggctttgatgggaggtgtgttcgtgttgaggaaacccagaaacggcaataaatgccgtcgtttcgatcgatgcattacaatgagacaaacggaaacagagttgttctcagaagaaacaagaatgagaacaagagaaacaagacgaagaagaagaagcttcttcttagatatgatccttctgtttcgtacttgttcctccaacattcttttcctctctcttcttctcttgtcttcttctttttcctctgtcttgtccgagaatctctcacctagaaaccaaactctcaggccactcgatgagcttaataagctcaaagccattaatcaacatctcaggaagatcaataaaccttcaattaagacaattcatgtaagtttgaattagtattatcgtacgcgatcttctttttgcgttctttttcataaacacaatcttcttcttcctctgtctcagaaaaacaaaaaaaagcacttcctttctctgttcttgattctttatgctctgtttcaagaagtcgctctgttttttttttggtgtaaatg

SEQ ID NO: 17490 - DNA, 3003 bp, Unknown
  misc_feature (1)..( 3003): 2750-1469P.txt file - cDNA_ID_1809386; gDNA_ID_1621165; Annot_ID_57196
agaacagaagatgaacacgcttgaatcactagtgaaatacgcgagaggtctgaaacgaatggtgataaggattctccggatgaagagcaatcacagcagtgcagatgatttctgcgatgatatctgcaagttccggcacatgaacgagcatcttgttcatatagaatgaaataattttttgctgctaatcttattttcagccatttgatttctgtttctctttctggtcgctgagcatttcttatattgaactcttgagtaattgttgtttcctgattcatggttatgatgaacttatgacaattgttttttaaacgaaaaattatggacacatttcttaattagctttcttgttttcttaatctacattaataatatactagtagtgatctagcagaatataattacagtttatgataaagtttgtttttggagtatacttatgtatcaaagaagtattgtcctatgcttaaaaaagataaaagaagataatctccttaaaacaagataaacctcagattgcattacattaaaataaaacgagaaaacgcaaaacgcgcaccaccaacaatttcaaaaccaaaaaaacttgtctatatataacgtgattaactcctgcattgaaaaatgacctggtgataatttcttctcaattcaaatacataaataaatatcaataaaatggcgggccgcgacacattccagctgcgttttgcagcagtcgcggcatccgccgccgtattgatctttctcatggctggtcaagtcgcggagtcgcgtatgatcaatatctgctctcacaccgcgtatccatctttgtgccgacctctggtgaaacgtgtcacgagccctagaaaagccacgcaccgaaccatccaagctttggaggctaagacgaaactagctctagccgaaacagctaggttcaaaaacggtaaccaagcggtcagcacgtgttacgagacattgggcgacgcggtttacaatttggcaagcgcgagaaagagcataaggaaacgtgatgtgccggcgatgaacacgtatctaactgcggctgtgtctgattacggtgcatgtgtggacgggttcattgaaacacaacaggttaatgcgatccaaaatgcagtggttgacttgagaaaaattagcagcaattgcttggcgttgtctacattgattagatgatcgatttaagagaacaattgatttaatttttctcaaaacaaaaactaattaattgaagaaataaaaaatctcaagcaattaaaatttgggtttctttttgttgtttttgttttgagagagatgtttgttgttgatccatcattcgtatgtaacgccactgggtgtaactaattatatttgaatttcgtgtaattaataatcgctagtagattttttcatattcaacaatttgccgatagaaatgttttccattctcctttcttgaacccactttactttttcactatcaacaataagattaagttttgaccgaaaaataaaacaataagtgacaaagacaaacacaaactatagtaatgcacaactttttgttttgttaactactatcactaattcattattgatatggatatcattatgatgtttttagaaagtatatgtgtgattatgttttacttttcccaggatccataacaaaaaaatatctttgagaaaataatttggctatatcatatattggataaaaatattgccatttaaaatggtcttttaactctttttcttaaaatctgtatgtatattatagtttgatatgatcataaaagcattcaataatttttctttcatgcaaaactgatagatcttgctcaatgatcatgtttcaatgtctttaagtgttttaagaaagtgagaattgctttgatttggattgaaaaatattggaccataataaacacacataacattatacaaaattatcctttgcttctatatttaacatacattttgttttccacaatgtgtaaaactctctatagaagaaacaccacacaaaaacaccaaataaggtttagctaggatataattgacatgattgaacaagtgggcttgggatatatatcactacaagaatagaaagataaacaaaaatatcttctgcaattcgtggtttgtgaacacaagagaaaaaaaaaaaaaaacatgtcgaccaataaaaaaaagatacaagagaacgaagcataaaaatatcaaaacaaaaagacaaaaacaggaaaatagaaaaaagaaagaaaaattaaaaaaagctaaaatcaacggtgagaagattctgtatataataagaaaatatcacccaaataaaaaaaaaaggtggagtccacagataccgtccatcaacgtatcactgggctctctttctccgtgccgttcctcctacgtgctcgaataacgatgtgccacgtggtggaatcgaaggataaagtgtcgttttttacttcgattacacgtgagtgtatgtatgtgtgagtgagtgaagaagaacaaagagcgaagaaaccccccagcactcacttcatccataagatcattcaaattctgggatcttctctctttctctcattgtattcagtttcttcgtctcggttcgatcatcaggtatctttttcaattgaattttaccttcaatttcgattgctttcggtgtttttgttatttgattcaaattgcaaattttcttttgatagatattttcgttttgactataaaagacgattcttttcttcttagtgtatattgcacatgttccattcgcagaatgaagtaactgtttctctacaaagtgaaaataaaataaaaataacaagtgtggttctcttgtctaactctgtcagattcttctttttgagacaaatagtataacttgttccttttttttctcatctattgcaaaagcttcattgttttccttattatcttattatataatctctactttacttaacagatccggcaagtttgattcagtgacaagaaagcatg

SEQ ID NO: 17491 - DNA, 3000 bp, Unknown; identical to SEQ ID NO: 7813
  misc_feature (1)..( 3000): 2750-1469P.txt file - cDNA_ID_1809408; gDNA_ID_1621165; Annot_ID_57187

SEQ ID NO: 17492 - DNA, 3000 bp, Unknown; identical to SEQ ID NO: 7813
  misc_feature (1)..( 3000): 2750-1469P.txt file - cDNA_ID_1809408; gDNA_ID_1621165; Annot_ID_173815

SEQ ID NO: 17493 - DNA, 3003 bp, Unknown
  misc_feature (1)..( 3003): 2750-1469P.txt file - cDNA_ID_1809414; gDNA_ID_1621167; Annot_ID_57214
gaccacaattagaagcttcttcggcacaaaattgacctccttcttcccattttcagtctccgccacgaaactcaccgcatctacagctgcttcttcccgtttcctattttccaaccgttcttcaacgtagggctgtttgatctcgaaggagaatcgatcggaaccgtttacatcttccatttttccgaaaggtgtcaaacctaatacaaatccaagaagaaagaagacgagaaactggtaaaacggtcgcctccatggacctctacgcgagcttttaggatcagacgttactccgaggagcttggtgagatacgaaagaaattgcgaagaattgtgtttgctgctactaccaccaatggtgaaacctttgtgtgaacctccattctcgtgagaacgatcgtgatacatcggcgagagagttcgccggattgacgccatcagataatctcactccaccgtcctatttttcacagctcccaaatcaaacatccaaaacagcaattttcgcagagatccgcaccaagtttgcaggagaatccgcgtaggatatagcaatttcaatctgaagtcggattgagtaaggtggttggttctaactcaaagtcaccgatctgaaacacgattggaatggatccgtcgccgccgagatctgaaattgagctggcggagaaagttgcggaaaaagcactgtttgtttgtttgttaaaaaaaaatctttaagctatgcgagttcgtgggacacgtggcgagattatggctcgtacactctggcaaaataatgattacgtttaagtttcgaggaaatggtctactatggtaaaaacaataattaaaacataaattggatttagttgtaattgtaaacgctgccaaaaaaagaaaacatgattaataagtaattctaagttttatcatcatataaagtaatggcctctacttacctattatccactatacttgaatgagttctaagttctaattacattgaaaattttatttattttagcggtaataaaaatagatataactcatatgtcaactagatttactattaaatttagcatgcatttcttacatcattgcaacacatatggtacaaaaagatattatattccgttttggtttttaacggtgcaaaaatattagacaaaattttaaaacatgtgtaatttacagtcctttttcgaaagtttgggttattttaataccagttttctataatatcaagcttggcgacgtaatatttgattaagcgattaattttttttgctgtggtgttttttttctttttctttttttttcaagtagaattagatttagtattgtatgtttgaaagcttagtcaaaaaaatttctcagttgttttgttaaatctatttttaacggtacaagcagatatctagtttcaaaaatagatttacataagtttttgtgtcaaaatattaaaaatttatgtagtgatttttaattatttattaaaataaaaatgtttaggtttacaagatgttaaatctattgatttgatctcatggcaaaaaacagataaaaacataaaataaaaacaatcaatttatcgactcaacgtatgttgtgaagcaaacggtatcagataaacgatacacgattctaaagttcttctaaagtgagctacaaaggaaaaaagatggctatgaaaattgtaaagacttgcaaaacaaaaacccaaagtagcataagcctttcattggagggcttcgtaggtagttcgtccatgaacccgtcattaatgaaggattataaataaatgtgatgaatatactgttcttcgtctccatccttctgatcaaacgacttggatgtacaaatccaaggtactctgaagcctacacaccacataggtgtacaaatccataaaatttgagcaataacccgataatatagcagaaagcaaaaaaatgtaatccaaaacctaagaaagtcctataaatgataatcatataagcacataccttgaaaagctcgaagagcttcttaggatcttcttcttttttgttgaattcctcgcggatccacttctcatccttagtggagaagggtttgtaggaatcttcttctggttgatagttgctttgaaagaagaagctccaacaagcatgtgttataagctgtctttctggtgtgggaaacagaactcttatatgaatatttataaaggtgttcattagtttccttcaatgtttacaatcttcctcatgatttcactagagacatccagagtacaaacgacttcgggatcggatgatttcttaagaatttctgaaacttttgtggatacttcagccatagaacaaggatcaaggattttaacaactgagtcattgcaagttatgtttacttttgcatactctcctccagtcatgatagatgattttacaaggagagaaaaacctaacagagaaaggaaaaaaaatcaaagcgtagagagtcgagaggatcatattcgtttacaaaagaaaatagaagatcgttactttagagatgaagatcgtgatggtttcagatagatagagagagagagacgagcgaggaagtgaaagaaaatacataaacttctattttatatcccaccctttttcttactatcaacaaaaaaagaaaattgtttaatgtcggttttccgattgttaaaaatatccgcttaattttcttacacacattttttattacaaaaaccaacttcaaactaaataattatgagggttatatatatgaaggataacaaacaaattacagattaagaaatactataatgaaggataacaaacaaatgacacattaataagaaatacttaaatttggcatgggtccgagatagttgaagactgacccctgtttaagcggattccaacttttaccaccaatttagctctccccaatcttgcttactactttcccttcccaccatctctatccatttttcctatctctctcaaaaaacaaagtgaaaaatataaacggaggatg

SEQ ID NO: 17494 - DNA, 3003 bp, Unknown; identical to SEQ ID NO: 17493
  misc_feature (1)..( 3003): 2750-1469P.txt file - cDNA_ID_1809414; gDNA_ID_1621167; Annot_ID_173879

SEQ ID NO: 17495 - DNA, 3000 bp, Unknown; identical to SEQ ID NO: 7837
  misc_feature (1)..( 3000): 2750-1469P.txt file - cDNA_ID_1809418; gDNA_ID_1621167; Annot_ID_57213

SEQ ID NO: 17496 - DNA, 3003 bp, Unknown
  misc_feature (1)..( 3003): 2750-1469P.txt file - cDNA_ID_1809422; gDNA_ID_1621167; Annot_ID_57212
gaaagtttgaccaaaaaaaaaaaaagaagaaaaacatgaaaagagtcctgtctcaaaagaatggccacaaaataaaataagggtttagagtcctgtttcatatcggcataatagcggagccattctggtcaattgtcacagatttttaatgcagaagattagagtagagcagaaaggaatataaaacttcaacatacgaactcagacctgatcttgcagtggtaacaatagtgataggtcggttcgaagacagcaaacctaccagaaaaatagagatcagacgaagtaaatttaagtcattcctaagtctttcttaatcggctctatcaaataacgtttctgcgtctctttctctcgtccttagctgctatgtctaacatacgatctggttgtggcaatttgtggaagtctatcttactttcacagaggcatatgtttaaaagtgcatgtatgatgattttatctgaattgatggtttgaaatttgaaacctaagtccaaaatatttaaacactggcaatgtcacagattatacatcaaaagaaaaagaggataatagtctggaaatgtgagaacaacaccagaaagcaacagaaagaaacagagcaaggccgagggagaaaccatggagaaggctagaatcaagaaggaagaaaccactgagcatcgttgaagttgaagttggagagaccgtggaagcgtttgacggtctttgttgcaagattgaagacaccgatgtcgaggcatgacaatttattgtgacagatacgatcatcacgagtgaaataaatggagttaggctcaattccaagggtatggtcagcaggcacggtaatacccaaatcatagaagagggcctcatcacctagagaatgtacctcaagaagccgggtgtcgagggttttcgggtcaagatctttaggatccctcttgtacagatggaacatcctgtgactttcagaggtacctaaatcgtacgtaaagacaaccaaaacttgacctgctcttgtaacagcaatgcctttgttagatgggatagacctcttttgcttcatacgttcacgttccttcattgtcatacttggcatccacattggaagcctatgtttctcggatacatccttgaaaccatcttcatcttgtccagacaaatctaagtgtcgaatgaactcacgggtggcatagacgtaaagattgtaacctttcagtaccatatcgtttaaacctcgtaactccctctgaacctcgagctctgttggaatctcgcggtaatgatcatcccctgtcctgcaaaaccctagaaatgggtacatttcaaactgccacacaacaacgtagtttccattcttgtcgtcaacccacaaacgacctctcagatcttcggcagcatgaggaaattcatcacgaaatggatcctcatcatccattagcatatgcttgacattctcctctccttcacgccaaatcttaaaatggctacccttaaatgattctagtggtggaagatcgatcctcttctcgctaaatacatctataatatagagtttcattcgggaatctaccaccagaaaccacttacctgagtttcccaggaatcgataccctgaaaagtcactcttcgtctcgtaaaccctatcattgtatgggttgtacacactattactacgacaaccatccttttctgcagaaagcatcagcaatggagatctggcttttggccgctgaatcaaattcgaacgcagagccttagcagagtcaagcgttagcgtagtagacctttgcattattgggacggagatcgattatctcgtgctgaaaaaattgagcaagggttaaattgtgcacactgtgtgtaaatataggtaccaagcccaataacagcaacaaaaaatattctaacgggtctgtggcccaatataacatcatcatgaattatttttggttattcaagattttgagaaacgtttgtgtgtaaactcatagtcgtagttattcaagattctcttgatattttcaagttgaattttgcaagagatactctcagttgtacaagcttcattggtgtcattagcatatgtcagatcagtgatagtgttgatgggttctcaagaaggtattaatattatgaggttgggaaaaagatatagaattctttatgaattgaaaggaacctattcttaccaaaaaaaaacaaatgctatgtcacagactgtgtttgaatttgagaattacgttcagttgtgtgtttgactcaaagtagacggtattgcgacgatccgttcatggcttcatagtttttgtgtaggcaatggcatgcgatgtttagtgagacatatagtcgattttgtttccacattactactaattcaataaagctatagttagttcaaaatggctgacttttgtttcgaagttgcttagctttgataatagaattattagtttcgaattttatgttagtctttcaaaacgaactagctagtgatgtaaaatcgaatttatctgcacttgtacatagcaaaaactctttattttggtttgtattttgtaaacatcaatgacgtacaaaattggttatgacaaatttaataaaccaaaagaaaaacaaatataaacatgttgtgtagaatgtagataacaaatttctgcaataaggttattcagctgtctgaatgaacctaaactatgctaagatagtgttactataagtcttagttaggtgaacaaaaacggcgctcattggagctcctacaaagtaaaacgacaagttgtttctgcgtatggcggacctaaaagtttttttagaaaattaattgaagccatccggtttttctgttctgcatttttgtaattgcgtaaatcgcctaattgctcttgtgtgctgctgcttctgtgtcgccaagattcttcttcttcaaccttgaaaaaccctaaaagttaaccgccactgcgatacggcaccgtatttgacgtttccgccggacgaatctagaattcagtaatg

SEQ ID NO: 17497 - DNA, 3000 bp, Unknown
  misc_feature (1)..( 3000): 2750-1469P.txt file - cDNA_ID_1809434; gDNA_ID_1621167; Annot_ID_57209
cacggcgatctcaaactttcttattccagctttaagcgagattgcattaaacaaggttgatgagtcggtttctcgctttctcactgaaacaagaaagaaaacaactaaattattgaaataaacacaagcctaagatctagagaacaaagacacgagactacaaaaaaaaaacaagtaacaccaataatcaaatctgaacaaatcttacgtttaagttcgtcgaggacagatttagacacgaatgattgagtttttagaggataaagatgaatagatgataatgaattgatgaaggagaagagatgtgatgatgaatagattggagaagaatgttttttagatcggagaagggctcacttggtttgcaagaggcagtgaagaagcaaaataaaacaaattagggtaattgactagggttaagtttatatatgattgcatattttaataaaccgatcggtccgattaccgaaccgacccgacccgaaatccgaacaccaaaattaaattcgccgaacggttagttacagtatcttcggttttcgccgataaccgaaattatcagtttaatcgggtcggtttgctcggttcctgccgtaatcccaggcctaggaaacacggatggctctccattaaatagtgccttacgtaaaaacaccctgtcgtcttatctttctagagttgcaatgagggctgttttctgttacctatccaaaagccctttctttaaacgcagtttttatcttttaagacagctttcgttaaactgttaaaagaaaatgaaaatgcgatgtgaacaaattagaaagcaccaataaaaacatgccacatacattttctatttaataatttaattttcataaaaataaatcaaaacaaaattgagatcgtgcaaaacagaaaaaattttttaaaaaaaacaaaattaattattaaccaaaaaatatgggcttagtaatggaaagaaaaactttctaaaaaataaaattcaagccaatattgatatgcaaaaaaaaaaagtgtaaaaaatcctatattccttaatttgctcctaccaaccccttcacgatcaagctaaaatcaaagcatgttttattaaccgattttctctatttaatcattttttctattatcttccatttttttcttctcttgtggatgctatagaaactactatggaaattctattcaagttagcgcttaatttttctttatattcattcatttgctatttaactcatattaattgtgattttattgtacttatgttttccaaattacaaattattagtagtttaacgattttgttgttaataaacaaatacaaatatttgtattttgttgttaattatttgttgcacaaaataaacaaatacaaatattgcaacctgttgttaataatttgttagttttttaagctaatttttcttagttaactttacaaaatttaaatattgtctaaaaacagaaaaataaataggatttttagatagtataggatccacttttattttccaaaccctttaattatgattgaatctctactgctctctatcaacctcaatcttaacttgtccccgtacgtagtacggggtagaatacttgtatattagaaatttgatagtttttttttggagtcagaaatgtgttttatttattgtataaaaccaatataacaggccaagattttacttatatttaaaaacaaacaaacgtaagaatagaaaacaaaagtccaattaagtgaaccttaaactgaagataaagttgtatacagtacaaacacatgtcaattgagaaccaggttgaaagacacgttgaagaagttggagtcaccgatagattgttgcgacgtcagaaagctccaattccaccaaaaacatcataaatctcattcaatttacatatttatatatttgcctaaagaaacaaggtaaaatcccaattttagctttgttgagaatatgactccatttattgtagatctgtaaattttcttcatcttcttcttcaatcaacaacttttcaaccttcaatttttttttttttttacgtcaaccgatattaacttttcaaccttcaaaaaattttgttgttcacaaaatatatacttgtttttattgaaaaagttcttactatccaaaatatttgttccatcattaaaaatcgaaatagtcggaaaaagaaaaaacaaaagcgagaccaaacctaaacggtccggagaagaagctagcctatcattaccgaaagaccgctaaatccgaagccagagccgaccaccaatgttgattaaaccaccgatgtcagaaacatagccggatgaatatgcaaacgaaggcatctacaccggaagcaaagccaatctatatataccgttgagaaagctggtacaaccaaacgacaaacccacctcaaatgagataaaagtcaacgaaaaaatacatcagagaaatctgagagaatgaaaaatgaaagagagaagagagagaaaccttagaaatttgatagtttatacaggaaaaatacattaaaataatttagttttaaattgtaatgctacttgtcgtaaaaaaaagaaaaaaaaaatttcgaaatactacttagtaatttgaaaaaagaaaacaatattcaaaaaatttccatgttagcgcaaaaaaaaaaaaaatctataatcaaaccaaaccaaaccgaaacaaccaaaaccaacattaaacctaaatctcatgatttttgatttgaataaccacgagttcaccaatccctcttctacattcagtatttaaaatctttataaacacagttagacacataaacgtttctgaaaatcttgaataaccaaaaatgatccataatgataatgatgttacattgggccataggcccgttaaaatatttttctcttgctgttattgggcttggtactttatatatacattatcaaaagacgagaaaatctccgtcaagatgcagagatctactacgcttgagtctgctaaggccatg

SEQ ID NO: 17498 - DNA, 3003 bp, Unknown
  misc_feature (1)..( 3003): 2750-1469P.txt file - cDNA_ID_1809446; gDNA_ID_1621167; Annot_ID_57205
ctcggtgccataaggcccgaatgcacccacatatagacctgcacttagaattcagaacatatttcaagttgagttgtacaaaaacattctgagtccaaatcaaaagaaagagaataacactaatgcacaacatgcttaccatcaaaagggtctaagttgctttcaggagttatgattctattaaatgctgtatactcggagagatggtttcctttttgtgcctggtttatagcaagcttgacaatctcatgcacatgtttcgatacctagaacaataatcaaacaacctttatatctaaaaacattaacacgacaacgtaaaagaggttttaaataataacaaactcctagatctgattctagaggttaactttataaaaagcggtgtaaattcaagtaatataccttcaaagaagctttctctccccagaacgcctcggcaacctctggtggcaacagatctgaaagtccttgagctgcaagagctgttacttgttctttggacactctatttttccttgtatcgatatccctcttacttctcccaggaacatgcaatataaaggaatctctttcagtatccattatatttgccgacacacggacaatctcatcatctatagaggaatcctctatgttatgtagaacccctccgatgacaagcttagtgtttgaatgctttccataatctgcactatccatagatgagattgcttcaatactgtcattttcttcttcttctacttcttcttcatcatcagaagaatttgtttcctcagtgccttctccaaccagctcttcagtagcgtcatcactgccaacaatctcttcctcagggattttaataacatccattactttcagttttagccctgggattttatcttttagaaattttatcacatttttaattccttcttcagttggttccccagcatttagttgtgtatcttcttttttatccaccttcagttcacttcctcgtacatctaaaatggatgggtcattgatcgaggatttcgaggattgctgtacttttgaaaaggaattctcggaaatggttaggttttgcttcacgtgttgcacatacaccacctaaacacagcagataggtacatatcacttcaaaagggttaatcagtgattatcgaaacttcagagaagtttagagcagcaattatgaaacactaatcttatacaataatacaagatacaggtaaaaggatatactgtcaccagaactgttacttaattaaatgtgattttctcaaattacctgcataacatatcctccgtcagtgtctttaataacgaaaatctcaaacaggggtgttccagctgcttcagccaccagctgtctgtaagaaacagtaatgagattcaattatcaccagcaactgagaaaagatttaaatcctcagcataacctgctctcaccttggactgtaactcttgccaataaacctaccaacacctggagttatgtgtacaattctgccaaatggttcctcagaatctcgaggtaaaccaacccaccaacccacctatataaacatcagaaacgtgacaaatgcattgaaattctaaaacaatcatcgtctagataaaagcatagattcttgactagagatttgggtaacactgaaaccatgaagcaatccttgataagttgactaggtgaaaccatcacttatgtcaggaaacatatattacttcaactaaccttaactaccttaatagtttacagacatgtaacctattttcttgattcaaatgtgtaagagtcgtctagtaatatcttacaagctaaacaagaaagaacaaagtataaaggacggtaaacaaaattaccagtccacttcctgtctcgttacataacctggaagcatcatggtaacgctcttcgtttactgcagtctgcaaggaagttaatcatatataagtaagaagataacataagagtttgatgtaataaaaaaacacacatatataaacctgtaactggcgcatgatctcagcgacagcatcatcaacagtagcttctgaaatagcttgtttcaacttgactgcttcttcaaagtcttctttttcaacagcatcctcaagttgagactgttacataagctagaagactccaaatttagaaatctataatcaaccaataatcgaacaaaaaatcatcaatagtagacagagtttagatggatagaaccttgagaagagaaacaacgctctcgacttcttcaatctcggagaagtgacggttccaacgatcccaatcccaatcccacttatcctcactcgaactagtatcagctccatcaacagcggcgcaatttcgcagacagcttaaagatggggctttagggttacaggttgatatagaagaagcgaaggaatgtcgtagaccgatagatacggagaaatttgtgcgtttgttggtcgagagctccggctttagagaatttctggggctgaagaggatgtgaaattgaggaacagcgattatttggccgataagacatggttgagttgtcgccatcggaggacgttatcaccggaatctctcaccgtgctgagaggctttgctttagtttttgacacctcaggacatgtatggatggataggttttaacttttaactttagctagagatggtttaagggcaatttggtaaaatagcaatgcaaaggctgagtttttcttattttcctatgattttttttttttttggttctggtattttcactttttgggaaccaaccaatcaatatcttttaaaattttataatattttctgctctttgactttcgttttttaccaaaagggcaaaatggtaattgaaagaagggaacaaatccccagttagagaagaactgacgttgttctaatcgagagatcagacgcggcggagactggcggagatgatgaattcataaattccttcttctcctttcctctcttttcatttgattggcttcttacacagcttcgtcatcatg

SEQ ID NO: 17499 - DNA, 3003 bp, Unknown; identical to SEQ ID NO: 17498
  misc_feature (1)..( 3003): 2750-1469P.txt file - cDNA_ID_1809446; gDNA_ID_1621167; Annot_ID_173866

SEQ ID NO: 17500 - DNA, 3000 bp, Unknown; identical to SEQ ID NO: 7833
  misc_feature (1)..( 3000): 2750-1469P.txt file - cDNA_ID_1809450; gDNA_ID_1621167; Annot_ID_57204

SEQ ID NO: 17501 - DNA, 3000 bp, Unknown; identical to SEQ ID NO: 7782
  misc_feature (1)..( 3000): 2750-1469P.txt file - cDNA_ID_1809454; gDNA_ID_1621162; Annot_ID_57149

SEQ ID NO: 17502 - DNA, 3003 bp, Unknown
  misc_feature (1)..( 3003): 2750-1469P.txt file - cDNA_ID_1809454; gDNA_ID_2926183; Annot_ID_140651
cactatttgacttactataaagtttttgttctaaagtattactaatttattttttcaataataccacaatttttatataaaatctattcaaccaaaataaatttgaaataaatttaaaatataaaatttggatattctatttctaatttagggtatatatttcaaccatttaaaagaaattttgattcatttgaatattagtttatggtattatatttggtttctaattttcaatttagggtatatatttttactatttttctaaaaaattgactcaatttaatattaaattagtgtttgctcttaattttattttctattttatattttcattaaatttaattaaagtttatagtgttagtttgtgaaattttaaaaatattgtgttgattttggaagaaaacctttttggtgctatatttgtcaatagctctattttatattagtcataaaaaataaaataaaaatatctcaaatattttgactccaaaaatattaaattaatgacatttctttgttcattcacacctgagagtaaagaagtgagaaggagaagaaagaagcaatggagaagatagagcacacgacgatatctaccaatggtattaacatgcatgtggcttcgattggttcaggtccagtgatcctattcgtccatggctttcccgatctctggtactcatggcgtcaccagcttgtctctttcgctgccttaggttaccgcgcaatcgctccagatcttcgaggatacggcgattccgatgcgccgccgtctcgtgaatcttacaccatccttcatatcgtcggagacctcgtcggattactggattcgctcggtgttgatcgggttttcctcgtcggtcacgattggggagcaattgttgcgtggtggctttgtatgatcaggcctgatcgagtcaacgcgttggtcaacactagcgttgtgtttaatccgaggaatccttctgtgaaacctgttgatgcgtttagggctttgttcggcgatgattactacatttgcaggtttcaggtaatactttaaactcatgaacacttaattgaaatgaaaattagggtttggtgaagttctcagtggttgaaatcaaagacatacttagggtttattgatgattactgttcatgatttgatcacgttaatgatagattggttgattatgaacaagagttgtggcaaattgctttatagccaatgcttctttggtgtttagttatgagatcaagttattgaaccgatttgagatagatgtatatttaggcgattgctttttgccatgccttgatactgcttcaagaaagttgagctttttatgtgtaaatgtatacacaatgagaaatttcttagccactattagtttctgtttgtgtctatagaaacagagaccagccacctacctatacatagctgaacttagctcaggctctgactctgataatgcaagttgctattgatgattagaaaaaggcaattagtgcttactttaatatagtgcagtcaaagtcaaagtcatttactttatttgagttacttgctttaagtaaatgtagttggatcagtcttgtggtcttcaattgcttaagttggtcctactaaagattttgagtttcttttttctcaggagcctggagagatcgaagaggactttgctcaagttgatacaaaaaagttaataaccagatttttcacttcgcgtaacccacgtccaccttgcattccaaagtcagttggtttcagaggtttacctgatccaccttctttgcccgcttggctcaccgaacaagatgtcaggttctacggagacaagtttagccaaaaaggcttcaccggtgggctaaactactatcgcgccctgaacctgtaagtcttatgaattctagccacctattctacatcatacaatcatcttttcatggttaatcttggacttgaatcaatctggtcttatcctaacctgcagaagctgggaactaacagctccatggaccggtctacaaatcaaagtccctgtgaaattcatagtgggtgatctagacataacatacaatatccccggaacaaaggaatacatacatgaaggtggtttgaagaagcacgtaccttttctacaagaagtggtggtaatggaaggtgtaggtcacttcctccatcaagagaagcctgacgaggtcactgaccatatctatggcttcttcaagaaattcagaacccgcgaaaccgcatccttgtagtagttctccgtctgcacaatgtcaaattcaaggttgattaagcttgatcagggttacttactgtcttagagccctactatgtaatgttttcaaggatgctatctgtgtattgtgcttgtttaataatttagcaaaatataataatagaacaaataatttctcaaatgttggccatctccagttcaatatatccttaaacttttcttatgtccaaattaattttcaaaatgttgaattcctatggtttctagaaaacttcaattaagcatagatgattttttttaggtgaaattaatatcaaaaaactgaaatatatgtacaattttatcaaaaattataaatctactaaggacatttatacctaccaactgaataaattcaataaaatatataataccaatgttttttttttgtcaacagaattggtgtattaattttttggcagtggatattttcaacaaaatctaaagcgcgttcgaccacgcgcctgtgacgcgtaaaactcagtttgacaaatattcacaattaattgaagacgccagtcagaagaaaaaaccactacgcagcttgaaaagacaaacacaccctcgtcttcttccgtcgcaccgcttctacagcaatgtcattttagtcaaaccccaaaattcgagctccctttgaagaaaaaaccaccaaatcagtttcgttgtcccaaatccaaaattcctccttcttcttcgctgtaacgctttatacctaatcggagataaaacaatg

SEQ ID NO: 17503 - DNA, 3003 bp, Unknown
  misc_feature (1)..( 3003): 2750-1469P.txt file - cDNA_ID_1809460; gDNA_ID_1621162; Annot_ID_57146
ggagttcgtcgactttgagcttgttcgccattttcgtcttcttcttcaggagaatagttcgtcggaaagggaatgagactgaggaagtatggttttcgtcagaagtgagttcgcgcgagcatttgaagagtcttcttcttcgttttcttcttcatcgatggcttcccttgaaagctttagggctttttgaaaaattattttaaatttttttgacaaaagttctcgttcatatttgtggatatttcccatataactttttaatctccaaaagaccccaaacttttggattgattcttaaatccacccctgacctttttaaaatagtatttatttcctaccattgatgatggcaagcaatagaaaatcatgaaagataaaaaaaaaaaggttaaaaatctagtaacaggcaaatactttgaaaaggagttgaaattttgtacataggtttaactcttctattaaaagaaacaaaaaatctctatgttttaaaatgtactactaatttataatttaagaacatttttctgaaaattttgctggttgtttaacgaaaagaaaaatatacaaatagtttttggctgtaatgctacgccactactcacttttccaaggacgtgcatacaaattaccgtaaacggattataggacttgtgttgactaatgacacaattcttttttattaaaagagattagtctccttgaagaaaaagggacacaaattattcgtaacatgttaatcaaaccaaggtcttaagtggctaccaaccgcatacgagtgttgagccgagcagtgctgtgtcgagccgggctggatttggcatttggaatatatgaaatgggccaacaacccaaaagataaaatttcgttacttggacagtaaaaactaaacatgcatgtttattagcccgtaatctgcataatcacaacttacgaagaagacataagaatcaacaggcccatcataaagtgggactaacgatttggtttccactattatttggcccatatattgttaatattgtacacttcaaatattatttagttagaaaaaaaaaaaaaaaaactcttgtaaaactggatggttctagtttagttttaaaaaatggttagatgataacgatattaatatacgataaagtttatataaaatatcttttcataaccaaatttacatgacaactaacattcgggtaagccatgtaaaagacgagatagagattttgaccaaagaagaaaagtagagagaacatgcaaaagccaaaaagaaaacatagccaaatggttgagtggtgtagatggaccgaaccaacagacatgttctcagttcatataccaaccgcctaacattacagcctgtccccatcccctatctttatttttctttttggctcatttagcttcaactttttttaataggtgtgattagaacatactaaaaaaaacatatgttttaacttatattatatgaataaagtgttgtttttaatagtttatatttctattacaagtacaatatataggatattttggttaacaattttaaatttaaaagatattgtgagtacaaatcattaagcttaacacaaatgttcattgcttcttaattcttacaatcggaaaatttggacaaaaaatctagactaatctccaaaacattgtgaaaaattgggggttttttttatcatttaaattgtctatagtggtcaatcattattaaaaaaaattgttttttgttgaaattttaaattataaaaaaaaaacacgtttatacataaaatgcaaaaacttttcttaaaccaaattacagagaaaggctatcaccatccttgtcttgatgccaaccacacttgtaatcccaaaatacatacttaaactatactatactaacatgaattggttatacgattatctatctagttagctacataattcatataattagttttttaaaatatacttatgtaatgatagtaactaaaaaatatactatctcgagaaatccaaccaaaatgctatgatagtatataaaataaaatgaaagaaagaggaaccaagttgtgaaaccatttaccaagaagaagaagaaaaaaacaagatggtcgagtctcgtgatagtatgaagctggggccgaaaccacgaatcaaagaaccatttgacgatgcaagtggtcatcgataaccaatcaatagaaactccaccgcctcaaaatatcatagtgctatttaatttttcatactatcatttattgtaggctataacatatttttgtattgtagatggacggctagtacacgcaagttagtcaataaacttttaacaaatggcatcttgacatgcttaaacacattttataattcgaacctcactttgcctactttacacacgtctacttatagtagatgagcatcaatcattgaaccgttcgtataatacaattttttttttgtaatacgttataattagaaagtaatggaaaataagttgaaacacaaattttcaacggttttactaagatttaattttacaattttcaaaatataaccgaattatttaaatcgtattaaatttataattaattttctaaaaaaaaacacagattaaaaaaatatattaaaactaatcataaatatattaatttttgtaatttatatttttttataactttaaactaataatattcaattatttatcttaaagtttacaaattatcaataataactaataaataatgcataaaaactttttaaaaattaactttttgaaacaaatttttttctaaaaaattaaataataaagaacagaaaaaatattattcaactaaaaatattggataataactctgaaagtttgcatttttcaaataaatcattgattttttttgtttgacataaaacattaatttccccttgtaaatcacacatttaaaatctaactatatttaaacaaaaaaaaaaagtccaattttgactttaattatataaaaaaagcaaagctaattatg

SEQ ID NO: 17504 - DNA, 3003 bp, Unknown
  misc_feature (1)..( 3003): 2750-1469P.txt file - cDNA_ID_1809460; gDNA_ID_1621162; Annot_ID_173732
ttatttcctaccattgatgatggcaagcaatagaaaatcatgaaagataaaaaaaaaaaggttaaaaatctagtaacaggcaaatactttgaaaaggagttgaaattttgtacataggtttaactcttctattaaaagaaacaaaaaatctctatgttttaaaatgtactactaatttataatttaagaacatttttctgaaaattttgctggttgtttaacgaaaagaaaaatatacaaatagtttttggctgtaatgctacgccactactcacttttccaaggacgtgcatacaaattaccgtaaacggattataggacttgtgttgactaatgacacaattcttttttattaaaagagattagtctccttgaagaaaaagggacacaaattattcgtaacatgttaatcaaaccaaggtcttaagtggctaccaaccgcatacgagtgttgagccgagcagtgctgtgtcgagccgggctggatttggcatttggaatatatgaaatgggccaacaacccaaaagataaaatttcgttacttggacagtaaaaactaaacatgcatgtttattagcccgtaatctgcataatcacaacttacgaagaagacataagaatcaacaggcccatcataaagtgggactaacgatttggtttccactattatttggcccatatattgttaatattgtacacttcaaatattatttagttagaaaaaaaaaaaaaaaaactcttgtaaaactggatggttctagtttagttttaaaaaatggttagatgataacgatattaatatacgataaagtttatataaaatatcttttcataaccaaatttacatgacaactaacattcgggtaagccatgtaaaagacgagatagagattttgaccaaagaagaaaagtagagagaacatgcaaaagccaaaaagaaaacatagccaaatggttgagtggtgtagatggaccgaaccaacagacatgttctcagttcatataccaaccgcctaacattacagcctgtccccatcccctatctttatttttctttttggctcatttagcttcaactttttttaataggtgtgattagaacatactaaaaaaaacatatgttttaacttatattatatgaataaagtgttgtttttaatagtttatatttctattacaagtacaatatataggatattttggttaacaattttaaatttaaaagatattgtgagtacaaatcattaagcttaacacaaatgttcattgcttcttaattcttacaatcggaaaatttggacaaaaaatctagactaatctccaaaacattgtgaaaaattgggggttttttttatcatttaaattgtctatagtggtcaatcattattaaaaaaaattgttttttgttgaaattttaaattataaaaaaaaaacacgtttatacataaaatgcaaaaacttttcttaaaccaaattacagagaaaggctatcaccatccttgtcttgatgccaaccacacttgtaatcccaaaatacatacttaaactatactatactaacatgaattggttatacgattatctatctagttagctacataattcatataattagttttttaaaatatacttatgtaatgatagtaactaaaaaatatactatctcgagaaatccaaccaaaatgctatgatagtatataaaataaaatgaaagaaagaggaaccaagttgtgaaaccatttaccaagaagaagaagaaaaaaacaagatggtcgagtctcgtgatagtatgaagctggggccgaaaccacgaatcaaagaaccatttgacgatgcaagtggtcatcgataaccaatcaatagaaactccaccgcctcaaaatatcatagtgctatttaatttttcatactatcatttattgtaggctataacatatttttgtattgtagatggacggctagtacacgcaagttagtcaataaacttttaacaaatggcatcttgacatgcttaaacacattttataattcgaacctcactttgcctactttacacacgtctacttatagtagatgagcatcaatcattgaaccgttcgtataatacaattttttttttgtaatacgttataattagaaagtaatggaaaataagttgaaacacaaattttcaacggttttactaagatttaattttacaattttcaaaatataaccgaattatttaaatcgtattaaatttataattaattttctaaaaaaaaacacagattaaaaaaatatattaaaactaatcataaatatattaatttttgtaatttatatttttttataactttaaactaataatattcaattatttatcttaaagtttacaaattatcaataataactaataaataatgcataaaaactttttaaaaattaactttttgaaacaaatttttttctaaaaaattaaataataaagaacagaaaaaatattattcaactaaaaatattggataataactctgaaagtttgcatttttcaaataaatcattgattttttttgtttgacataaaacattaatttccccttgtaaatcacacatttaaaatctaactatatttaaacaaaaaaaaaaagtccaattttgactttaattatataaaaaaagcaaagctaattatgggtcaaaagactcaaaggccagaattgacgcagccgtttatgagaagtgagaagacaatttcggagtcacttcctttatttcctctcttccttcactctctcctatataaaccttcctctcctcttcctctcttctcatctcttcaaaccattttcgaaagccttgagagagagaacacagacgataccaactttcttcaatctcgttgccgcagtataattatctcattcctcggatatatctctccttctgcggcggcgacaagaagctacaagaataaaaagtctgttttctctcttttcaagaaaccacttacttcgaaaatg

SEQ ID NO: 17505 - DNA, 3000 bp, Unknown
  misc_feature (1)..( 3000): 2750-1469P.txt file - cDNA_ID_1809460; gDNA_ID_2926183; Annot_ID_140654
gttcgtcgactttgagcttgttcgccattttcgtcttcttcttcaggagaatagttcgtcggaaagggaatgagactgaggaagtatggttttcgtcagaagtgagttcgcgcgagcatttgaagagtcttcttcttcgttttcttcttcatcgatggcttcccttgaaagctttagggctttttgaaaaattattttaaatttttttgacaaaagttctcgttcatatttgtggatatttcccatataactttttaatctccaaaagaccccaaacttttggattgattcttaaatccacccctgacctttttaaaatagtatttatttcctaccattgatgatggcaagcaatagaaaatcatgaaagataaaaaaaaaaaggttaaaaatctagtaacaggcaaatactttgaaaaggagttgaaattttgtacataggtttaactcttctattaaaagaaacaaaaaatctctatgttttaaaatgtactactaatttataatttaagaacatttttctgaaaattttgctggttgtttaacgaaaagaaaaatatacaaatagtttttggctgtaatgctacgccactactcacttttccaaggacgtgcatacaaattaccgtaaacggattataggacttgtgttgactaatgacacaattcttttttattaaaagagattagtctccttgaagaaaaagggacacaaattattcgtaacatgttaatcaaaccaaggtcttaagtggctaccaaccgcatacgagtgttgagccgagcagtgctgtgtcgagccgggctggatttggcatttggaatatatgaaatgggccaacaacccaaaagataaaatttcgttacttggacagtaaaaactaaacatgcatgtttattagcccgtaatctgcataatcacaacttacgaagaagacataagaatcaacaggcccatcataaagtgggactaacgatttggtttccactattatttggcccatatattgttaatattgtacacttcaaatattatttagttagaaaaaaaaaaaaaaaaactcttgtaaaactggatggttctagtttagttttaaaaaatggttagatgataacgatattaatatacgataaagtttatataaaatatcttttcataaccaaatttacatgacaactaacattcgggtaagccatgtaaaagacgagatagagattttgaccaaagaagaaaagtagagagaacatgcaaaagccaaaaagaaaacatagccaaatggttgagtggtgtagatggaccgaaccaacagacatgttctcagttcatataccaaccgcctaacattacagcctgtccccatcccctatctttatttttctttttggctcatttagcttcaactttttttaataggtgtgattagaacatactaaaaaaaacatatgttttaacttatattatatgaataaagtgttgtttttaatagtttatatttctattacaagtacaatatataggatattttggttaacaattttaaatttaaaagatattgtgagtacaaatcattaagcttaacacaaatgttcattgcttcttaattcttacaatcggaaaatttggacaaaaaatctagactaatctccaaaacattgtgaaaaattgggggttttttttatcatttaaattgtctatagtggtcaatcattattaaaaaaaattgttttttgttgaaattttaaattataaaaaaaaaacacgtttatacataaaatgcaaaaacttttcttaaaccaaattacagagaaaggctatcaccatccttgtcttgatgccaaccacacttgtaatcccaaaatacatacttaaactatactatactaacatgaattggttatacgattatctatctagttagctacataattcatataattagttttttaaaatatacttatgtaatgatagtaactaaaaaatatactatctcgagaaatccaaccaaaatgctatgatagtatataaaataaaatgaaagaaagaggaaccaagttgtgaaaccatttaccaagaagaagaagaaaaaaacaagatggtcgagtctcgtgatagtatgaagctggggccgaaaccacgaatcaaagaaccatttgacgatgcaagtggtcatcgataaccaatcaatagaaactccaccgcctcaaaatatcatagtgctatttaatttttcatactatcatttattgtaggctataacatatttttgtattgtagatggacggctagtacacgcaagttagtcaataaacttttaacaaatggcatcttgacatgcttaaacacattttataattcgaacctcactttgcctactttacacacgtctacttatagtagatgagcatcaatcattgaaccgttcgtataatacaattttttttttgtaatacgttataattagaaagtaatggaaaataagttgaaacacaaattttcaacggttttactaagatttaattttacaattttcaaaatataaccgaattatttaaatcgtattaaatttataattaattttctaaaaaaaaacacagattaaaaaaatatattaaaactaatcataaatatattaatttttgtaatttatatttttttataactttaaactaataatattcaattatttatcttaaagtttacaaattatcaataataactaataaataatgcataaaaactttttaaaaattaactttttgaaacaaatttttttctaaaaaattaaataataaagaacagaaaaaatattattcaactaaaaatattggataataactctgaaagtttgcatttttcaaataaatcattgattttttttgtttgacataaaacattaatttccccttgtaaatcacacatttaaaatctaactatatttaaacaaaaaaaaaaagtccaattttgactttaattatataaaaaaagcaaagctaattatg

SEQ ID NO: 17506 - DNA, 3000 bp, Unknown
  misc_feature (1)..( 3000): 2750-1469P.txt file - cDNA_ID_1809460; gDNA_ID_2926183; Annot_ID_200411
tttcctaccattgatgatggcaagcaatagaaaatcatgaaagataaaaaaaaaaaggttaaaaatctagtaacaggcaaatactttgaaaaggagttgaaattttgtacataggtttaactcttctattaaaagaaacaaaaaatctctatgttttaaaatgtactactaatttataatttaagaacatttttctgaaaattttgctggttgtttaacgaaaagaaaaatatacaaatagtttttggctgtaatgctacgccactactcacttttccaaggacgtgcatacaaattaccgtaaacggattataggacttgtgttgactaatgacacaattcttttttattaaaagagattagtctccttgaagaaaaagggacacaaattattcgtaacatgttaatcaaaccaaggtcttaagtggctaccaaccgcatacgagtgttgagccgagcagtgctgtgtcgagccgggctggatttggcatttggaatatatgaaatgggccaacaacccaaaagataaaatttcgttacttggacagtaaaaactaaacatgcatgtttattagcccgtaatctgcataatcacaacttacgaagaagacataagaatcaacaggcccatcataaagtgggactaacgatttggtttccactattatttggcccatatattgttaatattgtacacttcaaatattatttagttagaaaaaaaaaaaaaaaaactcttgtaaaactggatggttctagtttagttttaaaaaatggttagatgataacgatattaatatacgataaagtttatataaaatatcttttcataaccaaatttacatgacaactaacattcgggtaagccatgtaaaagacgagatagagattttgaccaaagaagaaaagtagagagaacatgcaaaagccaaaaagaaaacatagccaaatggttgagtggtgtagatggaccgaaccaacagacatgttctcagttcatataccaaccgcctaacattacagcctgtccccatcccctatctttatttttctttttggctcatttagcttcaactttttttaataggtgtgattagaacatactaaaaaaaacatatgttttaacttatattatatgaataaagtgttgtttttaatagtttatatttctattacaagtacaatatataggatattttggttaacaattttaaatttaaaagatattgtgagtacaaatcattaagcttaacacaaatgttcattgcttcttaattcttacaatcggaaaatttggacaaaaaatctagactaatctccaaaacattgtgaaaaattgggggttttttttatcatttaaattgtctatagtggtcaatcattattaaaaaaaattgttttttgttgaaattttaaattataaaaaaaaaacacgtttatacataaaatgcaaaaacttttcttaaaccaaattacagagaaaggctatcaccatccttgtcttgatgccaaccacacttgtaatcccaaaatacatacttaaactatactatactaacatgaattggttatacgattatctatctagttagctacataattcatataattagttttttaaaatatacttatgtaatgatagtaactaaaaaatatactatctcgagaaatccaaccaaaatgctatgatagtatataaaataaaatgaaagaaagaggaaccaagttgtgaaaccatttaccaagaagaagaagaaaaaaacaagatggtcgagtctcgtgatagtatgaagctggggccgaaaccacgaatcaaagaaccatttgacgatgcaagtggtcatcgataaccaatcaatagaaactccaccgcctcaaaatatcatagtgctatttaatttttcatactatcatttattgtaggctataacatatttttgtattgtagatggacggctagtacacgcaagttagtcaataaacttttaacaaatggcatcttgacatgcttaaacacattttataattcgaacctcactttgcctactttacacacgtctacttatagtagatgagcatcaatcattgaaccgttcgtataatacaattttttttttgtaatacgttataattagaaagtaatggaaaataagttgaaacacaaattttcaacggttttactaagatttaattttacaattttcaaaatataaccgaattatttaaatcgtattaaatttataattaattttctaaaaaaaaacacagattaaaaaaatatattaaaactaatcataaatatattaatttttgtaatttatatttttttataactttaaactaataatattcaattatttatcttaaagtttacaaattatcaataataactaataaataatgcataaaaactttttaaaaattaactttttgaaacaaatttttttctaaaaaattaaataataaagaacagaaaaaatattattcaactaaaaatattggataataactctgaaagtttgcatttttcaaataaatcattgattttttttgtttgacataaaacattaatttccccttgtaaatcacacatttaaaatctaactatatttaaacaaaaaaaaaaagtccaattttgactttaattatataaaaaaagcaaagctaattatgggtcaaaagactcaaaggccagaattgacgcagccgtttatgagaagtgagaagacaatttcggagtcacttcctttatttcctctcttccttcactctctcctatataaaccttcctctcctcttcctctcttctcatctcttcaaaccattttcgaaagccttgagagagagaacacagacgataccaactttcttcaatctcgttgccgcagtataattatctcattcctcggatatatctctccttctgcggcggcgacaagaagctacaagaataaaaagtctgttttctctcttttcaagaaaccacttacttcgaaaatg

SEQ ID NO: 17507 - DNA, 3000 bp, Unknown; identical to SEQ ID NO: 7772
  misc_feature (1)..( 3000): 2750-1469P.txt file - cDNA_ID_1809467; gDNA_ID_1621162; Annot_ID_57144

SEQ ID NO: 17508 - DNA, 3003 bp, Unknown
  misc_feature (1)..( 3003): 2750-1469P.txt file - cDNA_ID_1809467; gDNA_ID_2926183; Annot_ID_140656
aagacaaagaattattggtctgacagaaaggagtttatcccacatcccaagtcctatacatggctcgaaatggattacggaaaagaggaaaatgattcaccggtgagtgttttggaatcctcacttctctttctcttcttactatttgttgtgtggtatgatccaagggatctgctggaatgaggtttttgagtgcatatctacttttctttttcccgtttaattgcaattatatattttttttctcttcgttcaaatgtgcactttactcagagttcacgattgttttttttctcaggtcaataatgatattccgagttcatcttccgaagttaaacctgaacaatcaaaactagatactcgggttgccaagttcatctctcttatatgtaatgtcagcatgatggcacagcatatgatggaaataggtttgagtctaactttgatcacttcattcaagtgagagcatccattggcagattaacagtgatttttatatgtcgatacattatctctttgttttggtgtcctattacctgcgtttgtacttcctatcttttgtcctatccatttgtttgccattttgctggtttctttacttcttgctgatttttcatacatcttctaaatttggaattgaaggatataacgctaacaaattgccactcggcaagataagcaagtccacaatttcaaaggtaaagatagtaaacagtctgtttggtctcatttccgtaaattatagtttggtgtgatttcagatgatataatctcctcttccacatgtctagggttatgaagtgctgaagagaatatcggaggtgattgatcggtatgatagaacgaggcttgaggaactgagtgggtatgtatctggttaattgctagacaatttttcgcatttagttgattatgtaactgtttcccataaagaaattagatttgaactagtctaactttgtttatcattgatgcagagagttctacacagtgatacctcatgattttggttttaagaaaatgagtaagttcatctgtgctaaggtttacgatatatataactaaacattcactaacatctgaattccgagctgtaacaggccagtttgttatagacactcctcaaaagttgaaacagaaaattgaaatggtaatttttcctactgtttccttacttgactagttttggtcttcagaaaagcaatggtttgtcgctacatgttttgtgtagtttttaatatatcgtttttttgtaaggttgaagcattaggtgagattgaactcgcaacaaagttgttgtccgtcgacccgggattgcaggtaattcagtcagtctatgtggtttgaaggcatgaaatcactccgtcgtatagttctctaagaatatgacattattttttgcaatggctgtaggatgatcctttatattatcactaccagcaacttaattgtggtttgacgccagtaggaaatgattcagaggagttctctatggtaaattttcggttttgtgaactttgaacaaatatctttgatactcgagcatctcaaacatgtctgtgttttaaaccttttggtgtttactccttaaaaccaaaatcaggttgctaattacatggagaacactcatgcaaagacgcattcgggatatacggttgagattgctcaactatttagagcttcgagagctgttgaagctgatcgattccaacaggtatgttatggtatttcgagcttgtcagtaccatacacattattctgatttctcgtttttggcattgtgagactttaatttttcttggcagttttcaagttcgaagaacaggatgctactctggcacggttcacgtctcactaactgggctggtattttatctcaaggtaacatgttactctttttcctcttagtaactactttttttcttctcctcttgggggattttcaattgcatagtaaaatgaacaactatgagacaccaagcaggtctgcgaatagctcctcctgaagcgcctgtaactggttacatgtttggaaaaggggtttactttgcggatatgttctccaagagtgcgaactattgctatgccaacactggcgctaatgatggcgttctgctcctctgcgaggtatactcgcttcttgtctctattcatatagaaaacaacaaaactactgtataactacaggacctctatagccattcaacataactatccttatgtttcctaacgataaaaacttctctaggttgctttgggagacatgaatgaacttctgtattcagattataacgcggataatctacccccgggaaagctaaggtatgaagataatctcattcatatttcacacaagttccttatctcaaaccgcaatgaattatgatttactatttttgtactgtaccttgatttgttatttgatggttgcagcacaaaaggtgtggggaaaacagcaccaaacccatcagaggctcaaacactagaagacggtgttgttgttccacttggcaaaccagtggaacgttcatgctccaaggtttttgtttttgtcttgcttcaacacacattcacaaaatctaactctctcaaatttcataaactgactttatataacttttgcaggggatgttgttgtacaacgaatatatagtctacaatgtggaacaaatcaagatgcgttatgtgatccaagtcaaattcaactacaagcactaaaacttatgtatattagcttttgaacatcaactaattatccaaaaatcagcgttttattgtatttctttcaaactccttcatctctgattttgcacggttcactcgtatattggtacgctaaaccgcaaaccatacccaattttatccggtttagttggtatgattgagaaattcttattctctgaaactcgattttattagtatttaagcgaaagagaagaaaccctacgaaaatctcaatcggaaactaaacggcaaaaaaaaaaaaaagcagaggcagccatg

SEQ ID NO: 17509 - DNA, 3003 bp, Unknown
  misc_feature (1)..( 3003): 2750-1469P.txt file - cDNA_ID_1809482; gDNA_ID_1621162; Annot_ID_57138
gctatacggatttatttgttagttgttactcctacataactgaaaccaaacatatatttgatgtttaatgcagcctacgaaaggtatactgttgtttggacctcctggtactggaaagacgatgctggcaaaagcagtagcaactgaggctggcgcaaatttcatcaatatctcaatgtccagcattacttcgaaggtaactctcataaagtgatatgatttccttttatgctttcttttaatgattgtacttgaccatttacactaaatgctttgcagtggtttggtgagggagagaagtacgttaaagctgtcttctccttagcgagcaagattgcgccaagtgtcatttttgttgatgaggtatgtttgaagatattaaaaagcgttctctgttctctcccacctttgaagccagtctttttatgtactttctcgatctgatgattgtggaaaatcattattcaggttgatagcatgttgggtagacgtgaaaatccaggggaacatgaagctatgcgtaagatgaagaacgagttcatggtaaactgggatggtttaagaacaaaggatagagaacgggttctggtactcgctgccaccaacagaccatttgacctagacgaagctgttattagacggcttccccggaggtaaaaccaccacttttccctctgttgtctgttagttgtgaagaatattgcaaccattgttgatcctctcctgcatactacttctgtgcagattgatggttaatcttccagatgcaacgaacagatcaaagatcttgagcgttattctagcaaaagaagaaatagcaccagacgtcgatttagaagctatagcaaatatgacagatgggtactcaggaagtgacttaaaggtctcgactttctataaccttccctctcaatctccttcccctgtaaaaaaactcacacacgtattcttttttggttgcagaatctgtgtgtgaccgcagcacattttccaatccgagaaatactggagaaagaaaagaaggtttggtttctgtttaatgcgattgcttctcgaatcctgaagtccatttacattactcgcataactcattctttttattattctggctgttgttttgactacaggagaaaactgcagctcaggctgagaaccgtcccacaccgccattgtatagctgcacagatgttcgttccctgacaatgaacgatttcaaggctgcccatgatcaggtaagtcaagacaaagaagccaatgagtttcacatatgtgataataactttgaaaagaaagctaaatgatcagaaacatgtaggtatgcgcaagtgtgtcttcagactcgtcgaacatgaacgaacttcagcaatggaacgagctgtatggtgaaggaggatcgaggaagaagacgtcgttgagctacttcatgtagaagagagacaaaagagagagggagggagatttgttcgtttttgatctctctcgtgttcggtttttttttttgaatctcattttggtcgtttaatttataaatttgtgtacagagagaaagggtgttgttcgttttgctgtctaattcattttctttctcaacataagatgaaaaaaacattcgctgtataatctaatacatgcgtatgtatatagaggctcggatcttttaaggataaggacataattctaaatcttcaaggtgtgtgctttgagagtctttagaaaactaaatagtgcattattataaacttatgatctgatatgtctatacgtctcgtaaccaaaaccagagtatcgaaactaaagataagaaaacgaaacgaaataaagcaatttaatttacttaccattgcacaaaggcaagaagtgtttggtgccaaatgacgggtataacattcgtctccttatgaaatctaaagaagtgagtggtaaccgcatcaatcgcccgatacgccattgcatatctcttctccagaataactttgatgaagaaactgcatccacacacacaaaaacagaatgcaaccaaataaagacacacaatacctatatgtgtaagtgtaaggttagcctgcgttttaccttgttcggccataaaaattccaactccgccaaacttagcaaagcagcactgcagttcataacattagcactgcgttttattcacgcttaataacattagagagacgtttagctattgaagctccatccttggaaagcaaggcatcaagtaacttgtcttcttcctcagtggccatatcctggtaattaagttggatctgaaactcttgagattgctcatcaacatcatcatcatcaatcaaatatcttccaatccatacactgccttcttaataaaggcagtcattgggattttctgacttctatttgctgctcataggctagcttaaggatcttcggcgttagtttcacaaatccatagaatttagaaaccctatcaattccaaaatctacaaaaaggttttaaaatttcccactcaccttcctgaggaggaggctacgacgcgaatagctttacgtttccacttaatcgccattggatatagtcaagaagtagagactatgtgagattgagggaacgcaatttagcatatgaagaagaaaccctacttgactttagccctaaaatctattacgtgacccaagcggctacttgtacatctgtcataacgggcagaatattttggtctaagcccaatgagctaatatgggctttaaatcttaagtccattaacatcaaattcaatttgttcaaacgcgaaacgcaaatcgcattgtgcagctgcgtcccagtgttgaaactcttcgaactcccaaaacgcaaaagcttcgtcttcttcttcatccttgtctcaccttcgattttggcggcaaaacataaaccctaagggttttctcactctctctctctcttctcacacacacagtcccagagtacggtggtgttgattcgattgaggagattcatctgtttatagggtttagcaaatg

SEQ ID NO: 17510 - DNA, 3000 bp, Unknown
  misc_feature (1)..( 3000): 2750-1469P.txt file - cDNA_ID_1809482; gDNA_ID_2926183; Annot_ID_140662
atacggatttatttgttagttgttactcctacataactgaaaccaaacatatatttgatgtttaatgcagcctacgaaaggtatactgttgtttggacctcctggtactggaaagacgatgctggcaaaagcagtagcaactgaggctggcgcaaatttcatcaatatctcaatgtccagcattacttcgaaggtaactctcataaagtgatatgatttccttttatgctttcttttaatgattgtacttgaccatttacactaaatgctttgcagtggtttggtgagggagagaagtacgttaaagctgtcttctccttagcgagcaagattgcgccaagtgtcatttttgttgatgaggtatgtttgaagatattaaaaagcgttctctgttctctcccacctttgaagccagtctttttatgtactttctcgatctgatgattgtggaaaatcattattcaggttgatagcatgttgggtagacgtgaaaatccaggggaacatgaagctatgcgtaagatgaagaacgagttcatggtaaactgggatggtttaagaacaaaggatagagaacgggttctggtactcgctgccaccaacagaccatttgacctagacgaagctgttattagacggcttccccggaggtaaaaccaccacttttccctctgttgtctgttagttgtgaagaatattgcaaccattgttgatcctctcctgcatactacttctgtgcagattgatggttaatcttccagatgcaacgaacagatcaaagatcttgagcgttattctagcaaaagaagaaatagcaccagacgtcgatttagaagctatagcaaatatgacagatgggtactcaggaagtgacttaaaggtctcgactttctataaccttccctctcaatctccttcccctgtaaaaaaactcacacacgtattcttttttggttgcagaatctgtgtgtgaccgcagcacattttccaatccgagaaatactggagaaagaaaagaaggtttggtttctgtttaatgcgattgcttctcgaatcctgaagtccatttacattactcgcataactcattctttttattattctggctgttgttttgactacaggagaaaactgcagctcaggctgagaaccgtcccacaccgccattgtatagctgcacagatgttcgttccctgacaatgaacgatttcaaggctgcccatgatcaggtaagtcaagacaaagaagccaatgagtttcacatatgtgataataactttgaaaagaaagctaaatgatcagaaacatgtaggtatgcgcaagtgtgtcttcagactcgtcgaacatgaacgaacttcagcaatggaacgagctgtatggtgaaggaggatcgaggaagaagacgtcgttgagctacttcatgtagaagagagacaaaagagagagggagggagatttgttcgtttttgatctctctcgtgttcggtttttttttttgaatctcattttggtcgtttaatttataaatttgtgtacagagagaaagggtgttgttcgttttgctgtctaattcattttctttctcaacataagatgaaaaaaacattcgctgtataatctaatacatgcgtatgtatatagaggctcggatcttttaaggataaggacataattctaaatcttcaaggtgtgtgctttgagagtctttagaaaactaaatagtgcattattataaacttatgatctgatatgtctatacgtctcgtaaccaaaaccagagtatcgaaactaaagataagaaaacgaaacgaaataaagcaatttaatttacttaccattgcacaaaggcaagaagtgtttggtgccaaatgacgggtataacattcgtctccttatgaaatctaaagaagtgagtggtaaccgcatcaatcgcccgatacgccattgcatatctcttctccagaataactttgatgaagaaactgcatccacacacacaaaaacagaatgcaaccaaataaagacacacaatacctatatgtgtaagtgtaaggttagcctgcgttttaccttgttcggccataaaaattccaactccgccaaacttagcaaagcagcactgcagttcataacattagcactgcgttttattcacgcttaataacattagagagacgtttagctattgaagctccatccttggaaagcaaggcatcaagtaacttgtcttcttcctcagtggccatatcctggtaattaagttggatctgaaactcttgagattgctcatcaacatcatcatcatcaatcaaatatcttccaatccatacactgccttcttaataaaggcagtcattgggattttctgacttctatttgctgctcataggctagcttaaggatcttcggcgttagtttcacaaatccatagaatttagaaaccctatcaattccaaaatctacaaaaaggttttaaaatttcccactcaccttcctgaggaggaggctacgacgcgaatagctttacgtttccacttaatcgccattggatatagtcaagaagtagagactatgtgagattgagggaacgcaatttagcatatgaagaagaaaccctacttgactttagccctaaaatctattacgtgacccaagcggctacttgtacatctgtcataacgggcagaatattttggtctaagcccaatgagctaatatgggctttaaatcttaagtccattaacatcaaattcaatttgttcaaacgcgaaacgcaaatcgcattgtgcagctgcgtcccagtgttgaaactcttcgaactcccaaaacgcaaaagcttcgtcttcttcttcatccttgtctcaccttcgattttggcggcaaaacataaaccctaagggttttctcactctctctctctcttctcacacacacagtcccagagtacggtggtgttgattcgattgaggagattcatctgtttatagggtttagcaaatg

SEQ ID NO: 17511 - DNA, 3003 bp, Unknown
  misc_feature (1)..( 3003): 2750-1469P.txt file - cDNA_ID_1809489; gDNA_ID_1621162; Annot_ID_57136
ttgttctctctcatgtgtcaaactcgtttcatctacgtagcatcgagatttcagttaatcgaatctcctgttatcatggacatgttatataaaatggatatagatcagtaaaaaggtttccgaatggatatatttaaatggattcgttattatggacaccaaaaaattgtttgttgatttttctttcagtttgcagagacctccaccttcaaaaccttatggacatggaactttggtttctttacaaaacacggttaatcgaatctcctattattattgacatggtatatagaatggatacggatcagtagaaaggtttctgaatggatatatttaaatggacttgttattatagataccaaaaaattatttgttgatttttctttcagtttggagagacctccaccttcaagatcttatggacatggaactttggtttctatacgaaccacggttaatcgaatttcttgttattattgacatggtatatagattggatatggatcagtaaaaaggtttctgaatggatatatttaaatggacttgttattatggataccaaaattttttaccaaattcctgagataatcgagatcgaattgtttaagaaacttctcccatttatttgcagaatcgttatcaccaatttttagtgagccgccgtcataatcgataagaggaatcaaacctagaagttatggagacgtggagagagaaaggcactacaaatgtgagagagagaaagagagagagagagagatctttttttctattttgcgtaaggatcgtggaagagagaaaaaatatttaatttgtgttaaaattcaaaataaaagtagttgtttaagttaggggtaaaaatgtcttaaaaaaagtcaaataatggaaaaagtgtcctcaccctcataagtgcataaaaaagaataagattatctaaaagtgcctaaacgtgtcacatttttatatatctccgtctttttttcttcttttttgtaaaatgacttaattacccttagtttttagtcggtgaagtttagagatcttgtggtaatttggtctttgcattcaaaacgctgaatcataaaaacaaaatattatgctgttaatttgactcaaattttctttgttataaagtataatctttattattattttgttcaaaagctgaagcattttttagacaaagaaagtcataacttagtagatattcaatatttaaaaaatgacattatttcctagattttgtagttaatacatttctatagagttatatattatgaatttatataaagtttttttttaacacaatgaatattatatatatatataagttttatgtatttaagtttccttttgaaggaaatgaacatacacattgtaaccgacttaaattaaattacgaaaaggtcacgtgatgtggcatgcatggatgtatatagtcaaaaagactgattaagagactgaattcatgcgaacacgtgcccaatacaaaacaaacggttagacgaacggatactcccaaagtgtttctgttcatcgaacgaaacgtatgttgctcttgttgttgttgtgtagtagtagcgaactacccggttcggtatttttttttcttctttcaaaaatattctcaacgatttcatgttttttgttttgttttattcatgttcttggtcaaacattattgatttggtttcgataaacctattcttgaggattttattatatacctttgatcaaaatacaaatgggtgactttttctttacttcatttgcttcttttttggggtgttagaaaaaaacacttaaaaaaaaaaaaataggagtgataaaacagagtttgaccatagtgtttgcgtcattgtgagtgaaaatgaatgtggtaaagtaaaaaagatttgactactagttgggagtcaattactccagaaaaagcaagtagatgaagaatcttacctccttatctcttgtatacgtgcttgtggtatttgccccaagggggggagctacaatacctctcgcattctccttttgtacaattataaaaagtgaactgtctttccaaaaaaggaaattattattatattctctcaatgtgaaaattacaatagtttatccgacttgatttcacatattttaggttttaattgttaagtttagaataataacaataatgataaatttttgaaaaagaataactaaaaataataattgatgaaattcatttagtttattcattaatttaaatcagctataagtctttttgttaaattgctaatttttatgtgttttacatgtttgtgcttttccaatatctttttgtttgaaaactttaaaagtcaataaattactcaattttctaaaaacgacaaattaaatttgtcggatgcgttaattccaacgtgtaagtactttttgatttatagataacggaattaccattatatagatcacaaagacataaaaacaaaagtacaatgtttaatccagaattttctcgttgacgaagcgtgtattcattgattatgggatctaaattgtcgtgtgtgtttataatttttttaataattaaaattattataaagtcaatttacattgttaatatgcaaatatatcaatcaaaatacacacataaatatgtggatttaaattcggatattatagtgttcaaattttttaaaaatatggaatatcgatggtcaagttatttatatatttgacccgtaaaatgtacagtaattaatttaaacgcagagagacaataaaaattaaataaaaaaaagttttgcaggtttatgtttaatttataaattgaccatcccagtaatcatttacatgatatctctctgattcttcgatttctctttctctctctctcgctctatccttctcctatctctaatctcttgtcttctctctctttctctatcgggaaaccaagcggctcttctttggatcaaaggcgaagtcaaggcggagaaagaaaagagagggtcgtgagatatg

SEQ ID NO: 17512 - DNA, 3000 bp, Unknown
  misc_feature (1)..( 3000): 2750-1469P.txt file - cDNA_ID_1809489; gDNA_ID_2926183; Annot_ID_140664
ttctctctcatgtgtcaaactcgtttcatctacgtagcatcgagatttcagttaatcgaatctcctgttatcatggacatgttatataaaatggatatagatcagtaaaaaggtttccgaatggatatatttaaatggattcgttattatggacaccaaaaaattgtttgttgatttttctttcagtttgcagagacctccaccttcaaaaccttatggacatggaactttggtttctttacaaaacacggttaatcgaatctcctattattattgacatggtatatagaatggatacggatcagtagaaaggtttctgaatggatatatttaaatggacttgttattatagataccaaaaaattatttgttgatttttctttcagtttggagagacctccaccttcaagatcttatggacatggaactttggtttctatacgaaccacggttaatcgaatttcttgttattattgacatggtatatagattggatatggatcagtaaaaaggtttctgaatggatatatttaaatggacttgttattatggataccaaaattttttaccaaattcctgagataatcgagatcgaattgtttaagaaacttctcccatttatttgcagaatcgttatcaccaatttttagtgagccgccgtcataatcgataagaggaatcaaacctagaagttatggagacgtggagagagaaaggcactacaaatgtgagagagagaaagagagagagagagagatctttttttctattttgcgtaaggatcgtggaagagagaaaaaatatttaatttgtgttaaaattcaaaataaaagtagttgtttaagttaggggtaaaaatgtcttaaaaaaagtcaaataatggaaaaagtgtcctcaccctcataagtgcataaaaaagaataagattatctaaaagtgcctaaacgtgtcacatttttatatatctccgtctttttttcttcttttttgtaaaatgacttaattacccttagtttttagtcggtgaagtttagagatcttgtggtaatttggtctttgcattcaaaacgctgaatcataaaaacaaaatattatgctgttaatttgactcaaattttctttgttataaagtataatctttattattattttgttcaaaagctgaagcattttttagacaaagaaagtcataacttagtagatattcaatatttaaaaaatgacattatttcctagattttgtagttaatacatttctatagagttatatattatgaatttatataaagtttttttttaacacaatgaatattatatatatatataagttttatgtatttaagtttccttttgaaggaaatgaacatacacattgtaaccgacttaaattaaattacgaaaaggtcacgtgatgtggcatgcatggatgtatatagtcaaaaagactgattaagagactgaattcatgcgaacacgtgcccaatacaaaacaaacggttagacgaacggatactcccaaagtgtttctgttcatcgaacgaaacgtatgttgctcttgttgttgttgtgtagtagtagcgaactacccggttcggtatttttttttcttctttcaaaaatattctcaacgatttcatgttttttgttttgttttattcatgttcttggtcaaacattattgatttggtttcgataaacctattcttgaggattttattatatacctttgatcaaaatacaaatgggtgactttttctttacttcatttgcttcttttttggggtgttagaaaaaaacacttaaaaaaaaaaaaataggagtgataaaacagagtttgaccatagtgtttgcgtcattgtgagtgaaaatgaatgtggtaaagtaaaaaagatttgactactagttgggagtcaattactccagaaaaagcaagtagatgaagaatcttacctccttatctcttgtatacgtgcttgtggtatttgccccaagggggggagctacaatacctctcgcattctccttttgtacaattataaaaagtgaactgtctttccaaaaaaggaaattattattatattctctcaatgtgaaaattacaatagtttatccgacttgatttcacatattttaggttttaattgttaagtttagaataataacaataatgataaatttttgaaaaagaataactaaaaataataattgatgaaattcatttagtttattcattaatttaaatcagctataagtctttttgttaaattgctaatttttatgtgttttacatgtttgtgcttttccaatatctttttgtttgaaaactttaaaagtcaataaattactcaattttctaaaaacgacaaattaaatttgtcggatgcgttaattccaacgtgtaagtactttttgatttatagataacggaattaccattatatagatcacaaagacataaaaacaaaagtacaatgtttaatccagaattttctcgttgacgaagcgtgtattcattgattatgggatctaaattgtcgtgtgtgtttataatttttttaataattaaaattattataaagtcaatttacattgttaatatgcaaatatatcaatcaaaatacacacataaatatgtggatttaaattcggatattatagtgttcaaattttttaaaaatatggaatatcgatggtcaagttatttatatatttgacccgtaaaatgtacagtaattaatttaaacgcagagagacaataaaaattaaataaaaaaaagttttgcaggtttatgtttaatttataaattgaccatcccagtaatcatttacatgatatctctctgattcttcgatttctctttctctctctctcgctctatccttctcctatctctaatctcttgtcttctctctctttctctatcgggaaaccaagcggctcttctttggatcaaaggcgaagtcaaggcggagaaagaaaagagagggtcgtgagatatg

SEQ ID NO: 17513 - DNA, 3000 bp, Unknown; identical to SEQ ID NO: 4992
  misc_feature (1)..( 3000): 2750-1469P.txt file - cDNA_ID_1809497; gDNA_ID_1621162; Annot_ID_57134

SEQ ID NO: 17514 - DNA, 3000 bp, Unknown; identical to SEQ ID NO: 4992
  misc_feature (1)..( 3000): 2750-1469P.txt file - cDNA_ID_1809497; gDNA_ID_1621162; Annot_ID_173715

SEQ ID NO: 17515 - DNA, 3000 bp, Unknown; identical to SEQ ID NO: 4992
  misc_feature (1)..( 3000): 2750-1469P.txt file - cDNA_ID_1809497; gDNA_ID_1620751; Annot_ID_166809

SEQ ID NO: 17516 - DNA, 3003 bp, Unknown
  misc_feature (1)..( 3003): 2750-1469P.txt file - cDNA_ID_1809497; gDNA_ID_2926183; Annot_ID_200427
caagagacccataaggaacccgaagcagtaaacaacagccaaatcagcttgagagcaaggaccttattccaagaagataatctttttaaacccaatccaccactctccttagaagaacacactatatcccaagagatttttgcttcacgagctgagtttggagctccggaccataagaacgcgttgcacatctgctctaacttatgaaggcattggttggggaggataaatatcgaagcccaaaagttgattgtggagtaaataacagatttcaagagctgcaatctaccagcaaaggagaggtgccttgcagtccaagacgtgaaccttgaatttatcctatccacaagaggctggtaatcgtgctttttcattttttgggacataagaggcactcctaaataacggacaggcagagaaccttgtgaaacaccaagactagctgccataatccgattcctttcaaagttaccaccatctaaaagtaaggccgtcttctgcagattaattccaaggcccgaacctttcttaaacacgtctagaatatccaggatggcaacaagagaagacagagacccatcacagaaaaccaaaatatcatctgcaaaactcaaatgagtgatcataggagccaaacacttgggatgcagaacaaaccggccctccactgctcccaaatccaaagatctggccagaatatccattactaacacaaacagatgggaggacataggatctccttggcggatgcctttctttcctacgaagaagccaatcaattcaccattataagcgatgctataagagggagtagaaatgcaaacccatatccaatttataaaaatgggaggaagattcaaggctttgaggatattgatgagaaactcccaattgacgttatcataagccttggttagatcaacctgaagacagcctctagaagtatcaccttcagcttggaagttgtccactagctcagacgccaagagaacattttcacagagaagccgccccttaataaatccaacctggttggattgaaccgcttgatcaatgaacaggttgagtctcttagagataaggcgagtaatcaccttgtagattgtggtacaacaagccaccggacgaaagagattgagctgatcagccccgggaaccttaggaataagagtaatggcagtggcattaaaccctttcaacaaatgacctgtcaggaaaaattccttaatagctgcaataaaactttcctttacaataggccaagcttccaagaagaattccactggaaacccgtctggaccaggcgccttgttcctaggcatagagaataaggccattagtgatctcttcatcactaggaatagctgttaactgagtagccaaggaggagtcacacctaaaaggatgaagagactgaattcgttcaacggagaagggggtcacatcatcattagggggcctaacagatgagtataataggagataagcatacccttaagagactggtttgatgtttttcatgatataaactttttcgtaatgtaattagtggttaatgatttttgattgttttataattttcatgatgtaatgataaatagtgatttctgatattttatgagatatttttttcattatgtaatctacatatacatttttggagccattttaccaaataaatcctagatttgaagttatttacaataatgccattagcattaaatctttttttcaaactaattaattttactttacattcttaatttaaattgtcaatcacattatcaatcaaatttaatccaaacaaacttcacatcaatcccttaaaattagcataaacatatttgttaacaatattttaaaacaaagttttttatttaaataaatattattcttactaaacgtttttgtttaaataaataaatcatgtatttgaacttatttacaatgtcatgcttaattatttaggaatgaaaatatttaattaaagatctaaatcttctaaatccttgcttttagatttattatgtcattacctaaaaggtaaaaaatattaactttttaaatataattatttctatatttaaacttaataaaacgttatcaatatttaaacttttaaaaagtttaatatatcacaattttttaacatcattatataatatatagagtttaaaaaaaaatcaaaattttttccgtgattcgaaattttaaaaatgaaaatatattaaccaattgacgaaaaatatgtggttcaatgtcccgcatcgactaaaatatttaaacaaatgattcataaacatatcataaataagatcaacattaataaaataaatgatatttttatatatactaactttaaaaataaattgtttccgcggtacaccgtaagttaaaatctagtacttatgtaatactaataatggtatcttttcatgatgagggaaaaaaaacattttttataaaccatatcacaatataatgaattccaaaagtcatttgggtaacttcctaacctctaattagtaatttaagtatttaactatatcaaacaagttaaaatattatgctatttatgctcctttttcttttcaactagttttctatatataaataaacaaacgagtttgtacaaaaaaaacaacgagttgacttttcaacgctgttagatttttagttttttatagatagatctataactgcatcaacggtcaagataattgatcgcaaatgatacgctctagaacttcgccacgtgtcaacaacgctactaactcatcactaccaccgacaattaagtgaaatcagacaatcttaactgtcgtgtccaaaaacacaaaaactctcctcgcttctcttctcttgttgtagtaagtaactttggtaattaacagtgttattatcaaattcgaatctcttacattaatggaaactcagatcttctcttaaaaacacataaagcacagatcttttacagagaatcttgtaagaagaaagaagatg

SEQ ID NO: 17517 - DNA, 3000 bp, Unknown; identical to SEQ ID NO: 7764
  misc_feature (1)..( 3000): 2750-1469P.txt file - cDNA_ID_1809501; gDNA_ID_1621162; Annot_ID_57133

SEQ ID NO: 17518 - DNA, 3000 bp, Unknown; identical to SEQ ID NO: 7775
  misc_feature (1)..( 3000): 2750-1469P.txt file - cDNA_ID_1809512; gDNA_ID_1621162; Annot_ID_57151

SEQ ID NO: 17519 - DNA, 3000 bp, Unknown; identical to SEQ ID NO: 7775
  misc_feature (1)..( 3000): 2750-1469P.txt file - cDNA_ID_1809512; gDNA_ID_1621162; Annot_ID_173737

SEQ ID NO: 17520 - DNA, 3003 bp, Unknown
  misc_feature (1)..( 3003): 2750-1469P.txt file - cDNA_ID_1809512; gDNA_ID_2926183; Annot_ID_140649
tttaatgcgttagttgagagtatctataaataattgaccctttttcattttaggataatgttttaatttaaataagttataccaatctaaaatcagcaaaaagaaaacaaaacatactataataaaattttcggaaacacaaataccatgaacatgcaagtgcaactaaacaaatgttttattatattaagttaacgtcacagtcaagtctttgggtcagaatccatcgttctcggacagtctgcgtttttaccgtttacgcattttccatagcattccatagtctttgggtcagaatccatcgttaccgtttacctatattaagtttactgtattctccaaccaacaccatattttattaaaaaaaaatttatttacatatattacaaaaccatattaaaaattaaatataaatatattacttttttgttaaaaaaaaataatatatatattacttttgtgatatataattttttataattctaaccaatagtattcaataaatttttgtgaagtttacaattctttaagaataactaataaatattgataaaagtactgtacttatctttttgaaacaacaaaattcctaaaaaaacaatactgtaacaaggagcagaaaagtattatattaaatcaaatactaacaaaataatagctagtatttgataactagtttgtttagtaatacaaacaaaaaaatgttaaatgaaatgcaaaactctttaccattttacgatttttgaaacaaactttttttttactataaaatacaatactgtaacaaaaacaaagggagtattatattgaatcaaaatacaaacaaaataatagctagtctttgataactagttagtaacacaaacaaaaaagtgtaaaaccaactgcaaaattctttacgattttaaatgcaacatcttaaggtggaccatgatggatgattcatgagtcttgactcttcttgaggctcaattatttgggcgtgttgaccaaaaaattgttccattgaaacaattttttctatatcctcatcaaatacatttttaaaatatgttgacaaaaaaaaaaagagaaaaatgcgtactataaatttatgagatctcagtctattaaacaaagaaaaatgttacatctccaactttacaaaaagctgattttatttcttctcatatttttctactggaaatgcaggtgtgttaatgataagtatgtgtagtaaaaattcaaacacaaaaatgatttatgataatgcattgtagattcacatattataaaggtgtaataattgaacaaattaggctcaatcctagtaacggaagcacttgctcttcgcaatgcccttaaaatggcagccgatcaatcggatatagcctctttcacggtattgttggactctcaagtcttgatctcacttatcaatgctaagaaatatctttcaaatctcaaagaaaatcatccatgatattgcttcgttttgtaattctttcgcttctatctctattgcttatgtcccaaagtcgtccaatactttagccgactccttagttaagtcagtccttgtggcttttacttcctcctcccctccaagaatgtaacactctctgtcttttagcaatgcaagttcggtttgaacaaaaacaaattatcacaaaatgccaaaaaatgaaagacaattaatttataattaggctcataagtcaaatagccaataacttgccccatacctaagatagttactttaggcgaaacgacggagaatttaaggacaattgactatagaaaagactctatattatactattcacagtgtcccaaatatatataaattgcctaacacattgccaccgtcgttgacaagttttcttagattcaaaatttagtacatagtatatattatataatttataaacctaagaaatgaaggaaggtggatcttaatatgtataattaatagaggcaagacatgaaggaagatggatctttaccaaaaacagctgggcagctttgaaaatgcaatgttcgatgataataatatctcaataacaaacaacgcgtttttatctcagaagactccaatatattgacttggaaccactaaaagtcgcattattattgttttgttatatatatatataatcccaaaaagtaaacaaacaaaaaataaaatacaaactattgcggaacaatacaatatatatatatatatatatgtaattcttattgattcaattttgaaagaaatttctttgtctatatattattttgatgtttttgtgtttaacctcatgaatagagagataattctccggcttggtaaacaaatacgttggattgtttttttacaaacaaaatctcaatatatttctaactttagccctacgaaccaaactacaggtcaataaacgacgtgaaatcaagctaaatggcaaattattagaattagtccgaataataaacaaattcgtctaaaattgtagaaaattttgggatctaagaatgagactacatcatttttttttatcaacaactacatcattttaaaccaaacttagaattgttaggtctcaaacttctaacaccgatttgctgcaaaaacaattatggatcggatcaagatatagagaggatttcacatttgacttctattgcttactcattccaaaagacggtttggtctagtttttgaaatttaaccaatcttgaaaatacggaatttgtaatgtactttacaaaaattgtatatgctaattataattttgtgatctcaaatattcatgtttatatgataagataagagataacatgaatgcattattatataataccatagaagatagaatgtatacagtctcaaaataacaaaatttaatacggacccacatcccaaacctctcccactctatatatttggtctctataaaacccactaaacctaaacttttccaaaatcataccaaaaaaacatttagtaacatcaaaatttacaaaaaacaaaaaaacatg

SEQ ID NO: 17521 - DNA, 3003 bp, Unknown; identical to SEQ ID NO: 17520
  misc_feature (1)..( 3003): 2750-1469P.txt file - cDNA_ID_1809512; gDNA_ID_2926183; Annot_ID_200406

SEQ ID NO: 17522 - DNA, 3000 bp, Unknown; identical to SEQ ID NO: 7858
  misc_feature (1)..( 3000): 2750-1469P.txt file - cDNA_ID_1809519; gDNA_ID_1621169; Annot_ID_57229

SEQ ID NO: 17523 - DNA, 3000 bp, Unknown; identical to SEQ ID NO: 7856
  misc_feature (1)..( 3000): 2750-1469P.txt file - cDNA_ID_1809538; gDNA_ID_1621169; Annot_ID_57222

SEQ ID NO: 17524 - DNA, 3003 bp, Unknown
  misc_feature (1)..( 3003): 2750-1469P.txt file - cDNA_ID_1809542; gDNA_ID_1621169; Annot_ID_57221
agtgtggtcgtagcacacttgagaaggctatttcattcgtcaatgccaatgataattggaacgctagagttgtatatggtgacactgataggtaaacattaaccaccatctttcatggcactattttaacttcctacaatataaagtatagccagggtttcatgcttgcataagttaatatatattcgtattacttccgagtgtttattatggtcatttcagcagccttgacaagtatgtatcacagtttctttatttacttcttcctcgtggcctcatgcattttaattacttctgtagtatgtttgtcctcctaaaaggacgaactgtaaaagaagcttttgtagtcggacaagagattgcatctgcaataactgaaatgaacccacacccagtcactttaaagatggagaaagtctatcacccttgtttccttcttacgaagaagcgttatgttgggtacagttatgaaagtcccaatcagagagagcctatatttgatgcaaaaggtattgaaactgttcgaagagacacttgtgaagctgttgcgaaaactatggagcaatcgttgagactcttttttgaacagaagaacatctctaaggtacaaatttgatttcttgcactctttcgaattatcagctgaaactgcagtgtcgtacatctgcttttctctattcattgtgcaggttaagtcgtacttgtatagacagtggaagcggatactatcagggagagtgtctcttcaagattttatctttgcaaaagaagttcggttgggtacttacagcacaagagactcttcactccttcctccagcagctattgtggcaaccaaatcaatgaaagcagaccctcggacagagccacgctatgctgaacgagtgccttatgttgtgattcatggggagccaggagctcgacttgttgatatggttgttgatccactggttcttttggacgtcgatacaccctaccgactgaatgacttatactacatcaacaaacaaattataccagctttgcaaagggtatttggactcgtgggtgcagacttaaaccagtggtttttggagatgccccgtctcaccagaagctcccttggtcaacgtcccttaaactctaaaaactcacacaaaacaaggattgattatttttatctatcgaaacattgcatcttgtgtggggaagttgttcaagaatctgctcaactatgcaaccggtgccttcaaaataaaagtgctgctgctgcaaccattgtttggaagacttcaaagttggagagagagatgcaacacctagccacggtaagtactccaaaatctaacgtttatgaactgttacagaacttggtaacgtttacaaccatcatcttactgtctttactttccaagagatcgtgtgcttcatagaaacttgtacactttctgatgtgagcatttgcatttaatcttgcacacactttgaattcaaagagacagtttcatctcatggtagtcgcaaaacaatttatgctaaaaagtggagacttattagtttcagattatctttcagaaatgtttgctattttataacaagaacgagtgtagacctctttccatgtgtgcttaagttgtgaccttggtgaatctctgtagatgcattcagttccaactttgttggtccattaattgatttttctttatattatcttatttgcagatatgcagacactgtggtgggggagactgggtggtgcaaagcggagtgaaatgcaattcccttgcgtgctcagtcttttacgagagacggaaagttcagaaagagcttcgtggcctctcctccattgctactgagagtgagctttaccctaaatgcatggctgagtggttctaaccttgacgaaaactcaaaaaaaaaaaaaaaaaaccagtaatctaactctatcccatacgtatttccactcaaactaatctaaaccatcctatcctgttaagtaacgatgtgaatttttgtatttgcaggattttgagcgaactagtaggtttatatggttgtgatcaaagagcatttttttcaaggacgtgtgaatatgtgtatagatagtagtagcacccacgagtacagtactgtcactcatcattctgttcaactcctttgtgttgtgttgtgtataagcaatcttggaaaaaataattataattttgtatagcataccaagttcacgagaaagatagatagatagataaagaaacaaaaacaacataacaaaaaaaattaacagaagaaacaaaaacgcctacgagtcttttgggtggtggtgagatggtgcaatgcttcaatctctctctttttaagactttcgagcacaaccaactgtttcacacaaaatgggtgataatcccttcaatgtaggcaaaacttatagaatgcttaagaaaactgaataaggaaaaaacctcacctcttcaatagcacgctcccgcaaaatcgtaaagtgcatagccctgtgtttggatataatcttcgtatccatatatgataaagcaactacatggaaactggcagagttatatcaaacatataaatggtcatggatatgagtgtacaaaaagtaaaacagatttggtcatacacaatttgaatttcttcccgtaataaacatattcttaggctctatatatatatattgtatcaatgttattgagatcaataacacataataaagagttttcccccaaacccttctctagttagtagtttctataattttggcaaatagtattcaagtgctcttgcattctcaagtgattaattcaattcctaggtttcggtttcggtttcggtttggttcggttcgtctcggttattttaggaaaagaaaacaaaattagagagcaaacacgattggtcaaagtcaactcttctctaccttcctcacttcccagcttcactgatcatcgccaatcacaaaaccaactacacacattcatcatcatttcgattatattttacccgaccatg

SEQ ID NO: 17525 - DNA, 3003 bp, Unknown
  misc_feature (1)..( 3003): 2750-1469P.txt file - cDNA_ID_1809546; gDNA_ID_1621169; Annot_ID_57220
tggaactctttcaccggatctcaacaagtgtaaacagcttcaacggttgatcctctccgctaacaacttttccggtgagattcctggtgatatctggccggaattgactaatttagctcagcttgatctctctgctaacgaattttccggcgaaatccctaaggatatcggagagcttaagtctctctctggtactttgaatctctcctttaaccatttatccggccaaatccctaattccttaggaaatctaccggtgacagtctctcttgatctccggaacaacgatttctccggcgagattcctcaatctggttcgttctctaaccaggggccaaccgcatttctcaataatccgaaactgtgtggtttccctctccagaaaacttgtaaagacactgatgagaactctccggggactcgaaagtcgcccgagaataatgcggattctagaagagggttaagtactggattaatagtgttgatctcggtggcagatgcagcaagtgtagcttttattggtttagtgttagtttacttgtactggaagaaaaaagactctgagggagggtgtagctgcacagggaatgcgaaactcggtggtggttcggtgaaggggaaatcgtgttgttgtatcacggggtttccgaaagaggatgattcggaagcggaaggtaatgagagaggagaagggaaaggagatggagagcttgtagcgattgataaagggttttcttttgagcttgatgagttgttgagagcttctgcatatgttttggggaagagtgggttagggatagtgtataaagtggtgttagggaatggagttccggtggcggtgcggcgacttggggaaggaggggaacagaggtataaagagtttgttacggaggttcaagctatggggaaagtgaaacatcctaatgtggtgaagttaagagcttattattgggctcctgatgagaagcttttgattagtgacttcgttaacaatggaagtttagctgatgctcttagaggtattacattacttcttccttcttctttttctgcttatcgaattagtctactaactaaagtttgagatccggttctgttctattgacttaagaaatttatgttgactttgactttgtcaacgctagattagacattactaccttagtgagagatgagattagatctgagagatagtttgtgggattgtcaaagcaagagtggaccaagatttctttctctttttaggcatattttggtattttaatttagaatttagtcaagttacatgtaaaagagacatgtcttgtaagagaattcgacatgtccgaataataaatatcttttttaagtattagtatatgatttaagtgtggtagagtcttagagtagaagtaattagtaaaaatagcagaatgaggaaacaatgatgagagaagtttacttgtgggctaagagtaatgattttatacacccactctgttgagcctctagctgtcccgtctttttctcatcgtaactcattacttactttaatattggatacttgtttgttttggtgtgtgaatagggaggaatggtcaaccatcaccgagcttaacatggtcaacgcgtataaagatcgcaaaaggagctgcgcgtgggttagcttatctacacgagtgtagtccaaggaagttggtacatggcgacgttaagccttccaacattcttcttgattcctccttcactccttacatctctgacttcggtctcacacgtctcatcaccatcactgccgcttctgcctcttctaacgaaccttcctcctcctctgctgcgggtggtttcttaggtggagctcttccttacacttccatcaaaccctcagatagatccaacggctataaagcccccgaggcccggctccctggagggaggcctactcagaaatgggacgtatactccttcggtgttgtgcttatggagcttctcaccgggaaatcgccggattcttctccgttaagctcttcctcgacgtctacggtggttgttgaggtgccggatttggtgaagtgggtgaggaaagggtttgaagaggagactccattgtcggacatggttgatccaatgttacttcaagaagttcacgccaagcaacaagtcttgtccgtttttcatctagctctcgcttgtaccgaaggtgaccctgaagtccgtccacgtatgaagaacgtctctgagaacatcgacaaaatctgattcaattattatattcttttttctttaatttttcctattatatttttgtatctccgatagttcttacacgaggtcgttacgtcactcccacgtctgggactagtggtcgatttgtttttattgaataattatttgttatgaaaattgaatcaaatgagttatactttaggctttaaatggctttgtcttttattttgctgtctttttctcatctgttaaaagacaactcctagttaacgggcacttgtcttgtccttcagttgaagatacacatacaagatctaatatcttccaagaaccatccatttgaaatttcgcttttcatagagtttatgcaaatgtggatttgggtttttagatttaaacgggtcacagaatatttaacttggggtaaattttcaaaaaagcataatggataattaaaatttagattggcccattatatttatcaggcccactaattaaatgtttgttgcttttctgctttttgacattttacaccggcaacctttgtcggagaacggttaagtagctgggataactcaggcggcgtcgcggttaggtagagtagaagaaactacaagcaagagagagcgattcactgaaggtaaccacgtcttaaacaaaatgaaccgaactataaccgtttggttagaagatttaaaacggaatgatccggtttgattttttggtttcagattctgcgggtactggcgccaaatcataattcgtggttccggtcaaagtcacggcgaaacagccatg

SEQ ID NO: 17526 - DNA, 3003 bp, Unknown
  misc_feature (1)..( 3003): 2750-1469P.txt file - cDNA_ID_1809550; gDNA_ID_1621169; Annot_ID_57219
ttctcatctttcttgcttgcgtagtcgactagtcgctgaaactctgttttctcaggtgtggaatctgtttaaagagaacaaaattcgtgaggtgatagatctgtctttgagagattctgcgcttgattaccctcaagtgttgagatgcgttcaagttgctctattgtgtgtacaagaaaacgcggaagatagaccaagtatgttagacgttgtgtccatgatatatggcgaaggaaataatgctctttctttgcctaaagagcctgctttctatgatggtccccggagaagctttccagaaatgaaggttgagccacaggagccggaaaatgtatcggcgagtattaccatcacggtgctggaggcaaggtgaattgaaaataagaaaactgatataatgtgaatctcattgttacttgaaatgtttttcttcgtttaatagagatataaacggattatatattcgggaattaggatacatactcttacaagagcaagtaatatcttaagtatcaatatacgtgcatgcatgactcttataaatttttccgttatccgaatccgggaaagtaaaagatctatacatattcatctcaacttaattgatacataaaagaagaccaaattcaagagataacatgtaaaatataacacatggaagtaatatttaaggtctaaataacttggacaagaacttctaaccacattcaccaataatattaatattaaaacatacaactttatatgataagtattgtattatatagaactcgcaaactgaagaaattccgtagaaatctagctactatatgtcgttccggtagaatattaatgatgtattcatataaagtcatgctcataacttcttcttttttgggcaaaatagtattattatgttatacagtacataagtttagcaaaatagggtctacctctcttcttcaaaagacgacataggagccaacataatgcaagatagaactaacgctaattaagataatcgaaaagaatatgacttgggtgcaaagcaaaaggattacggtttcttgagagaaactcatccaccggtggaatcaatgagtgcttcatcttcttccaatatgctgatatcatcattaatattcttggtgtaaaacttgtaacagataatccagacatcattatacctaggaatccatatactcatttctttttctttttatcaattgggtgtgacggctaaatgatgtaagaacaatgaaaaataaaaaaaagagcaaagtagaagggaaaaagcaaaattcgggagaatatttttccaccagtatttgtattggaaattttttgttggtaatacaaaactttaaagagctgctgaagttgagtaatctttacgatgttcattttcaatcttgagactatatctatatgtgttaagattgtatggtagaacgtgatataatatctgtatggtaacacgtgagagtagtttgttggtccattctacaaatcgaactaccacatgacagaaacatgtatgatgtagatgtactgtatattttaacagttgcggacaacattggtcggaaaaaaaaaactcataccaaattggtaagtagtgatattaattttggttcaatttcttgatcatgtgaataatagaattaaaatttagccaagccagccaaaaccaaaagaatccgtaagcatagcaaatataaagccactttcgaaactagcaacaatgacggtgaaataattttatcctagtttagtagactagacagtagaaacatgatgtgataaataaaatgatttaatctcatttctcatacttcacttaaataagatattatcttatagatttcatgctttagttagcttctaagcgtgttttaatgattatagggggacataacgacattaacaacacacctcaaatagtatagtttaaatgtacatttacagaaaattcattttaaactgattctaaaatgtaaatttacagaaaaattaatttaaactaaattgataacccttttatgaaaaatattctaagatgttagtcgcaaaattgaaataataagaaaaagatttataataagaaaaagatttataaaactcaattttaaacacaattattggaaaaaacttctatacagagactttgagagaccagcgagcacgtgtcaaaggcatggcatttacttcgacggctaagtgagggacagggaccctgaccgtaacagttcccaaggagttacaatgttccgtacctccttcatttgctaatccctaacacttacgtgagtagtgttagttatttaccctaatcaacatttggattaggctaatccatgtttgtgaggaccactatgatatttttctctctttttttgtttctttatcattatgatatcattataatgaaaaaaaaaaaatggcgaaaaaaaaatatcattatgataaataaatatataattggcaatcaattacacatgccaccatacttttacctttgttcacaaagtctcaaaattacagtactcacagtcagtcaaaattatagtactcatcaatataaacattactaatttagataattttatgttaatagtggatctaatttatgaacccccaaacagtaaaacttttttttctaaaacattacaataaaaatgatatttgtaataccgctatatattttacgattagtcacaatcaaaacggtatcaatcgacaaaattactgatgaccaatagaaattttggcaaacattattacaaaaatgtgttatgtcaaactaaattaaatgaaaacaaaaaatttgtaattgaattattaaatacgttgccataaattgatgttttgcccttaattaattgattacagtatgattaaaaaggtataactaacataaataaatacccttcaagaaccaaccaatctctcattctttcgtcacccaccttcttcactctctgttattttcacaaaccagaaaaattcaagtacagagaaatg

SEQ ID NO: 17527 - DNA, 3000 bp, Unknown
  misc_feature (1)..( 3000): 2750-1469P.txt file - cDNA_ID_1809550; gDNA_ID_1972148; Annot_ID_179373
tcatctttcttgcttgcgtagtcgactagtcgctgaaactctgttttctcaggtgtggaatctgtttaaagagaacaaaattcgtgaggtgatagatctgtctttgagagattctgcgcttgattaccctcaagtgttgagatgcgttcaagttgctctattgtgtgtacaagaaaacgcggaagatagaccaagtatgttagacgttgtgtccatgatatatggcgaaggaaataatgctctttctttgcctaaagagcctgctttctatgatggtccccggagaagctttccagaaatgaaggttgagccacaggagccggaaaatgtatcggcgagtattaccatcacggtgctggaggcaaggtgaattgaaaataagaaaactgatataatgtgaatctcattgttacttgaaatgtttttcttcgtttaatagagatataaacggattatatattcgggaattaggatacatactcttacaagagcaagtaatatcttaagtatcaatatacgtgcatgcatgactcttataaatttttccgttatccgaatccgggaaagtaaaagatctatacatattcatctcaacttaattgatacataaaagaagaccaaattcaagagataacatgtaaaatataacacatggaagtaatatttaaggtctaaataacttggacaagaacttctaaccacattcaccaataatattaatattaaaacatacaactttatatgataagtattgtattatatagaactcgcaaactgaagaaattccgtagaaatctagctactatatgtcgttccggtagaatattaatgatgtattcatataaagtcatgctcataacttcttcttttttgggcaaaatagtattattatgttatacagtacataagtttagcaaaatagggtctacctctcttcttcaaaagacgacataggagccaacataatgcaagatagaactaacgctaattaagataatcgaaaagaatatgacttgggtgcaaagcaaaaggattacggtttcttgagagaaactcatccaccggtggaatcaatgagtgcttcatcttcttccaatatgctgatatcatcattaatattcttggtgtaaaacttgtaacagataatccagacatcattatacctaggaatccatatactcatttctttttctttttatcaattgggtgtgacggctaaatgatgtaagaacaatgaaaaataaaaaaaagagcaaagtagaagggaaaaagcaaaattcgggagaatatttttccaccagtatttgtattggaaattttttgttggtaatacaaaactttaaagagctgctgaagttgagtaatctttacgatgttcattttcaatcttgagactatatctatatgtgttaagattgtatggtagaacgtgatataatatctgtatggtaacacgtgagagtagtttgttggtccattctacaaatcgaactaccacatgacagaaacatgtatgatgtagatgtactgtatattttaacagttgcggacaacattggtcggaaaaaaaaaactcataccaaattggtaagtagtgatattaattttggttcaatttcttgatcatgtgaataatagaattaaaatttagccaagccagccaaaaccaaaagaatccgtaagcatagcaaatataaagccactttcgaaactagcaacaatgacggtgaaataattttatcctagtttagtagactagacagtagaaacatgatgtgataaataaaatgatttaatctcatttctcatacttcacttaaataagatattatcttatagatttcatgctttagttagcttctaagcgtgttttaatgattatagggggacataacgacattaacaacacacctcaaatagtatagtttaaatgtacatttacagaaaattcattttaaactgattctaaaatgtaaatttacagaaaaattaatttaaactaaattgataacccttttatgaaaaatattctaagatgttagtcgcaaaattgaaataataagaaaaagatttataataagaaaaagatttataaaactcaattttaaacacaattattggaaaaaacttctatacagagactttgagagaccagcgagcacgtgtcaaaggcatggcatttacttcgacggctaagtgagggacagggaccctgaccgtaacagttcccaaggagttacaatgttccgtacctccttcatttgctaatccctaacacttacgtgagtagtgttagttatttaccctaatcaacatttggattaggctaatccatgtttgtgaggaccactatgatatttttctctctttttttgtttctttatcattatgatatcattataatgaaaaaaaaaaaatggcgaaaaaaaaatatcattatgataaataaatatataattggcaatcaattacacatgccaccatacttttacctttgttcacaaagtctcaaaattacagtactcacagtcagtcaaaattatagtactcatcaatataaacattactaatttagataattttatgttaatagtggatctaatttatgaacccccaaacagtaaaacttttttttctaaaacattacaataaaaatgatatttgtaataccgctatatattttacgattagtcacaatcaaaacggtatcaatcgacaaaattactgatgaccaatagaaattttggcaaacattattacaaaaatgtgttatgtcaaactaaattaaatgaaaacaaaaaatttgtaattgaattattaaatacgttgccataaattgatgttttgcccttaattaattgattacagtatgattaaaaaggtataactaacataaataaatacccttcaagaaccaaccaatctctcattctttcgtcacccaccttcttcactctctgttattttcacaaaccagaaaaattcaagtacagagaaatg

SEQ ID NO: 17528 - DNA, 3003 bp, Unknown; identical to SEQ ID NO: 17526
  misc_feature (1)..( 3003): 2750-1469P.txt file - cDNA_ID_1809550; gDNA_ID_1621169; Annot_ID_173914

SEQ ID NO: 17529 - DNA, 1533 bp, Unknown; identical to SEQ ID NO: 7852
  misc_feature (1)..( 1533): 2750-1469P.txt file - cDNA_ID_1809554; gDNA_ID_1621169; Annot_ID_57218

SEQ ID NO: 17530 - DNA, 3003 bp, Unknown
  misc_feature (1)..( 3003): 2750-1469P.txt file - cDNA_ID_1809569; gDNA_ID_1621170; Annot_ID_57248
ggaggtggtgacgcaaaccatggatgatgcagcatatgcgtcgttatgacgagattcaggtttgttgcttctagcctaagtcctattttgatctcttggaaccttagatttataattttagcgcaacttgctgctgcataaagaaagtctctttaggttgtaggtcaatcaataattagttttctaaacgcaatttcataagaggaactagggtttgctcttgtagtcagttttacgaaattgacctaatttgcggttttcttgtctgttatcactttgtttcatttaggacaaattgacctttagttttcttcttgttattgtaggttcgtattcttgattcgccaaatcagtgggtgcatccgcaaaactgtttgtttggattcgtgatagacaacatattttgctatagcttggtaacgactttctatactctgtttcttattctttcttacaaaaaataataattgatttagttgtaaaatgtttttttttatttgatgattggattttttcaaaagctcttttttaatatatttattattattttaaaggttttataaatactaaattaatataacgttgtgaaatctaaccggattttggatcccgccatttaaccgtggtcattagcgattccacaaatccaacatgtttttcacatcttcatatgtatttagcatttgtatttttttttctttaaaggttttcaactctttttttatttttttaaagattttataaatactaaattaatatgactttgtgagatctaaccggattttggatcccgccatttaaccgtggtcattagcgattccacaaatccaacatgtttttcacatcttcatatgtatttagcatttgtatattttttttctttaaaggttttcaactcttttttttatttttttaaaggttttataaatactaaattaatatgacgttgtgaaatctaaccggattttggatctcgccatttaaccgtggtcattagcgattccacaaatccaacatgtttttcacatcttcatgtgtatttagcatttatgtttttattttattttctttaaaggttttcaactccttttttattttatttttattttttaaaggatttataaatactaaattaatatgacgttgtaaaatctaaccggattttggatcctgccatttaaccgtggtcattagcgattccacaaatccaacatgttttcacatcttcatgtgtatttagcatttatgtttttattttttttctttaaaggttttcaactcctcttttatttttttatttttgtaaaggttttataaatattaaattaatatgacgttgtgaaatctaaccggattttggatcccgccatttaaccgtggtcattagcgattgcacaaatccaacatatttttcacatgtatttagcatttgtgtttttttttctttaaaggttttcaactccttatttatttttttaaaggttttataaatactaaattaatatgacgttgtgaaatctaaccggattttggatcccgccatttaactgtggtcattagcaattccacaaatccaacatctttttcacatcttcatgtatatttaacatttatttttttaatttttttttcttaaaagattttcaactcttttttcgttttttaaaagttttataaatattaaattaatatgacgttatgaattctaaccgaattttggatcctgccatttaaccgtggtcattaaggattttataaatccaacatgtttttcacaaatcttcatgtgtatttagtattttttttttaaaaagtttttaactgtttctttttttcttttcttattttgattttttaaaaagtttttctatttcagggtggataaaattagcagaaacaaacaaatggaatagaatcaaatcaaaaatcaaacaaaaaccgaaaaccgaaaaaagaagagtaaattataaacataattaattaccattccccaaaaaccattcccaaaaaaactagctaccatattttcatgaaagttaaatacagaccaatcccaataataaaaaatctctcgaaagtgaagttttgcgcaaagaagtcggctcagatattatttgaagttttgaactatggtagatacttatttataaatcaattacatataaaattaccaaaagctaataaatcgtaagccacataattcacgtaagattcctgtccgtctctgaaagtgtggtcgttactcgttaccgacgaaccgttgattctatggaaacaagaaagtccagaaaaaaacaaaattgcatacacgtgaatcaacaatttatgggtcgacctgaaatatatttagaaaaataatttactaattctttttttgatagagaatttataacaaactttagtgacaagtcataatcaaaatcagatgactcatcattttccaattttcctaggacagtggatttttcatatggaccccttaaaaaataaatatattaataaatatctaaaagcttttgtaaccgttgattaattacttaaaaactcattagaagcttgattattagtggaagacagacaacctttgtacttaaataccttttatgagttttgtctgcctctaatttactctttgctacacgcttctagatccctcttccttcgtcaaaatctcatttttcttttttcttgttgatattgagaaatgacttaatcctatttcgtctccttcctcaattcaacgatgcttagggtttgccccaaaattatataaactcgtcgatacatacaaagcttgtgactagaattcgtttcttcaagagtaaagcttcctcctttcttctcctctgttttcatctctctgaaacaatggaaagaattatgataaatccattgttatcaattcaaaactccccaaccaagttcttgaaaccaccactttcgtccattcacaggcaacaacaacaacaagagaggcagagcaataacaatacccttttcatg

SEQ ID NO: 17531 - DNA, 3003 bp, Unknown
  misc_feature (1)..( 3003): 2750-1469P.txt file - cDNA_ID_1809573; gDNA_ID_1621170; Annot_ID_57247
actgaagatcggctttgtgttttgctgtccaagtcttagtgtgagctcaatttatgtttctcttgcagacagatcttatacatcttcacctagatataagttatagcacataactaaagtgtgtattctcattcactggcctgtcgatctcagtagttcatagcacataactaaagtgtgtgttctcattcactggcctgtcgatctcagtagttcatatagtcaaacacatcactgatatatctgatgatcaaattactttctgttttccatgtatttttggttagtaaattcctgagaattgtgcctttcatcaattatatttcttgcgttatttttcaccaacgagagatccttaggatgcatatttttcatcttgttgtaggatgaggaagatttttctgattcatcaaagaagggaaacgctgaaaaccctaggaaacatcaaattggggagaacatacccaagaaggataaaataaagtttcttgtgaacactgtaagcagaatttttttgtacactaagctatttctttttgcctttctaatggtttgtcgattatgagaattttcatattcttgtttaaccttagttttttactcttatggttcttattttgctctcatctgtgaatgcagcttcttgatattgaagataataaagaggctgtttatggagctctggatgcttgggttgcttgggagcgcaatttccccattgcttccctcaaaatagtaatagctagtcttgaaaaggaacatcaatggcatcgaatggtccaggtatctatcacctgagtgttctatctcttttctgggactcatgaaccatgaataatcaaatatccaagaacatatgtctattgctatagtaactgaaaaagtagaatagaatcttggggaggtgtttatttcttttcccctgtttaatcgtttgtaggtgataaagtggatcctaagtaagggacaagggaacacgatggggacgtacggacagttgatacgggcgttagatatggatcgtagagcagaagaggctcatgttatctggcgaaagaaagttgggaacgatctgcattctgtgccttggcaattatgcttacaaatgatgcgcatatatttccggaacaacatgttacaggaacttgttaaggttctttttcccccttgtcttcactgaccgaaaactaaataagaaaacattgcacattgatacttaactgaactagtaagttactttatttcgtggtgacctcaaacttgtgtttattttgttatgtgggttatgaagctattcaaggatctggagagttatgaccgtaagcctccggacaagcacattgtgcagaccgtggctgatgcttatgagcttttgggaatgcttgatgagaaagaacgggtagtgacgaagtatagccatcttttacttggtacaccatccgatgataaaccaagtagatcttcgaggaagaagaagaaaccaggtaggtgactgcgatttagccattgatatcttcaaccatctttaaagccgtttgatattgaactcatgtgctatagattcttgcgcaaaacaggataagttttaaactgtctaacttgtgatttcagaactgaggattccagaagcaacgacagaaggcgcagttgatgcagcaaaagctgaaatccaagaagagcgaaaagaaaatctggataatcaccaagaatcagaagctgccactgaaaaacaattcgaacatggagcgtaagttgtagtatttaatcgataaagtatcactgcaagagaaacatggactgtaaggatgtatttaatcgatggattgttgacaatgctcacatcccttgggatttgtcgcaatggatggatatagagtttagggtttgagtgcggcactagtattactgagaaataagataacaaaatcacatctacatctgaagttttcgacacactcaacatccaacggtctgaaccaactaccaaccaaaccaataacatcgtctaaaacctacaaactgattgaataaaaagataagctagggaaggtatcatagtggttcggtacggtttgaattggttagatgagattggacccctaccgaaaatagagtcttcggttacatttggtttaataacaagttcatttgaaagttaagaaaataactagtattcgaatttagagattgcgggagattgtatgttcattcgaaatacagtacagagatgcttcgattccagatctgcgtccggtctctaatggccattcgattctcgaccaaagagggaatctttcgggatgggttgatttgtgggaagtgggaaccaaacggaatgggaagacggaagaggaaaggtttaggagatatcaatcagacctccaaggccaaagtcaccttccgatttaggtaaagctttgaaataaagagataaattactctttttcaccggacacgaatgagatatcgtaatttggtaaacttgatagaagatgatcagtgacgttatttctcaccaacactataattccattttaagaaactttttctcattttagttacagttttccagtttgaaatctctcacacctttacgactagactacaaaccatatctcttacccatcaactcttaaaaatcaggcattgctttatcactcagtaattagtatttgacgtttagagtgtactcgattagatagatagctttgcgtccaattctctactttctatttaccttgtttcgtatcgaaattgataacgtaattgactataagaaactcttttgccaatcacttgctgttgtgtttttatgttcctgaaaacagttcagtaactggttttcttataaatgtcacgaagagcttacattttcttataaattacataaatgaattctgccaattttctctttcagacttttcttaaatttgagctcttcgtgcagctaactgttgcctattgattgattaactactttttggttagtttgggaagaaaatg

SEQ ID NO: 17532 - DNA, 3003 bp, Unknown
  misc_feature (1)..( 3003): 2750-1469P.txt file - cDNA_ID_1809577; gDNA_ID_1621170; Annot_ID_57246
tgatttttcgtccttaggttctgaagcttctgattcttcaccctttgcaaactcgatgttccctagatgaaggattgcagccactactcggaagattccatcctacagtagtagaattgtaagaagagttgttccaatgactcaacatgtaaaataactagaaagtacctgctcttcagaattgatcccaacaacgtccatagctttccttgtagctaggtattccttggaatcatcaagcccatccaacgcataacaattagactgatttagatagcgaaatgtgcttggttttcccaacttgtacctctcagtttcctgaaacctcatgaaaaaactatttagtcaacgtgaatctcatgtaaagcatgtacataagatttcgagctaacaccgccttagaagagaccagggcttacctgttctggtgcagcgcaaagcatgtaaaagcaatgatagtttctttcagggtctgagacttgacaaacccgcgacctctctagcaaatatgtcctaatagcagctcccgagattcttcccctctgatcaaactgaatctccacaaatttaccaaaacgactgcaaaatggaatttgcgtaagtatcttaaattgggttcaagaaaatacacaaaatggtcaaatcatcaaacgtgagactcctctcctccaccttgaattattgtttctaacggtttttgcattgccaaaagcttctaaaactggatttgactgcaaaacaggaaagtcaatcagcgaaaagtatgacaagatattactggaggaaactaaccaagtctatcttttgcaagaatgaagccatgtattttaaaaaattcattacctccaaaacttgctgctccacagatcttccttcactctcagctcttcctcccatgtaggcaagatactgcatgagcatcttcgtgctctctgtcttgccagcaccgctttccccactcaccaagatcgcctggctcactccctcgttaatcattttcctgaaaggttatgtttttggtgatcataatgccgaaaaacagttgtaagtgaaacaataatataagctaatttaaacggcaaaagagttacctgtacgcagaatctgcaacggcgaaaggatgtggactcaactcaccaaatgctgtgcccttgtactgtttcattgtctcacttccataaaggtggggcaatctcttaaagggattcacagctatcaatatatttcctgtgtacgtctggatccatcatgaaaaaaattagattgcataaactgtggagacatcttaagatcacgtgatggttaatgtaaacaacaaaattacttgaaagcaagaaatacttgacaactagtaatcgaattgaagcttacatatatttcatttgcattataacggcacttaagattgagcaggacccctggttcatgcaaatatgcaagctttgtcatgtcgtctactccaagttcagggaactcggggtccttggggtagacattatttaactttgccacaacctaagaaacaaatgcatcagaaacgagagctttttttctcaatgctcatgtcataaacaaatctcagataatgcatgaccattaaggaactagttccatggtcacagaactcagaagatcaaaagctaaacgttttccacaataacaaatgtctccatatcaagaaatcatatactccttcggcagattatctaacaagttttatactttcttaccgtctttccagagcagttaactgtgatttcttcactgttaacttcttctacttccccatctatccaggcatcatctggatcctccacccagacatgagaccctaccgttactttggctgaagcagcctgcacataaaccacatcataactacacaatcaaacaggtaactgaaaatcgaagacaacaacaaagagagatgaattttctcaaaaaaatcttttttttctttctttctcatccaaaacaaaatcaatagagagagtaaagttgttcacagctttgttcaatcatatacaaaccaatcaaaaaaggaatttttttgttttttaattcaacgacatatggttccatttttacacatttagaaactcaataacaatttgatacaccatacgaaaattcatgtatcacagtatgataaatttacataaattaaccaaaaaacgtttgttcacagaaaaattaaaattgaaatcacacaacagagagaaatcaaaacgaatcagattttgttagaagaaaccacaatgcgattaaagaagagaaagctcgtaccattgttatgatggaatttggtcagatttttctaaaacgatcccggctcgacaatacccaacaacgggagaaacatcaacacaaacttttgaaaatccaatcacaacggatccatgataaaatcaagaaccaaaatttcactttcccagcttcaaaactttctgatcgacgtcaacaacatagaaacataaacgaggctacatgcgcaaaatttcgtgacgattgcagaggatcttaaacccttgagtttttttccctttgaaaaaaaatcccagaacacataggtctgtttcatccagattttctcgcagaaacctgaattttttttttcttggattttcttgtcccctggtttatttccccccaaaacggacgttggaacttggaaagcgaacgaagaagaatcatgaaactttgtaattccgatgttaccccttttcattaaaccgatccggtttatctatctcgctttcaacggatctaatagaaaagagagaagcgtctttctcgttaatgggccaattcttttcttaatgggctacacgttttatcatctctatttcaacggatctactactacatagagaagaagcttctttttgttattaatgggccaattttttttattaatgggctaattgtaacagtatcatttctgaaaacccctcccttaatacgcctccgtcttcgttggttctcgtagcaccgtctccaatg

SEQ ID NO: 17533 - DNA, 3000 bp, Unknown; identical to SEQ ID NO: 7876
  misc_feature (1)..( 3000): 2750-1469P.txt file - cDNA_ID_1809581; gDNA_ID_1621170; Annot_ID_57245

SEQ ID NO: 17534 - DNA, 3003 bp, Unknown
  misc_feature (1)..( 3003): 2750-1469P.txt file - cDNA_ID_1809589; gDNA_ID_1621170; Annot_ID_57243
ttagtatttataaaaaacctttaaaaaattatttatttaaatgttttagtgaaagttttagttttggttaaaataatttttaaagaaaagaagaaaaaaagttagaatgaagaaagtcctagtgtaacgaaggcctcatacagcaaagcccattccaaagtcctagtgtagctctgtcgtaacattatccaccaattttaggtcaattttgtaaaactaaactacaagatcattccatgggaagcttctctccgatatgcaagacaagacgccaaagaatggcaagatgcagaagagtacacccaccgtttatcatcaaaacctgacagagtaacgtcacaagaaccaacagctaatctctggacaacaccccctattggttggacgaaatgcaactatgacggcacttaccacagcaacgctccgagtaaagcgggttggctcttacgggatgatcgaggaacctttctaggtgcagctcatgctataggctctattactaccaatccgatggaaagtgaactccaagctttagtcatggccatgcaacattgttggagtaggggctataggaaaatttactttgaaggtgacaataaagaagtctcagagattgtcaatggtcggtcttcaaattttgcagtttttaattggataagagatataagcgcttggagatcaaaatttgaagaatgcaagtttacttggacaaggcgattttcaaacatggctgcagatgctctggcaaaacaacaacttcctttgaacactcagttttattgctataactatatcccgtttgtaataactgattttttacatcgcgactttgctacagcaaattattaataaagctgatgtttgaggaaaaaaaaaaaaactacaagatcaaaccctagttcctccgatgaaattgcggttagaaaactaaatattgattgacctaattcaaagagaccttttttgtgcagaaactaaatattaaaaatccaaggttccaagagatcaaataggaatttaagcgagaagcaacatacctgagtctcgtgacaacggcgcgtggtttgcgtcaatacttgggactctcggtgagatccgccatgatttgctagagagatcgtgaaacgcaagaaaacagagagacaaacggtggcgagatcattgatggtgtgatcaccgagttacagttccgacggttctgacggtggtgaaaatggatggtgatcatcgagctttgacgttctcgtgatcggtgagttctttttgtaagagaggaacagaaacaaacagaggctaaaaagacaaaagaagaagaagaaggtggattttttgttttcttctcgtaatccatgctttggaccttgtatcagccacttatgatcatttgctatattgatgctttccaattttagagtattgaaatgggtttctttgacaatcattttgagttagtcatcattccttgttctgaatcaagaattggcttttgttatgttgtctaggttctgcttgtaactagagtaatgctattgtagtctctgttgtttatttgtagaatcatagagagtcgtggaagcatgttttagttgttactctcgatttcttgtcgatgttgtggtgttataaattgagcgttttaaccaatacaagttaggagatggttagtatgtgactatgtgttagtggccatgtatgtagttcgatcagataatctgaatgatgtgctaaagagcttgcataggaagactgcctttgtgttagcttgcatagagacttgttgcaatatatgagactgaaaactattatgtgaaaactttaatttgtgtacaaatatttttaactcttaaaattaaactaacattgtaccaattagcacatgaaagaaacacagaattctgtgaacatatgatgaataactatataaacacattatggattcagttaaggagacagaaacaagaagatgaatttcagatatatagcaatagagtcacttataatcatatcagagcttatactttatacaaattatcactttagtccttaaattaaaaccgatttaatcgacaatcttgttattctttaaaacaatttgttcttattttcaatctttaaattttgcaacaatcgacagaacttatcgttattccgtgtttttattttcatatctttcttaaaatgtttcaaaataatatatgtttaatattttctgatttacaatagttattaagttatatgaaatataattattttaaattttattttatttttcagaaaactcttataagagagcttaccattagaatatgaaaaaaaattaaaactctcttataactttttaaaaattttaataataaaaaaatggagaaagcccgtgaaagagctcttacgaaccaaaaccattcagtccggttaagaattggttatcaagtttggttcctaaaagatatccaagttcaaaagcaaaaaaatatcttcttttctctctctctactctcttctcttcttctcttcttctcttcttctctggctgggcaaccatgattactgtcgtcacctccaggctctctctccttcctccagtcttctccgtcgttaactcttcttcttcgcgttccaaaggtgctcaatttatttctgccacgtcttctctttatagcactctgttttacacacgtcgttgattcttcagttttttaaaagacccgtcttatacaaaatttcagtgtaaccgatccctgaaattcgttaaagggatgaaattttatctaagattcggagttttcttttcgaacatagtggtaatgtttgtcgaatgcttgatttggtcttccacagctgtcactatcgagtttgaagatagaaatcttgtgttaacttagtatgtattactgcataatgtcaattctgtttgaaagcatcagaatttcggaacagatttttgtttcgtatagcatcgatctttgtcttgtgtgtttttatcttctctctgaagcctgcatg

SEQ ID NO: 17535 - DNA, 3000 bp, Unknown; identical to SEQ ID NO: 7867
  misc_feature (1)..( 3000): 2750-1469P.txt file - cDNA_ID_1809597; gDNA_ID_1621170; Annot_ID_57241

SEQ ID NO: 17536 - DNA, 3000 bp, Unknown; identical to SEQ ID NO: 7867
  misc_feature (1)..( 3000): 2750-1469P.txt file - cDNA_ID_1809597; gDNA_ID_1621170; Annot_ID_173941

SEQ ID NO: 17537 - DNA, 3000 bp, Unknown
  misc_feature (1)..( 3000): 2750-1469P.txt file - cDNA_ID_1809609; gDNA_ID_1621170; Annot_ID_57234
gccacttaggaaggtgggaagtagagaaactacttttatgcacacgcaggggtcagatgatttcttcaaaagcaagctgcttggtccacagttgatagttgaggatgtgacgaacgaagtaatttcagataatctcttatcagctactattgtccctcaagtaaatagggagtccgatgatgatcacaaatcctacacaagggagaaagagattacaaatgcggatcatgaatcagaaatggaggtacgaaatttatgttttcctttagattagaaattctggctgtcttggtgtgtgtcaggttggggtttatctctctggtatttttttcatattgcaggaaaagtacaagaaaagcagaaacaccgatgattcattcagcgaagctgcaatggttgaaatcgaagctggaatatatggcttacagataattaaaaacactgatcttgaagacttacacgagcttggatctggtacatttggaactgtttactatgggaagtggagaggaactgatgttgctatcaagaggataaagaatagttgtttctctggtggatcatccgagcaagcacggcaggtttaactcttctctcgagtctttgtacttttgaagggaatttcagaaccgcagttttcactgatgccttactgaaacagactaaagatttctggagagaagctcggatattggcgaatcttcaccatcctaacgtagtggccttttatggagttgtaccagatggacctggtggaacaatggcaacagtgactgagtatatggtgaacggatctttgaggcatgtcttgcagagaaaagacaggtacacaataatctgtcaaatctttgtatgaccttttgtgatatgacattctgagtttactgatggaaaaactttgggcacagattacttgataggcgcaaaaaactgatgataactcttgattctgcatttggcatggagtatctacatatgaaaaatattgttcattttgatcttaaatgcgataacttgcttgtaaacttgagggatccacaacgacccatttgcaaggtaacacttttccccaaaatcaggtaatttcaagccaagttgtatgagtaaagtgctgtatttattagtctcactgttgaatttgcaggttggagatttcggattgtcgagaataaaacgaaacacgcttgtctctggtggagtaagaggaacccttccatggatggcaccagagctgctaaacggaagcagcaatcgggtctcagagaaagtatgttgttgagtccaaaatcaaaacattgaaaatgttaagagtctttgttttaatcttaacatgtttttgcaggtcgatgttttctcatttggtatcgtgatgtgggagatcttgacaggcgaagaaccctatgcgaatctgcattgcggtgccatcattggtaagtttctagcatgagcagttcttcagtctttgaacaagatgaacttggattgagctttggtttatgatctaatttttgatctgtttggttttgataaaaaggtggaattgtgaacaatacgttaagacctccggtgcctgaacggtgtgaagctgagtggaggaagttgatggagcaatgctggtcattcgatccaggagtacggccatcgtttacggagattgttgaacgacttcgatcaatgactgttgccttgcaacccaagcgaagaacctaaaagccctctcaaataaacgtaagttgtgagatacatgagcctttttttgggttggttttaaatttattggttgaatgaaagcagaagatgggaagaatatagatttatgagattgtgtggagtctgtaaattagtattgagaagcatttaccggtttaggtaaaagttgtataccaagaaagttgagggtcaattgtgtaaaaaaacacaacttttttttatgtaaagcaatatgttggagtaataagcccaacccattaaaactcagcccataaattgcaacgttctccattgttgttctcaaacgcgcctcacttaactcatcttctcaaattatttcaaatccagcaatttatgaaacgcgctcttcaacgttaatcatgttgttctcaaacgcgctaacgagaccgtttaagtaaattgtaatctatcttgtagaataatcagccctgacctatatagtaccacctcatgtcgtggtagcataaatatacaagcccaaagcaaattttatagatcgaaagtttcactaacttggcccatgtttacttatttatcgctaagcagatggatctcaatcttctttaggacttgatacgacatcagctcccattctattcgccaactcaggattctcgatttagtttgaccatttgagctgctctttgtttgtttcaatgttaaattattggaattgaaaaacatggacatatgaaattccaacaaaactgttacagcttaatcataaagcatatgtaactaaatgattactacaattgattatgagatactaatcacagattatgccaatgagaaacagaccaaagcaccaaacttaataagtaacaactcataatccatggaaatcaaaaacgaaaaattctccataaacattgagaagaaaaaccaaaaagaaacaacaacagcagggaaaagaagaaagcaaagacttacgtagagaacagatgaacgaaagtttcgaatttgaaagtaggctcgaagagagactaagacggcgtttttagggttaattcataagagaaacgtgccgtcgaagaaatgactgtcgagtttttctgagagagaaagaaagacatcttactctatacgacgtcgtttagcatcaaaaccagatgattgattccgctaaaccctgaaaccgtatatgtatgtaacccatcctaaaccgggatgaagcggtttagttttttttttcctttgtcttttatctgctttacaacgaacggtttagcccagtttgggcttcaaaataatcaaacgaaaacaatg

SEQ ID NO: 17538 - DNA, 3000 bp, Unknown; identical to SEQ ID NO: 7888
  misc_feature (1)..( 3000): 2750-1469P.txt file - cDNA_ID_1809625; gDNA_ID_1621171; Annot_ID_57257

SEQ ID NO: 17539 - DNA, 3000 bp, Unknown; identical to SEQ ID NO: 7888
  misc_feature (1)..( 3000): 2750-1469P.txt file - cDNA_ID_1809625; gDNA_ID_2926133; Annot_ID_138808

SEQ ID NO: 17540 - DNA, 3003 bp, Unknown
  misc_feature (1)..( 3003): 2750-1469P.txt file - cDNA_ID_1809633; gDNA_ID_1621171; Annot_ID_57255
ctcgcttttagttcctttcttcacaaattccaactccagcgtcagcatagccagatcaaaattttcaggaggaacaaatctgcaagaacaagacaatattcagaaaccaaaaacgtattcatgccagaaaattaatataaaaacaagctgtataatcacctgctaacagataccatatcaccagtcgaaactctagcgtgtcgcctttgaatagcattgagagcaatatttccatcacggatgcttccatgtccagtaatcaccagttaagttcacaaaaatcgaaataaatgacacaatgaacaagttcaacattgtcaccgaccaaaggagcctagatttctataatccatgaaaaccagaaaaacctaacttgtactacgatcatagatcaatcaatcattataagaaccattcataaggccgagattcaaattcgaagatcgattttggtaaatttagcagtaattagccatatcacataaacaatcaactcctaggatcgcatttcgcattgcaatgtaagaaatgaatcgtaaaatggaaataagaaaggatatcagagagaaagaatgaagctatcggcaacgttggcgaggaagagatcggaaccgggaacggagaattgacggagatcggaagaagagcagtaagcgaggttagtaaaagctagatctgcggacggagtattggtcacagtcatcgtcatgacttgcgatccgtaacgacccgccatggctggggtttcgatctcaggtttcttcgagtctttttgatttttgtaaccttaacgaataagaaaatatttgagggagaagcaataaacagaagactacgattgcttccttgattttaataagatcttttatttttcgagtcctgatcaatgttttggaaaccagaccaaacattccggttcgaccaatagccgtctgaattaaaccaaaaagcggtaaattaaatctggtcataccctctcggctcggtattagaatccggtttgcaacacaaatcataattcattttttttgttgttcttttcttatttttttttttttttttcagtctaaattttagaatacttgctcactgattattttgagcaagtcatgcatgagacacatcctcacaattcaatttgagttcggattaaccacatttatttatttttcaacaaatagttcaaaacttcaatcgatgatcaattatgtgaaactagaaggtcaacacataaaagctcaaaagatcttggactgtcacagagcaatgatagatgatggatgctaatgaatggaataaacacaatgagaaggaagatgaggcaaaacaaccttcacatagggagatttttaaattgaacaactagctcaagtaaacttataagtaatgttgtaaacatggaatgaataagtttgaaatttggtgcattcttagatatgagaaggtggttaaaagggtatggtgcaaagacatatccatccctagtatttaatagattgaaagaaggaatttttttttggttctagtttaatgagtgaaaatgaaaaaataaataaaaaggcaaatgaagatgaagatgaactcaaacttttgactctctaatgtaatcttataagcaaataaccaacttttctactgaaagttataagaaaatgaggcaaaagttttatttatattagggaatttaatgaaaaaaaccctcaactttggccagatccatttttaaaccctaaactatgtttttagtaaaacaaaccctgaactaaaacctgttaataaacttaaccccacagtaattaaacaacgtttagggttaagtttattaacaggttttagttcagggtttgttttactaaaaacatagtttagggtttaaaaatggatctggccaaagttgaggttttttttcattaaattccctttatattaattgaagccgcaagcatgagcttgacccgtttgtgctcatggatggctctgcttgtatctagttagaagccgaaacaactagttttcagtacgctatgcatgtaactcaaagaatttggtgtaagcaataagtgattctcattcttggtcgtgctacattgagggagatacaacaaccatgggaaacacttatgcctaagcctaacttttgatttgggaggaggcaaatgaactaatgcctaagcctaatattttgcacaactctactcgcgtggcacctcttatcatcttcaaattggtggatcgtgagcttcgcaacctaatcacttctcgacgacatcgcaagcgttggcagcggctaatgcttttatggattcgttaaacacacctaaatcttttctaattctattgtagccttgtttttattttttttgccttggttacttttctataggttgtacgttcttgtattttctgaactctcattgtaatgatattaacaaatttagcaaaaaaaaaaaaaaactaatgtcaaacaaggatcctcaaatgccaaatgtcaaattaagttagtacctttccatgtttacaaatttgaatttgaagatggtaaattagaagaaaaaatgaaattatgatcattttccttaatcaaaagattcaaaactatcatttaaaatttacttcttcattttttgctcttaaaagaaaaagtaaaaaattacaaaaagaggggaaaaaaatttagagagaaagtgaccagacacgacggcgtttttgcatcactttcaccgagattttttttctgcatcccggcgacgagactgtgactccaccaaaccctaaaatcaaaattgcattttttgttcgattttgattttgtggggattttggaattttccccgcactaagtcgtctcgttaaccccacttaacagtttctcactttgacactttctctctctctcaacgcacagtgctttctgtcgccttcaatcgcgactttttgtcacacttgccctcttttctccgatttttctataaatttagggttttgtttgctttcgttgacatg

SEQ ID NO: 17541 - DNA, 3000 bp, Unknown; identical to SEQ ID NO: 7883
  misc_feature (1)..( 3000): 2750-1469P.txt file - cDNA_ID_1809637; gDNA_ID_1621171; Annot_ID_57254

SEQ ID NO: 17542 - DNA, 3000 bp, Unknown; identical to SEQ ID NO: 7912
  misc_feature (1)..( 3000): 2750-1469P.txt file - cDNA_ID_1809649; gDNA_ID_1621173; Annot_ID_57282

SEQ ID NO: 17543 - DNA, 3000 bp, Unknown; identical to SEQ ID NO: 7912
  misc_feature (1)..( 3000): 2750-1469P.txt file - cDNA_ID_1809649; gDNA_ID_1621173; Annot_ID_174066

SEQ ID NO: 17544 - DNA, 3003 bp, Unknown
  misc_feature (1)..( 3003): 2750-1469P.txt file - cDNA_ID_1809649; gDNA_ID_1620779; Annot_ID_167867
cgtgtatgtttaagggtttagtttaaaatcttgtttattctcaacaattttaactcaccaacaaagatgtacgtacattattatacatgtacgtacataacatttttcaaaagtacgaggaacaactatactctgaccatataattttatttaattattatatatgaatagatttatgatgaaaaccccaaaagatattttatctaatcaaaataatcaaaagtttctaatgtacaaactcaataaatattttgtatgtcgcctttacaataaaacaacatctaacatgtttatttctattttaaataatattttatttattatcatttgaagacaattcacgattagcaatatcatataaacatatgtgcgtaacggtaataatatatacgtacacggtagtaatgtgtacgtacacggtagtaatgtgtacgtacacggtagtaatgtatgtagtaatgtgtgtgtacgtataccgtaaattacatatacgtacaaattttttttttaatgaagggtataattgtaattttgcactcgtcttcaacctctgcaaccctaattttgcagccgcttgttaactcattaacatccgaaactcctcgccgccgactactcttctttatctccgccatttgagtatgaacaataattcaagaaaccagaaaatcctctttttgttatcctttatcacgagctcgatcgaaatttcctcaacttaagcaacgaatagaactcgcacagagcctcaatcgaactttcactttcgatcggagtttgtgtttcgtcggaattgttattcgtcttcgacaaacagtttttgattttctttggttgttagaaagttaataacgtatttttgatttaattttaaatttaaattttggtaatcagaaaaataaagaaacgaaactgaaccgcctcctttcatttctcgttccagggcaaatttgtccatttttggctgaatggctaaaatctggttgggcgagcccactttgtctctttgtgaaagaaaaagtcagaaaggtgtcaacggtgaaaatttcttttttttaaacgggaaaaatgtcgttttatacgtgaactttcaaaaagtggacattcaatacgtgaactttgcggtcggccaaataaaacatgataaaaacgttgacccgccatttaacacaaatcaaaatgttgaccaggccaaaatcccgagacgttaactggcattaacagatctgataaccgccgtaagcagacgttaattgtttctgttaaagtcgaaaacgacgtcgtttcacgaaacaataaaatccccaattcaattttgaaatccctaattctatcatcttcttcactcttcttccatagctaattgaaatcccaaattcttctatcttccatatcttcttctatcattttctttaagtttgatttcgaaatctctaattttatcatcttcttccattgtttgatttcgaaatcctaattcttccatcttcatccatctttctagctccgtcgattaccaagtatctcctccatgtgaatatacttataccaaaagtggtccacgtgaggaagaatcttcacagctcaatcccaaacgttcctcgcatggttgacgtctttgttccatagcttcattaagcaaccatggatgataaaagatgatatgaaagctatggaagtttgattaagttagaagatggacgaattagggattgaagatggaagaagatgatagaattagggattttaaaattgaattggggattttgctgtttcattttatatgaaacgacgtcgttttcgattttaacagaaacaattaacgtaattaacgtctgcttacggcgggtatcagatctgttaatgccagttaacgtttcgggaattttggcctagtcaacattttgatttgtgttaaatagcgggtcaacgtttttatcatattttatttgactaatgtcaaagttcacatattgaatatccactttttaaaagttcatgtataaaacgacatttttataaacttgacgaagaatctatctacctccaagatttgttattaacggaacttgataagacgttggcgtgtaaattttttcataatattgtggtaccgatgaaattcaaaaagctgtcactgaacggtgattaatatcgtaataaataactaataaattgtcgaacgattctttttttctttagtaatgttgataggcttatagctaatcgcctaatcccctacgtgtgaacactagaaatagcctgaagagacaagtttactagtactatgccattgaaatgcgtgacatttacagtgatacaaaattactattgctttcctttgttagtttagcaactaaaatttaattaaatggcttctgacaggagtatatttaaaggcttaaatttgatttgtgacaatttaaagtcctttatgatttgtgaaaaattttggattcttttttaaccaagtgattaaaacttatctatatcaacaatggtcttttataactctcttgcttttgtgtttaggtacatttaacgaaagataaagaaacaaaaagtgacgaagaagggtttaattgcaacacttgatactttatggtttaaaatacatcccaaatttagtgagtgatttgtagtttgacaaatttcgaagaagggtttcattgtaacatttgatagtttagggtttaaatcaaatctcaaatttagtaaggtaggtttacataaacaaaaccaagaagttgtgttttgttttgcaattttctcaaagacaagagtacgagactcgtcgacgtctttcttcctcaacttcgacaaaagaaaataggattatttcagaccataagtcattgtctccgcctacaaaatcggcgattattaatcacattgtcttcttctatgtttgatccactttaatctcttcataaacatcatttttcctctaaaagctttttcctttactcatcttttctcttctgatcaaaattgtgaataatg

SEQ ID NO: 17545 - DNA, 3000 bp, Unknown; identical to SEQ ID NO: 7911
  misc_feature (1)..( 3000): 2750-1469P.txt file - cDNA_ID_1809653; gDNA_ID_1621173; Annot_ID_57280

SEQ ID NO: 17546 - DNA, 3000 bp, Unknown; identical to SEQ ID NO: 7911
  misc_feature (1)..( 3000): 2750-1469P.txt file - cDNA_ID_1809653; gDNA_ID_1621173; Annot_ID_174063

SEQ ID NO: 17547 - DNA, 3003 bp, Unknown
  misc_feature (1)..( 3003): 2750-1469P.txt file - cDNA_ID_1809653; gDNA_ID_1620779; Annot_ID_167870
gtatgagaccccacacggctatgaaccatgttaccatatattctaagtgggtttttaatttgataaccacctacctataactctaaattagtctattggatttttctaatgatcatcatataaatttattctctttatataatagtaatcgttgtaaataatatatgtgtgtctcccatcaatccgcatcacattcgtagaatcatacacgtatgtaaacgcatttttgacatacggaaaccatacaagtaggatctgttaggtggttattaattcaaaataaaatctcttttcattagaaaatataaagagactacttttataaaaagattgggattgtagttccttgccaaccacccatataataatactccccaacaccaaaaacacaacacaaacttagaaaaatggaagaagaaaagagattggagctaaggctagctcctccttgtcaccaattcacttccaacaacaacatcaatggatctaaacaaaaaagctcgaccaaagaaacatcattcctttccaataacaggttctcttaatctcttctcatgaatgatttgaatcattcttgttcattgtagatgtcttatatgataataaaataaaaataaaaaacaaaatcctggtaattctacagttttcggagattagtttgggtttcggtatctagttatcaaaaagtatttgtgtatatgttataactagatatggctaaaacagggttgaggtagctccagtggtgggatggccgccggtgagatcatcccggagaaacctaacggcacaactaaaggaggagatgaagaagaaggagagtgatgaagagaaggaattgtacgttaagatcaacatggaaggagttccaataggaagaaaagtcaacctttcagcttataacaactaccaacagctttcacatgccgttgaccaactcttctctaagaaagattcgtgggatctaaacagacaatacactttggtctacgaagacactgaaggagataaagttctggtcggggatgttccttgggagtaagttttaaatcaaacaaaactaattccatttttttttctggaactgaatatgaacttactttatcaaaaattcattttatatctatctacttttgtttttgtcgaatttaacaaatatttttagtatgagttcctaaaaagagtttggccatttctcatcagattattattttcctttaaaggtcatatttttggatatttatctgataataatttgaatcattggacatattaatgatatagtttactttatttgttaggatgtttgtatctactgtaaagaggttgcatgttttaaagacctcccacgccttctcactctcacgtaagattacaattcttacgaaactttttcatacatctcatcacttaattactgccttgaaattaacttatatatttatttattttttcacagctagaaaacatggcaaggaatagagagaggttggccaaaatcatcagttcgatggtttgtttttaatgtaatttttgtggaaactaatggggtttggctttgatttactggttttctttttcacttatgtactaggtttttgcttgctatgttatttcttgttttggttgtaaatatgctgttcgtttaagaaatcgggggttagtatgttatcgtgtgtataaaaatagtgtaagcacgtaagttgattacaatgcctgatatgattcatgccttcgtttcgttttttagtagggaaaatggtatttaattagcgaaatcaaaccgactcattttatgtttttttcagagaggtaaaaatccagagagcctgtttactatgtatgagtaaagattacccgaaataatagagaaatagatacaagaggctatccaagtttggtgggttcgagttttataacaccatccaaaaaaaattgttgttttgtaacacacatgagtaccaattgtttatttcacaaaagacaaaccatttatttcatgaactgtaatcttgttatgttcatgaattatttcggtataacatgtaattaactcgagtaatatcttaaaatagtatttagagtaaagatagtagggagaaagatactttatttttttataactcatataattttaaaaatttcatacacccaaaaattgattatggagtatggaaaaaccatgttaaattacttaaattttggtggctaatactactcgaactcagatggtgaaaacgactttagacttcattaatataaatatatatatatatatatatatatatatatatttatatgagtttttacttattgtcaattggttttggaattagtaatctatgaaacttaacatagtatcagtctatcagaggttgaacattcgctgacccgttaatccaacttggaaaatggtccgattacctctactaattgatgatccaaagaaaaactcaattatgtcgagataggtaaaaaaacattattttaaaagaaataatgaatttaaaattagtaaataaaatttaaaatttaaaaattctcctataaattttgtgtctcacaactttctttcaaactttttttcttcaaaaatataccgtatgctgatgaaatttttatctttaccaattaagaatataatcttttgtttccatctcaaatcatcatcatcacctccaaagcgtttagcaaccccaaaaccaaccacttggcgactacacagtattttactcaaaacatcacaagtttctatgaaacgtaaaacgatgagtttagtaaaaaaaaactagagattatagtcagaaaaactataataataagaagataacattaaacggatagattcatgtctcttttttgaaatccaaaattgggtaaaatccaaaaaccaaaatcttgccaaatgccaataagagcaaaaatccaaactttcctttctcttcactattacacaatgaaatcaacactacattttcacatcaaaatcacattccttccatg

SEQ ID NO: 17548 - DNA, 3000 bp, Unknown; identical to SEQ ID NO: 7909
  misc_feature (1)..( 3000): 2750-1469P.txt file - cDNA_ID_1809665; gDNA_ID_1621173; Annot_ID_57277

SEQ ID NO: 17549 - DNA, 3000 bp, Unknown; identical to SEQ ID NO: 7909
  misc_feature (1)..( 3000): 2750-1469P.txt file - cDNA_ID_1809665; gDNA_ID_1621173; Annot_ID_174060

SEQ ID NO: 17550 - DNA, 3003 bp, Unknown
  misc_feature (1)..( 3003): 2750-1469P.txt file - cDNA_ID_1809665; gDNA_ID_1620779; Annot_ID_167873
ccgttaagatcactagtaagttgtaatttattattagaaaaacaaattaaaacctaggttgcctggaaattcgttttgaggtatgttttccgttttcgaaacgtttcggaaatagagactcgtcggaaacacaaaaaatgttacgaaaacacgtttttaaaaaatctatttttggaaatacgatggatccgaactagtcacacgacaaatcctttttattgactttagaaatttaataaactaaattagaaatattaagattactaaagtatataacttattttgaaagactttgagttttaagatcttttgacaaaccaaatttgatgaaactaattaaaatgagaatgaaaatgttggtctaaattaaatatttgaacttaaacattttaatctatatcttttagaattttaattaacttatttaatattaatgtcttggacttgtgttgtttaagccatttttaatataatttcatgctaatatacatatatatatatatatgtaaatatatgtatatatatttccaaaatgtttctaatctctaattttagaaaaaaccgtttctcatatccacataatcgttttctttccatgcaacataaattaaaacaatataaaaaaaacttcttattttcttttggtaaacaagacttttgggcaactggtcttcaacaaacatattccgaagcaggctaattcggagtatatgagtctggagatcctttaaactttagactatgtatgtcctctgcaaaatttactctctggtttgtgaatcacctgttttaactttgtttataagttcgttttatggtttctgtaagattttactattagctacaatacaaaagattttgtaaattagggaaatttgcatttataacctacaaaaatattataattaagtaaataacattctcaaaaaaagcaagcaatattgtttgtattttctgtaataatgccaatactatccctgtttgaaatacacgcttttcatcttctcccttccatagaaaaccaactattttctttcgccaactattaacttttgaacataggtttggctctaacaaattccagtccaccgtttatgaagcttttgattttgccaacgattaacagaggtatattgggcacaaaaacaagacagttaatttttggaaatgacatttaggttttgctcgaaattgaattagaggttttgatttacagaggcacgactttagattttgttggggtctttggtttttttaagagactttggttttggtttttgaaattcaattagtcgagattctcgctaataagcgctgaatttgatcaatctctgttctctgtttccttcatttgatttctttttttcggtctctctaatttattggcgtcgttgtttccttatcctgaaccaataaatcgattttgattttgagaaatttttgagagatactattctattttgtgaatatactatttacgtataccttgtactatatacgttttaaaatgaattgtttgttttgattaaggatgttaagtgatttgattagtgttttatattaaaagtcttgggttccctatatattatcttagggtttagtatccttccatcaaaaagtatttaattgattatttggattcatcggaataaacgtttctatttaaacaaatatatactattctatctttctatgatgatctgtatagaatttgatatcactattcatttttttaaaaaattcgtttccgttttttaaaattcaaatcatattagataaacaaaaaaaaatctgtttttacaataatattattaactttaaccaaataatattgttaaactaataaagtaaacaaaattaagaggggtgaatatatattagtcatatatatttctctttcctcctgctagtggcttctctttctctccaagcgcatccgtgggaaagagttgagtgtattttcacaactgacatgtgctatcaaataaattacatacattatagtactatatatttaataactttttcaaaaaccgtcattttttgcaattcaccctataaattaacactttataaaaactataattaaaaataaaatgaaactacatgttgatatacagagcaacacctcccaatagaggtttggtgagtaattattatataacaatagtatcaatttattagaacaatcgaatcatattctagattctttcatcaatttttttttaaaatcattctagattatagataactttgactttacttccgacttttcaaacggcacatttttcttggcaatatatttcagagaaatggcctattaattactctttgattttttataatgttcgcgtctttgaattgaacaacccaacttttagcatactagctctttaagcacacttttatttttttcacaatttggccaataatgttctagaaggaccgcatatcatatgattagtcattattggtgcttaacggagactctgttttttgccaaattgaaagttttagatttcatgctaatagataagagtgatgttttaaaacatatttgaaaccaaagttccaaactaataccattagtaaaaatcatttacttataagttataagccctcgtcatggcccattttacatggttttggattttagatcgtaaagagaatacaacaaaactgtagacaaaacgaaatcaaaatttcgaatcaaaaagttgtacttgtacagtatataagtaactaatcgtcaaatgtgtatccagttaaaatcgtcacatatgtagatacaatgacgtaatgagtacccaaacatcaaatctctatttttattacaaaaaaaaaaaacacatctcatcgatgacttcacctactcttctctataaagacttgaaaaaaacttgaaaacttcttcaaagtttgtatccatttcacattcacagtcaaactcggttgccgaagaaatttcccggcaaaacctcaacaaacaaaaattagagaatg

SEQ ID NO: 17551 - DNA, 3000 bp, Unknown; identical to SEQ ID NO: 7903
  misc_feature (1)..( 3000): 2750-1469P.txt file - cDNA_ID_1809695; gDNA_ID_1621173; Annot_ID_57267

SEQ ID NO: 17552 - DNA, 3000 bp, Unknown; identical to SEQ ID NO: 7903
  misc_feature (1)..( 3000): 2750-1469P.txt file - cDNA_ID_1809695; gDNA_ID_1621173; Annot_ID_174044

SEQ ID NO: 17553 - DNA, 3003 bp, Unknown
  misc_feature (1)..( 3003): 2750-1469P.txt file - cDNA_ID_1809710; gDNA_ID_1621173; Annot_ID_57263
ctaatgaagaagctttcaacattttcttggttataggcttttgttagcgaatacgctgtaaacaaagcagatgctaaaaatggcaaccttttggccgctcttggtgaagcagctttcctccttggtttggaaaagaacaggttttttttttctcaaacctctatcttcttctttggttttgaaaagaaaagttaaaacactcactgtcatgtttttgttgcagtgacattgtagaaatggttagctatgcacctctctttgtcaacacaaacgatagaaggtatctctcactttagtttcaacggtttttatcggtatatcttgaatgcggtaatcagaaacaagcccgttgcttttgttttgtttttcaggtggatccctgatgcaatagtttttaactcgtctcatctatatggaactcctagctattgggtccaacacttcttcaccgagtcaagcggagcaactcttctcaattctacacttaagggaaagacttcttctgttgaagcatctgccatctctttccaaaccaatggcaaagattacatacagatcaaggtttgcttatctcccatacgcacaaaacaaatgtctagaaccaaatgaatgttctgaccaaatatgaatacacaggctgtaaactttggagaacaatcagtaaatctaaaggtagcagtgacaggattgatggcaaaattttatggatccaaaaagaaagtacttacatctgccagtgtgatggatgagaactctttttcaaacccaaatatggtaaaacatatgaagaatcaatcatacaagagttagggcttagtattgttctgaatcttgaaaacgttgctaagttgttttctctgttcttttctgtagattgtgccacaagaaagtttgctggagatgactgagcaggaagaccttatgtttgttctcccgccgcactcgttctcttccttcgatttgttgacagaatctgaaaatgtcatcaagatgccaatatctgattcatacaagaaaacttcaacaatgtgaagagaaacatcatcttggagactttcatgtcttttgtctttactcttcagtggttattaaacacataaacctatatgttcgtgaataataccaaagttagttgattataatcacgttatgcccttagattacttgatatgcaagattactcttccttggtaaaaaaaaaacaatggtaacacattagaccctaaacagttcagtcaaaggaacttacattgtgtcgtcaaaatgcagctaaaaatagcccaaagtttaattctttattgtttaaaatccttatctaacaaacattgcttctcacagtttcttgtttttttcttttcttcaaactataattagaaagacatcgagaacatatcttaatacttgagaaactaaaatcccctaaattccagcaatttatctgtcctttcaaagcaattttaagattaagagaaccataaaattaaattccattactctcacacaatttttgattatattataacattttgtatgttggagcaagatggctcccttcatcgccttattcaccggcctttgtggcttcaagaaaaacgctcggccattgggaacgattgagacgatgtatcagtcatctcctcgggagaccaaagaaagagaacaaacaaataatgacttgcagatcacgaaaagtgatgacttgtggaacaaggaaagcgatgatcgagatactaatgcatttaatgacgatagtaatgaagcggactctgagcttccgttgcctccaggaagaaaaggaacaatacgtggaacatattcgtgtaacaacatggtgttaagaagatccttgtctactaagaagaaactgagtgcgagcctaacgatccaaataccgagatcattgtccatggtcctcaaacgtgacaaggaggaggataaatctgtgaggaagaagaaactgaacgcagataattcgattctggtactcccaattatacttggagagagatgtagggttcttgatgcggaagaaggagatgaagatcaaagccaaagaatggcagagaacagaatatatcgtcctagatccatgagttcgatctcgatttcgagaaccaagtcgaacatcgatatgaatgctattcccgtagaagtaacatcagaagaacaaaaaatctgatattatgatgtctaaaatgaactagcttcatggtgattaggggttaattacttaattgttaaatctcatgaatctgagtgacatcatcgtgaaatatttcgatggagagtgatatcaccaatttagtttgaaggatcatgataaagaaaagtactcaatgacttggaagcttttttgaaacaagtagagttgtaatataaataccggttcacaaaaatgtaaacgaattgatttggtttcatatatagacatatagctaaagtgcatttggctaaagaatttcactattagacattgtttcaaatcattaaaattcacaagccaacatatttgtctttttttaatacatgtaaaatttattcgaaaaaacgtttttacatcaagtgcaacatttggtaaataaattgcgtacaaatttccaagttttcatggatctatcttctatctcattgttaacgaatagaggagatccagtttcagacttgtttgtcgagttatcgaagcaactgtacgtgctggtggtattggtgtctctccaaattattaaactctctaagatgcattcattgtaatttttattttttttctgatgaagataattttatattcatccaaaaaaaactatctaatttgggtaaaaattgagaatgacttaaggattatttagaaaataactcaaaatgtatcaaatagggttttggaaattttccaaaccgaacgaactaatcataaacaatgctgtttctgtttttcaattcaaatttggataaaccaaacaaaaaccggttcatgttcttataatttcggtttttgattccggtatg

SEQ ID NO: 17554 - DNA, 3003 bp, Unknown
  misc_feature (1)..( 3003): 2750-1469P.txt file - cDNA_ID_1809729; gDNA_ID_1621174; Annot_ID_57304
tcgcttatgatttccatgtgattggggtgtggaacaggaagagaaataaaagaaaaagtggaaatttgaaagagaagtgaacattagggaaataaaaagaatcatggctcaaagtttataagtgtagaaagaaaaaaagtgtttatgtgtttatcaccgagaattctctcaatcttttttttgtgaatcagatttttctcaccttttttttttgtttttttcttttctttctgtctgatgaagagaaaagagttaaatatatagagtccaacggttccggcgtacatttgcaacattacatttaataaattaaccataatctcaatagttgcaatggttagagagtaaccgcttataacacttaaatctccaacatgttttgcttgcagtttgtggcactaattgttataagagttagctctctcagtagcaccaaactggtaagtgagtttctgatacaagtgttgttatataaaaatccaatgtgattgatcgttggggatgatttaacaaagagaatgatcagttctgagaagagcatttaaactttccgttaagtggagtgatgaagatgatttattggtgtaaagacaaatgttacgttgctatctattttggggaataatgtaactttttttaccgtgctatctttactatgtagacgtatataatttctgtcaaacatcttacttcgattttccataactctgttgttacactttcaagagatcatctataactctttcaagagatctaccaagttattcaaaggtaggaaatgcctacaatgtgaaacttaaaaatttaacatattccctcttatttagaggtctagttttgattttcatgtgaggagaacgatttagtgtataatggttttaacttactctgtgttagttaacacatatttatgagtaaattaaatatcaaatgttggaagttgctaagcatattggcctcatttactttgctagaaagttaatactctacatgttttcactataaacccttatcatcatgcatattgctgacaatgttattttagtttttatgaaattaaaataatatgtgaaatagtgaattctgtcaactaaaaattatttcagtcaaaaaataaaaattataaataaaaattaattcgaaaaacaaatatgagcatattattaatgtaatttttagcctaaatggcaaatttttccctacacaaattagctcattatttttcttaacattaaaattatttgtctaaaacctgcattcttctaatagagtgaaacggttttgggtttaagacatgtgagattgaacaaacaagacgttgacttgtgagtagaaggaacatgtgaacttatatggaccatgtgaccttcaactacaatcattggaatgttaaactactgtcttctcttatttggcatctaaattttgtttttattactctctaaacaaaaacgaattaacaagatttctgcacaaaaatgtatgcattttgttttacgtacaatcatctaattcgaaacatatggggtgaaattttttactttttaaagacaacaaaccaatcaatcacacgtgaatattgccagaagagatatacacttggagaggataatgaaccattaggtgtccccaagtactaaactagacctctacggtgccaaagaaaggttccggagttatgagtggtcacctctcctacctctttgaaagacatgtatatcgctttaactccttaattattgattcttgtgtgtaagggcaggcaacctatgcaaatagacaaattcatatttttcatcgtgatcatagtaaatactacaattttttttttttttttttttttggtaaaatattacaaatttagcaaaagacatgcaaagattaaagacgctatgataagaaagaaaactaatcggatatataactaaaaagacgttgaaaatggcaaatatcaatcatcaatccaaataatattcatatacctttcatctatgaactaaggttttttaactaatatatatatatatataccgtatgattacactgtcaaactaaagtataaaatgcaacaatagaaaatatgagaaataaaataaaatatattaattatttgcttttcaactactttaatatcttaatttaccatgagaaagaaatgaaaatatgagtcgaaataaaaaaagaaaagaataagtagtttgagaacaattttttaaaaaagggtaaaagactagaacatatagtcaattgatcatctacacatgttgttgttagaagaaaaaaaccaaaagaccaaaaatccaaaaaggaatttctcttcacattatgtgtatggccataaataaaaacttatctatctatctcgcgggaggaaaacaaactgctcgtgttggtgcttttgtaattcgtcttttcttatgtattatctttaagaaaagtcttttgcattgtgcacctacacaacattccgttttactaaaagttaatataccaaattgcaaataattcagctccagtttactcttgtttatttagtttgattttgggtgcatttgatatctttttcatcgaacttatgtaaattttctctaataatcgtaaactttttctaataatcgtaaatttattatcgtcaaatattccaatttgttattgaaatgttttcgtaatatacctcaatttcaaatttaaatattttattttaattttaaaattgcgtaaccgtaattttaattttaaacttgctcaccctaagatgggttttattttctcccgaatttaatatttaatttactaaaaatgatatgataagcctttatgtatgtaaactttttttcttaccattttttttaatacttccattgctctttttttctgacgtcttctttaatttattctactctatacatatctgccatatatgtgtatatagagagaaatatacttcaattcgtttccaaacctatactctcctctctcacaaaaatgaacaacaccaaaatg

SEQ ID NO: 17555 - DNA, 3003 bp, Unknown
  misc_feature (1)..( 3003): 2750-1469P.txt file - cDNA_ID_1809749; gDNA_ID_1621174; Annot_ID_57298
gcatcacaatggaaaagcattaacagacagtagaaaacttgcactccatatcgaagagatagataagcacataaaaagctaacctgcgaaccgaggccaacagcgacaatccgaggactgcatctaaccatataaacagtagatctaaacctcaaaacatgaacatagttatgcgatctaagcgaataaaatcgcacaaccgtgggagagagtgcaagaggatcctcataaccatttctaacagatccatctctactagtaacaataggacctgaacctttagcttcatcagcaacagctaaaagtataggatgtgatgatctaaacccttcaactccatcacatttagcaggtaatggctgcatctgtaaaaatgtaaccggatcatcccgcctcgacacgaattcggtaacatcatttgaatcatcgatatcaagaacttgaaacccgtttgtataacctagtaatagaacgttcttgaaagatgattcacttgtgtgcaatctatcaaatgaagaccacaacacctgcttcaccaaacacaaggatcacaacaagtcaaacctatctcgataaaaaagactcacactttttcctaatctgatcaaaatcacataaacccaattggaaaatgaatcaaaaacccccaaattccaaaatagagaatcacgaattggggaaaatcaaaattgaggtcaaaacctgatctttaagctcgtgagaatcagaagagagggaagcagcgacggaggcgctagctgagcgaacaccggaggaagcagttctgatgcaagtagagatgaattttaacgaattgggcaaaaagccattagtaccattattcttcgtttgattatgattatctccgttgttgttgatgttgaccttggagttactcttcatagtaattatgaattcttcgtggaagataccaccggagatacaccggagaagagacaacgatcggaaacagcataagccggcggcgatttcgaagaagaagaataagtaaagagattgtttaatttgagaaattttgaagctttgccattttttggtaattggggttaagcggtggtgtgttttttgaccttcttcacggaagaagaagaagaagcgaagaagatgatgatgatgatggagaagaaacggttctttgcttttttttggtttctgttttttttttttttttgggtttgctttttgttttgttctttgggcctttgtggctttaagttttagttagttttgttttgtctatttggtttttgagtaaaacttaaaagtcactgtcctaaaagaaagagttactgtagtgctttggcgtctacgggtgttttagattgctgtgtaagcaaacaattttttgtattttttatctcgtgcatgttcacattattacctttttttttgggaatgtttaaatattatcattcaaaaattacaccaaattgattaattgaatcaacaatagatctatttattgtttaagaaatgtagagatcgtgcaagcttaatgttccatataatataggtcctagggctagttgttacttatttggtgtataattgaaataggttttagtttgcacgtcacaactcaaagaaaatcaaggcatccctcaggcctaagccttccatgtttagacccatttgcaccaaagcagttaatgcccaacgactagtgatttgggtaatcaattgctttgtatgttgaatcatatctttcttttttaggttagatttttttttttcttagtcaacatgaataatcagattatataccctaaattttttagaaattgctacactataatttcattcaccctctttattctagctaatcagaagctatcccctaatttttaaaaaatatatttaattattattgaatttgctgttcaccatttaaaaaaatgtactccctctagtcaatgtgttctcaactatattacatgcattaataaagacttaaagagtgactaattcgaaatcttgtcagattattgaagtaagagttttattacgtcgttgttagtatacagattatataacaaacaataaaatgtggttcccgtgtaaagataattataagttataaccttatattagacgacaaaaaaaaaaatgttataaccttatattatttgagaagttacaaaaaaagattaaataaatatggacgaacaagagaaactatatctgtatatagtacttaagttataaccctataactcacacattctttcagtagcaatgagtttaatcaaaatgattccttagacttgtatttatccactcacacggtttagtaatatattaaatgaaaaaaagctctaaaaggaagttgctcctatatatcttattcttcttttatatggttttacaaattcataaaattcaccaaaatgacagtaccatgcatataccaaccaccctacgatcaaacagcaaggctaaaacataactgtaagtgttttcactattttgtttcatgttttcaccctcttggttacgaaggcaactatgccaaaacttattagtaaactttgattaactgacttttgttgagaccaaagaacagttccaaatcttgcgtctacccgtctccaattatttaaagaatattttgtcagagttgcacgtttttacgaacaccatttcattaatataactatatgttcttttaaaataaaggccaataatttcaccaaaaaacttaaaaataaaagccaactactgtttttttgtcctacactcctacttgatttgtttttcgtcctttgttaattacccacgatatcttcaagcctttttaaaaaaaaagtgtctaaaacttctcaagatcctatataaatgtatgaagagttttgaacttagtacttgtcacaaatataagtgacaatatcctcttaagtctcttactctatctctctctttaactgtatcttaaacaaaaagaaagagtatgatcatcagaagaaaaaagaaacaacaacaatg

SEQ ID NO: 17556 - DNA, 3000 bp, Unknown; identical to SEQ ID NO: 7926
  misc_feature (1)..( 3000): 2750-1469P.txt file - cDNA_ID_1809753; gDNA_ID_1621174; Annot_ID_57297

SEQ ID NO: 17557 - DNA, 3003 bp, Unknown
  misc_feature (1)..( 3003): 2750-1469P.txt file - cDNA_ID_1809761; gDNA_ID_1621174; Annot_ID_57294
gacagtcctattccttgcatatggtactttcaagtcgagctctagatttgagtaccacctacaaaaaaagaagaatcgacaatcattatggtagtctctccatatataagagttttaaaatgtatatataatctatcttgctagctcataatggcacctgaagacttggcaaagctctttgcggtgcaaaatttgcagaagattgaaatctatcttagcaaattctagcaaggtttggtcgtgcagatcttcttcttcatagtatgagatatattgtcgtgtctctatccttgatatacccctagggtatgcatgtttgagggcatttttaatgcggatggacataggtggactagattgatcagccagtccttccaaatgagacctagagaaagcaagagcttcatcgagaatgtcttcaccatgggtgctccaatgtgcagcttcataaaggcataaaagacctcttgcatcctcagctaggtgctccttgaactttccatccttattcttgaagttgttaaacacatcttacacatataattttttgttagtaatcaagtttaataattaacattgacttggtagatttactaatcattatgcacagagagtacaaagtgagtataccttgcgcttccacagtattaatatgatcgaattaggtgaagttgaaaaagaagaaaaaatacgctcgctatacttatgtcagttttcacattaaccaaaatgtaatatagttcttagaccaaaaacaaaatactactaacaattagcaacattctctttcatgactttttcttagtaatatcaattcaaattttttttaacccaaaaaatatggaaacataaataagaaacttattcatactgataaattaattaacatattacgctcgataattctaacattagagtgacttaccgacaccaagtttatagccaaattgtctaaaaatttggaagacgagggagacggtgtataaatcgaactcattgcctcttatcatctgcataaaaccatgacaccaaacatcgtctctaactgcgtgaagatgtctacttcaaagtggtaggaaacaccaaggcgacaaagagcatcaatgaatttgatgttctctatcggctcttcttttgaagccattaacaatcctcttacggtttcctttagtgaactcagcttctcttcgtttatctcactctcctatatacatcaaaataatggcacgagagaagacatcataatatagagtatattcatagtgttttgtgaacaaatttgcctaattgtgacttcaagtcgtgtgggtacgtaccggatccaaaacagaaaaagagatcaagggatcttcccatatattcaccggaaaatccgctaatggccgatatatttcttcagtcgtaagcgctgacaaagtatttatcagctcctgcatgcttaagttctttttctgaataaaagtgtatctataatcacacttcaaggttttctaaagctttggtaaaactgtggctgcacttgatacatatagaggccatatatagggagatgagcctccctctcttcttttggtgtttctttttttagtaacctttatcttaattttgtttatttctatggtattttcttttaggcgtgtaaaaatgagtcattgattgggactcttagccgacacgatagatatgaacacattggccattttacttttctagtactccctctgttttaatatatttctagtttaaaggtgtttttttttgttacaaaataaatgttgcttttatatttttttatgcaaaaattaaatatatttaatagttttaactaattatatttaatagtatattttcgaattaattttatttgataatattttataaaaaatagatatattaaagaaggtttttatgttttttcttttaatttgtatgaaaaatctttaaactataaatcaaataaaattgagggaataatagacaagtgacagattttcttcggttactaaaagagcaaaatcaattcattttaatattttgacgaaaacaaaacaaaaaaaaaaatcattttaatattttatgtccatcagcccgttgaattaggcttaaatggcggcgacacattaaagcttctttaattgcgccactaatatgatatgcgccactaatatgatatcccctacctcatatcaatcattgtaagtgtcattatagtttcttacatatattaacataacaattaaaaagaaagggttgccttccatgccaagccagcacatggaccgaattgttactcgctacagtgaggtgactggtgagatgggaacaagttgccatgatgtatgcaggtaagtgagggatgaacgcctgtctgtgttgctgcatgcctgcatgtgctatttgtttgtttccaaggtggtgtgatctgcccccgaggaatgtctaggagaagggttttctgctgtgattgctgaaggcaaataataatcaagagtcgaggaacaaaatttgtttcaaataaagtggaaagaaattcatatttgaaactccttcgttttttaaacagttcaacatttgatgtagattttaaaaatgtaaattctatttaataggctgttcttttttttatataatatgtgaaatctataaaaattaaataactatttgaaaaaagcttttaaattgattataattttgtagtgggttaaaatctagaatgtcaataaaaatataataaaaaaaccgaattaaaaatcactaataaaagccttcgaattcataatcccaatgcttttttaatctttttcttctacacaatttccagaagatgattactaattagaacgaaatataaaatacaaaatttgtccaaaaacttggagatgcgggggatcgaaccccgtgcctctcgcatgcaaagcgagcgctctaccatttgagctacatccccagttgttgagttacaatgcttcacgttttataaattcgaatatctaaaccaacatg

SEQ ID NO: 17558 - DNA, 3000 bp, Unknown; identical to SEQ ID NO: 7924
  misc_feature (1)..( 3000): 2750-1469P.txt file - cDNA_ID_1809775; gDNA_ID_1621174; Annot_ID_57288

SEQ ID NO: 17559 - DNA, 3000 bp, Unknown; identical to SEQ ID NO: 7924
  misc_feature (1)..( 3000): 2750-1469P.txt file - cDNA_ID_1809775; gDNA_ID_1621174; Annot_ID_174083

SEQ ID NO: 17560 - DNA, 3000 bp, Unknown; identical to SEQ ID NO: 7923
  misc_feature (1)..( 3000): 2750-1469P.txt file - cDNA_ID_1809783; gDNA_ID_1621174; Annot_ID_57284

SEQ ID NO: 17561 - DNA, 3003 bp, Unknown
  misc_feature (1)..( 3003): 2750-1469P.txt file - cDNA_ID_1809791; gDNA_ID_1621175; Annot_ID_57328
ataaaagagaaaataactaaataacggtttaagtaatcactaatcagttagtgaataaagtgtttttaacatcatcaaatttacttcttagtttctgtaacgattttgtaaactcgttttaatatcaataaatttgtttagcggaaaattaaaccaattttttttgcattattgaattaaacaattgtttactgcattattaacaaaaaaaagtacttaaacctaattttgggaaaatgttaaaaagaacaaaaaaaaagtagatctgggagaaagtaggtagatagattgggaagatgagtaggtagctgtcttttttcatctctctcttctccaatcactctctccacacgctacttccttcacgtacctccacgtgtcctttcttatgattttatcacattcctctctcctttgtctcttcaattataaaaacatgaatattatttagattagttggataactgaattattgggtttgggcatgtgtacttggtccttcttctactgttgtgtctcttaagtttttttttatattttattttcggatttcacattgtaacgacggtccaattaaagaatacatttttaaaatgaatttactagtaacttgtaaggtacttaaatggtatcaatcaacattgggatgatttttcttggaaattggaataacgtcgctataacaggcgattagataaattagtcgcatagaatcgtataaatgttaaatgtttttgtctcacacgccccatacgtattttagtcctttgcacttttgcagaagttatcagaattcttttcaatatttaaagaggagttgaattttacaacagtgatgtaattctatctaaagcttaatttcataagtttattatagttctgtttttctttctcaatcgtaaacattttttcttatatagaaaaccccgtacaatctaactactattcaacgtaatttaactactgttcaatcttcaatgttttgtcataagctagtaatctatgcttaattaagaaagaaacataagaagagtcatgagcggatgggccttttgttcatagcattgtattggtcatgggccattacttgcaaagcccaacatggctaaccgcaaacaagcttctaatttcatcacgctacgccaaatgccaaacattgttgtacaacacttctaccttctgagtcttcctgactattggctaacatgaactacgacgttcaaagaaaggttcttcggaggtacactgatcgatatggaattggaatcgaaggttccctatgcacaaaagaacatggcgaaaacacgattcaaaaaaacataacgtccgaagcgcaactaaaacttaatatttcgtgttaaaagccaactaaaagttacatttccgttttgtaagcagaaagtgtgactattttatgtgttcttaacaatatatcatttttttttttactttgttaatatcactttctcatttctaaacgctttgtaatattctagcgaaaatataatttattaatgatttttatttttacatgcaaattatacgactgaaatgttataggaatagagacatgtttgtatcacaaaattaacttatgtaggaaaaacaaatagtataagtctatcgttcccctctctgttcaggcgtcaagcctcccttgccacatttaggacaactcttcataccaaatccttgacaatcaaaacatctgcacatattcaaaatcccaaattaactctccttaagtactcattgaactgtaaatttttagattgatatttgagaaccatgtgacattgttagttattacttacttccacctctcaaacatatttccgttcttcttatttttacctgttccctgtagacaacaagagaattttgtctagtatatgcataaatatagagtaagaaagagtaaaatgaataggtatggtctggaaaagattgatcatacactaaaggtattagtttattacatagtatctagtaatgaaaatcaaattagtaccttgcaaccgggacattcaattgctcctttggctccacaagtctcacaacttttgaatatctgtttatataaaccttttgaagaattaacaaaactcttcattgacgatgataacatatcatattgtatatggatgtatagtgaaatcttaccgaaccaagagagaaatttccgatttttcccgcagaaactttgattgtatcgcgtcgccccgaaacaagctgactttcaaaagctagaatcttcggttctaaagataactcactgcaacaaagtggaaatttcaacatttttgtaactcaaattagaactaggaagtaagatatctatgtacatctatatgcatatctatgcatacaagtgatagtgaatatggatggtgtgagaaagctaaagaatttgcttggttgtggtttgtggatattgaaacggatcatgtggagggaatatgttgacaaggattattgacttaaaatacataagtgaaagaagccaaaagaccctacaaatatccattgaaacaaattaaattataatttttacctaactaataaacaatatcaatcacaatttaattctttattttaaaacagtaaaaagcataaacaattaagagcttaacaatcattttttaatcaaaatatctaaacagtatacattcaagtaaatattactttatgcatgcaaaatgtaaatctgaattctgaatatgttaatttttctttttacaatgtatcaaattttataaattaagaataatatattttcttataaatttatccaattttaatttaagagtaagatattagttcaaaaagataaagaaagggacaaaggataattaattcaatgaacacgatcctaaaatagaaaagtacgaaaacaccccttatcttccgaacacttttccgatcgcaaaatgatcgcctgaaaccatcgccggcttcagagtgtttgatcgtttctccagatagatagattgatccaatatg

SEQ ID NO: 17562 - DNA, 3003 bp, Unknown; identical to SEQ ID NO: 17561
  misc_feature (1)..( 3003): 2750-1469P.txt file - cDNA_ID_1809791; gDNA_ID_1972024; Annot_ID_178156

SEQ ID NO: 17563 - DNA, 3003 bp, Unknown; identical to SEQ ID NO: 17561
  misc_feature (1)..( 3003): 2750-1469P.txt file - cDNA_ID_1809791; gDNA_ID_1621175; Annot_ID_174143

SEQ ID NO: 17564 - DNA, 3000 bp, Unknown; identical to SEQ ID NO: 7940
  misc_feature (1)..( 3000): 2750-1469P.txt file - cDNA_ID_1809825; gDNA_ID_1621175; Annot_ID_57318

SEQ ID NO: 17565 - DNA, 3000 bp, Unknown; identical to SEQ ID NO: 7940
  misc_feature (1)..( 3000): 2750-1469P.txt file - cDNA_ID_1809825; gDNA_ID_1621175; Annot_ID_174127

SEQ ID NO: 17566 - DNA, 3000 bp, Unknown; identical to SEQ ID NO: 7938
  misc_feature (1)..( 3000): 2750-1469P.txt file - cDNA_ID_1809829; gDNA_ID_1621175; Annot_ID_57316

SEQ ID NO: 17567 - DNA, 3000 bp, Unknown; identical to SEQ ID NO: 7937
  misc_feature (1)..( 3000): 2750-1469P.txt file - cDNA_ID_1809833; gDNA_ID_1621175; Annot_ID_57315

SEQ ID NO: 17568 - DNA, 3000 bp, Unknown; identical to SEQ ID NO: 7936
  misc_feature (1)..( 3000): 2750-1469P.txt file - cDNA_ID_1809837; gDNA_ID_1621175; Annot_ID_57314

SEQ ID NO: 17569 - DNA, 3000 bp, Unknown
  misc_feature (1)..( 3000): 2750-1469P.txt file - cDNA_ID_1809845; gDNA_ID_1621175; Annot_ID_57311
tgtactgactgagattgtcactgtaatgtaaacagaaaccatcgtggtctgaggcactactggggtctccgtgtacgtggacagcacaccaaaaccaccggacgccgtggaaagactgttggtgtttccaagaagcgttaaaaagagtttgagcttggttcaatggctttgttttgttttttttgtattgttgttttttgcagaagagatagtttaagagatgttgtttcatcaaaagacggtcttagcttttacaatatataattgaatccaaaaactagtctctatttattacattctcttctctcaaaatctgctttaaacaaagttaataatagcacactcctccatacgcaagaattatataattagagaaaacttttaagtgtcacaagcggctgtctctataatgcgcaaatacatcgttatcagttttaatcactatcagtaactttactgaacttaattgatcattttaatttttcatgttactctctccttcttcttcacttgttctctttctcatcgcctcttgattcacgcgaacgagaaagcgacgatcgtaaccaccggcgctgaccaaaaagtaatcgattctcttcccgagctgatctctcaggtgcgtgaattcacttttttttttttcgatttttcccgagaaaaaaatccagcaaagagtagtagcgatgaagaagacgaggtttgaattgagattcgtattctttcggtggcttgaagtagcttatgcatgtttaaactcttgttcagttgtttgctcatgattcgaaaatggctttgtagatcttctaatataatctcttctctttatcaattcactagtgttctatatctgaagaaatttacggctacagatccaatctcatttcgtttcgttacactatctctactaagattttgttttttgttttttttccctctttttttgcgttttagatctcctccatgattgaagttgatccatgcttttgagtttaagtgatttatttaagatcctctaaacttttttttcttcacttagtggtggttccagtcaatttagcaagtaagatgttgtatgtgtcaatgctataactgtgaattttcagctattgtagtttgatttttgtctttgttagcttcaggtgtcttgaatctgaatctgtggctatatttggtgctcggtggtgagcaggaagggagggggatattgtcagggttttaatgtacgtcagatgaatagagcaactaatgttactggcagtagaaggagggggtttattctcagcgtccgcgtctgggtatagtaagggattgacccttcttttctctggtgataaagacgtagataggcccatgagagttgtcccgtggaatcactaccaggtggttgaccaagagcctgaggctgaccctgttcttcagctggattctattaagaaccgagtttcccgcggttgcgctgcttccttcagttgttttggtggcgcttccgcgggacttgagaccccttctcctcttaaagttgaacctgtgcagcagcagcatcgtgaaatatcatcaccagagtctgttgttgttgtttctgaaaagggtaaagaccaaataagtgaagctgataatggcagcagcaaagaagctttcaaactctcgttgaggagtagcttgaagaggccctctgttgcggaatcacgctctctagaagatataaaagaatacgagacgttgagtgtggatggtagcgatctcactggtgacatggcaaggcggaaagttcagtggcctgatgcttgtggtagtgaactcactcaagttagagaatttgagccgaggtacgtgtgatatgttttcctcttattgagttgcttaaatcccaatacgagttaatttaagtagatccattgttttatgccaataggatccttgttgtgaatcttgagcttgtataattagatccattgttttatgcaaataggaatgttagtcttgagctttaacccctattgctcaaaatggatatcctttaattcatttagatttcagagtttcacatgtgcgtagtgcccggcaaactcactacatatatatattctttgttacacatcatggttttgtagagacatttagctgtgtttccttttctttgtgatcctcccacggtttgttattaacttccaagaaacaaacttgattttggttgcagtgagatgggattatcagatgaagaatgggaggtaggacgacaaagaacatgttcgtgtgtgatcatgtaaattcagaaatcatcggtatcactctttactcatgtcttgtgtgcattgctcatatatttaaagtgtatctgttattacaaaagttctcttcaaggttttggcttgtacattattccctttgttttgagtggcaacttgttccgggtttctgttttctaaaaacgataagacaacatccaaatcgatgcaaagtggaagagagtggcaataactcttgttcttgtaacgctctcaaccacattacgtacgtgtacaacaaaactagaatgcttatataactagtccactaactgcaaagcgaatctgcaatggtttcgcaacgatccaccatgttcgttagttctatcgttcacattgtccttaaggaactgatcaatcatgtaaacatttaatggactttacaaagaatcttgagtcctctgttgtattaattgtttaccaattaccagcttccatagcgtttctggttgcaagtacttaaccatcttggaggcgtaaacagttttgccagagaaagttgataatccatctgattctaatgacaacataggggttaaaacgtaaaattaaaaacaatagggaaacattatagaatatagataaacttcagggatcaaaatgaaagaatacaagacagagaaatctaccgtctcttcttcaaaccaaacccagaacctccgtccgaccaattccggtgcagctaagaaccagagatagagagatagagatg

SEQ ID NO: 17570 - DNA, 789 bp, Unknown; identical to SEQ ID NO: 7961
  misc_feature (1)..( 789): 2750-1469P.txt file - cDNA_ID_1809853; gDNA_ID_1621176; Annot_ID_57344

SEQ ID NO: 17571 - DNA, 3003 bp, Unknown
  misc_feature (1)..( 3003): 2750-1469P.txt file - cDNA_ID_1809861; gDNA_ID_1621176; Annot_ID_57342
tcaaaaaatttatgcaaatagtcgaaaattcatcaaaatacccaaaacttttacccaaatatccgaattttatctgaataaccggaattttgtctaaatatccaaaaacaaattataagtatctttgattaatatattgttaaaatttcatttgtgatgtcgatgtttaattaaatttattcggttaactataaaatagttaaattaaaatatgtaactccaaaactaccaagctttcatcaaaaaagattatttgccatgatacttgatgaaaaattcagaaaaaatcaatccaaaatagttacataacgcaccaaaaatcaaaactaagggtccattagatgttagattcacatattcaaaagaagtagtcataaaatagtaataaaatcgatattgttgtaggctctgtcttgtcgtttcaagatcgttgctctgttttcaatattattgctctgtttttcttgttttgtttttgagatatatggagataaactggatagcaagaaatataatgcatatcaagtattgtgaatcgtcaacgtcctttaatgaagtaaagtctgcccgaaaaatattcgcagtgtgtagatttaagggtaaagaaactttatcccagttgtgatagacttgtaaagagtttttcccttactaacttttcacataactccattgtattcagttggttaattaatttgaatttttcggaaaagaaatcgttattttgttatagtaaaattatttttgacaaaaatcaaactgaatctaaatcgaataccaaattgatccaatacaaaaatcaaattaaaccaaaaccaaattataaaagaaaattatcaacaaaaaaaatatcgttttagtttttataatactactgataaagcaaagaccaaaaaaaaataaaaaaaaaataaaaatacatcaaatttccatcttttaagtatatcaatatttgtttaaatatgttatccattcgcaagctagtttccaatagtttatttttatttttggtcggtctttcacctatggaaccaaatgaacaatggtctgcacatccaatagcctctctacgctcgcagtcttcaagttcatcaatagtgaagtaaaaacaccactgctagaatagataggaaaatctttttgaaattttatgaccttgttgctgcgatgaaaactggaatccttgttttttctttttgccaaggatccaaaatgttgggctcgttactaattgtaagacctaattatcatgttaatgatatataccctttcgcaacaacttggtcggtctttcatggcatatttcaatattatcttagacaacaattaaaatagaaaaacaattatcagacaaattaaatgaatgtcaaagtaagtcctagttaagttttggtgcacctattcccattgagtcttagactttgattaacaaataaccacatacgcattacgcatataaatatgcatgtcatgactccacatccaaaggaggaacttgaagcaacaatcttttcttaaattattttcgatctaaagatcttgaaagcaaagttgatttcgaagaagaagataacttcgctaattatctgttcttttctgttgtttcttcttccaatcgcgttttctaggccgataagaaacttagatggaccaagtggaagagctccaactgttcaacaaataagaaacaaacatgggactagagaggtgatagtggacaacgggattattagtgtcagtttctcgagtccccaaggacttataactggcatcaaatacaaaggagtcaataatgttctccatccacatcaacgagctcgagaatactttgtaccggagccatacaagaacacaatgaaccctttatatctaaaccacacggacaagtttaggcagtacggattatggcaacgatacacagagttatatccaaaccatgacctcatctacacaattggagttagtaactatagcaaagactggttctactctcaagtcacaagaaaaatcggtgattcaacgtacacaccaactacatggcagactgtgtttcatcttccatatgtaaacatgcgaggtagctacacattgcagctagctttagcctcggctgcatgggctaatctacaagtacgtttcaataacgaatacacgaggccatttttctcaacgggatatattggaagagataatgctatagcaagacatggaatccatggactctatcggctttatagcatcaatgtacctggaaggttgctacgcacgggaaccaacacgatttatcttcgacaagctaaagcatcaggaccacttgaaggagttatgtatgattacattcgtctcgaagagccttctagagaatagattcatatagtagatacttttttttttttttttttttttcacgattggttttatgtgccattgatttaagtttgagatataattactttatttaattatttctatataaccatcaaccatgcatcttttttcaaagtttattctttatatgctcttttgaattttgacattaacgtaacagaactaattaaccgaccctcaaccgtacttgatcttaatcgaaccggtttgggagattagggttaatttcgtcattttcgtttagtaccttctcctttttagcgtcttatgtagcatcgtcctctttctcttgaattcgtatttttgagttctcagatttcaaacacaaaagtttcgtctccgatttaatctttctacgtcttggtttatgaggtaagcttgtttcacaatctttcgttaggatttctgatgatgacgaatctaccaattttgtttctcgtggaaatttgattcagatctcatctcttccttcgattttgcattcttctgaatttgtttataatccttatagctattcattgttcttaattgaattagatttgtctcgaatctatgaattacggttgaaacgagacttgtttcgactgctagggtttcgtatgtatattcaggatg

SEQ ID NO: 17572 - DNA, 3000 bp, Unknown; identical to SEQ ID NO: 7958
  misc_feature (1)..( 3000): 2750-1469P.txt file - cDNA_ID_1809866; gDNA_ID_1621176; Annot_ID_57340

SEQ ID NO: 17573 - DNA, 3003 bp, Unknown
  misc_feature (1)..( 3003): 2750-1469P.txt file - cDNA_ID_1809923; gDNA_ID_2926130; Annot_ID_138718
agtatccatataacttttcattttggttatggatttttaattaagctgttaaactaaaaagtgaactattaaaacgaaagactaaataaaaaattgattaaagttgatctaaatacagtcagtaagtaccttatcaacttgttaagctgacagttaaaccacatgttgccattatggtccatactttctagggtttatgattgtctattacatcttccttaccattttatcattaggtctaaacttgttctttcgattaactaagaaaattataatcactttttagtctaacaactccggtccttcaacacaaaaaaaacaagaaaaagtgatgttcgtttcgcagttagtaacgacactaacacaatgtttttccttttcatagttttttttttttttttttggtcaaactagctttttataaatgattctactctccaacaatggagaaatggttcaacaagtacatcaaagaggctacaaaggccaaagaaaccactgctacaaatggcatacggaaagcacgaaagaaaaagatagaagcatacataacagttaagcaactaaagttgaagataccaatagtgctgaaacatgagatgagctttcggaaataagagagcacacatggtgatctgctgtccggagatgcaacatcctctagtggataaaacgcatcatgaaatacggctacgatagcataggcgacaaagcaccaacttcttgagcctacgagatgtgagaaaaacctcaatttcggagaggtgtggggttgcgaaaaccaccacttctcgatgaacaaatctggagtccaagacccaagatcatttcttgttaagacgtcatatgtcttttcctttatcctgcgtgaaatttcaagaaaccaaaccaaagaaacaataacatgaattgctcttaaccaaagtttttgaataacatcctcataatgaggtaagagaagcctaagcttatacagaatcaaaccaacctcatactgaggtaaaagaagctgaattcgaagtccaatcgaaaacaacacatcctcataatgaggtaagaacagcttgagcttaagcaagatcataacagcctcatactgaggtaaaaccagcctaaaactagtagaaatcatcacatcctcatggtgagggaactgaagtataaacgaaggcatgttccaaaagaaggtaaaaaattcaaagaaattactacctttcagagagacaaaaccttttgatagagtgactagaggatgagagaggtgtggaatagagaaccaaagctccaaacaagcgagaggaaatacttggtaccacgaactgcacacagcagtaatagatcgtaaagcaaaacccagatctagagggctcaaagcctgaacaagatctgatcctagatctgaagacctcaacagcaaaatcgagagaaaggagttggaagctccaacgagatagtctggtgggtctggagggtcgggaggttcagaaggagagaccaaactggtcaaatcttgcggtagagcacacggcggcggattcggagaagggaggagcaaaggtggagcaggagcccgagcaagcatcactaaagccatagaagaaaggaagaggagggagaaagaggaagattctcgccggtgggcgagaggccacaccaacggcggcaaggagaagaagaaaccctagtcgtcaagttgagagagaaaaaggggttttggattgacgatgtcccttttcatagttattaacaatatatatttaacatttttttgctcgatttacattcactcagtttttgacaaagattgatgcaacgcctaacaattttcattgctagattgcttttgaaatttgctcgttattattatcaccaacggctaccaaacaaacatgatttagtcattgttgttatcgataaataaaacaaacatgatttagtcattgttgtcagcttcaaaatttgcatcaaaaggagattgatccccggtctctgaaaagggtacagtcgcaagttaagcgagaaagatctcgcatggtccagtactctaacaaaataatagtccaattttgtatccttccaatatttccatcatccaaatatgattaggttgcccttatactagaatcagagagatacccactagatcaatcaaaatattaaagcggtcaaattttcactatttggatatacggttaatcagatcgttaacataaaaagatatagatttatttgactatcctgcttttcgcatagtggaccaaaatatcttgtaacttgagatccaaccaaattgtagtgttcgtttctaaacctatagttatttttagttatgattagcatgtttttttagttaacgctgcggcagtggcaactacggagtaaaacgacgtattatgaaaagtaacatttaagtaaaacgacaccaaaattgaaaataacagatttagatgattcgtagatgacagacgatgagttgcaacagcatcggatgagtcgctcaaatttaatagaagcaccttaatcttcattggcgttcatcatgtacgacagtttttctctcatcactgtacattcttctctctgcttaaatatttttctttttttttgccgctgccgctgcgttaagtaaaagaacttgaccgatgttaatggttaagagcggttttgtcgctataatactcgctacgagaaagaggattttgactgttgatgtgaagtacgatttattccaattgtgtgatacaacatcaatactacaatacaataataatcataaaaaaaggttttaaatttcaatgtttacaaattagaacgaaaattgcagttattgaaattccaataaccatataaaacaataaatgaccaaatttggcatattagaatattcggaaacttgcaagttcattatccacttgaagaagacttatccaaacactttctgacacacacttctgacattcacagatttttgtaggaacaaaataatcctaatactcacaaatg

SEQ ID NO: 17574 - DNA, 3000 bp, Unknown; identical to SEQ ID NO: 7965
  misc_feature (1)..( 3000): 2750-1469P.txt file - cDNA_ID_1809923; gDNA_ID_1621177; Annot_ID_57356

SEQ ID NO: 17575 - DNA, 3003 bp, Unknown
  misc_feature (1)..( 3003): 2750-1469P.txt file - cDNA_ID_1809975; gDNA_ID_2926129; Annot_ID_138707
cccttttaaaatcccttgtaaatatttttaaacccttttaaaatcccttgtaaatctttcagaacacttttaaaccctttaaaaatctttaaaaaatctttaaaaaacctttctaaatcttttaaaatcctttaaaatctcttgtaaatcttttaaaatccttttaaaacaattttaaaccctttaaaaatcttttaaaaacctttgcaaatcttttaaaacccttaaaaatcccttgtaaatcttttaaaacctttttaaaatcccttgtaaatctttttaaaacgttttcaaatgccttgtaaatcttttaaaagccttttaaaatcctttgtaaattttttaaaacccttttaaaatctcttgtaaatcttttaaaaccttttaaaatcccttgtaaatcttttaaaaccttttaaaattccttgtaaatcttttaaaacccttttaaaatcccttgtacaacttgtaattcattaacgaccgtggaagttgtactcaagaacagtgatcattttgtctttcattgacaaccacattgacccggctggttggttcccatgggatggcgagtttgcgctctccacattgtattatggagagtatgcgaatactggtcctggagcggatacgagcaagagagtgaattgcaagggatttaaagttattaaagactcaaaagaggccgaacaattcactgtggcgaagcttattcaaggaggattatggttgaaacccataggagttactttccaagagtggctttgattttaatgtctacttgttcttgtactttgtgttgtgtcacctctgttttagtttaatgtattttctgttttgttttgtatgacttacccaataaataacatgctctgtttcgcaagtattaggttaatgcatataatattttgaataactttaacactaactaattgaatattttcaatatataatcatactcgcactcatcagtcataacaccatcaatttaatttttttttatggggttattatatgtactagatgactaaaactttgagaatattttcatgaataatatgaattttgtttaagttgattacattatttatcaggaacagtagttaccaaaaataatagtttcatattaaattttacacgttggtcatataggggatccttgcttattgcattctgcatggcatgtcagcacagtgtatcagcatgtgatataattttactataagtagagcattcatcggtcgtaaattttcggaatattcagtgtatttattttctatttttttccgttttctattatttctgtatttctcaatacaataaaaattcaaactaaccaaaaattcagaaaagatcactatattatatataaaatcaattgccgcccaaaaagaaatctgttttacaatgaatataactgaacaattatacatatatctagcaaatctatcttttggcatttctaaattaataatctccattgaagagctgcaactttgtgcttgctaaaactttttcacctgcaacaaaatgagtattatgggagatttaaaaatcaacataggcatacaaaaatattccagaaagaagagagagacaataaggacaacaaattttgagtcatatcatatttgttgtgatgggctccatcccattgataaataccttaatcaaccgattgtcagctgaattcctcatgctaatacctaactatacaatattataattgccatatactggaaaactagcagattgcacaacaatatagaaaagacacaagcataagaaagaagcctacgcgacaattactacaacatctccatattgaatggtcttctgatatacaataccattccatgcgcgcagactgagactttgtaagtatgtgaagcatctcacgagagttctcagtcaaatgcaactcaacaaagaaatcataagaaagcattaaatattgaaagcattgagaagcaaattagttcatgaaccacatcacatcagcatcctggagaccaaaaaaggaagacaatgaatcactcaatagaagaactgataagtttttgctttcactgccaagagtgtaagaaacataccgcaaaaacagactactaaacccttttcaagaacaatccgaaggaaattgattcttctccacatcatttagcatccaaagcaatgaccaccatctttagttgcagctctacgcagcacatctaaagctttcttgttcttttaccaattctaaaaatctcaaagaagagatcgattccagatacaatagctgcataagattcattcaaagttgtcaaaattacagtaccatttttttacggaggaatgacaagttatgagagtgcttttattatatcttttcgggtaaacattgtaacgtagtgaaagttgagagtgaattgcctaacaaccgatagaatcaaccaaaaagaaaaaaagaacatcttttctaacgaccaaaaaaaaaacctaggggttttctatttattaggtgtatattgtcttttctagtactaaaacaataatggctaagtctcatcctcacacgtaagagattaaggttgagaatatattgtattgttgttagcataacctaaaatggatgaaaccaatttctaccaaattcatttttttttagccatttagagtacagtggaaaacaagtatttcaactaaagtactctaagacaattcttcttctatcttttatgagctgaaaattttggaccacttttcttttctgttctttgtggataataaaaccaaacttcactgaattatagcttcaattcacattgcactgaatttttagattgatctcaaaataaagtttttttcctaaatattgtcatttattgaatacaattaattaaatgtaaattgattaagttgctttgctttgtatataagaccaccatcgctccctcctctttcatcagttaagataatataaattcagtaattaagagagaagaaataaacacaaaaatg

SEQ ID NO: 17576 - DNA, 3000 bp, Unknown; identical to SEQ ID NO: 7974
  misc_feature (1)..( 3000): 2750-1469P.txt file - cDNA_ID_1809975; gDNA_ID_1621178; Annot_ID_57368

SEQ ID NO: 17577 - DNA, 3003 bp, Unknown; identical to SEQ ID NO: 15843
  misc_feature (1)..( 3003): 2750-1469P.txt file - cDNA_ID_1809987; gDNA_ID_2926129; Annot_ID_138710

SEQ ID NO: 17578 - DNA, 3000 bp, Unknown; identical to SEQ ID NO: 7972
  misc_feature (1)..( 3000): 2750-1469P.txt file - cDNA_ID_1809987; gDNA_ID_1621178; Annot_ID_57365

SEQ ID NO: 17579 - DNA, 3003 bp, Unknown
  misc_feature (1)..( 3003): 2750-1469P.txt file - cDNA_ID_1810002; gDNA_ID_2926129; Annot_ID_138704
agtggttttttttagagctttgtttgatattactagtatttccccatccgaaactaataattacccctataaccatggttcgtttccgaacaggagcacccaaaccacctttactcttttttagaaaatcaaaaaaattaaaccctaatattttgagatattttcgaccgattgttttttgtacccgttaagattttgcgatatctctccccttctccttagaaaccaaagaaattagcctcaaacatcattcccaatttaaaatcaattaatcgattttgttcttctttcattcttgtaacctttaagatatctcagattagagatgccgcctaagaccagtggattggcacgaaaaagaaagagagtaccgccagctaagaatgagagagataaggtaatggctgaggagcagtcaccgactcaaccggcggtaatgttgttgccggctccgccggctcgaacgacttcgacgacgacggttactacggctccaacgacagcgatagacgcgacggctccaacgatgcctcataagacgtgatgcttgaggatgatacgttttatgatgctttagagaaaattcccagaagaaatttaaaagaatgttctaacttgaatggtggatgagaatgaaagagaagcatgtgaaaaagaagaatcattgagtagtagccgaaccgtgggctctgattccaattcagaggagacgaatgcaaacgatgacctctcgtttgctaatcctgtggacgaggaggatgagagagacgatgaagtcatagtgaataaatccctagaggatgagagaggcacgaacgtcataggggaaaagctcgtggaggagaggaccgtaaacaaggacatcccaatggcgaatctcatggatattgtaagtattccaagtaaaatcccttgaattgggtaataatataattgtgaactgtggaaagtactagtaacaaaactgaaatactaggttgatatctaagaaatattgtcggaagtgggtaatactacaattgtgaattgtggaaaggactagtaacattggaaaatacttgcagattattgagatatacagaataatactgttaatgtgatttcatgtagtactggtagaacaatggtagtaaagataggctgcggatgggggtcctttatttcttaacaagcattattgtcgtgcttactaagaccggggagaagggcagtccagttgataatttctgtttaagggctgcaagtgatctgacgtttagtaagacttttccttggcggaggtattcctttgagttcatgttaaaaccgatctcacacacattggatcattttaatggtagtgtcccgaacattcagtcacattagcctgttcccgggttctgtattccacttgaggtaagttacatgttttatcattgttacaatttcgtgtttaatcgaagataacattaagatttgcatatatgattttgtgtagtttttagcattggaggcaattccatcacttagagaacaattcatagaaaaaaaggagggtgcatataccggttgttcaaggatgtgcaaggtgaatttcaaacggaccgagataaaagggtttactctagagcaaattaacaatgtcttggatacaactgaggttagtattcctagtattcctacagttaatatcaggattttatgtatttctaatattcattgtttattatgtccgtaggtcattgagagtataataaaacagaagttgaagaaatacctcttttggctcaaataacaggagtagaggatgatgttgataagcatgatgttgtagttgatagttggatgaggcgtattggtgaagggcgtgaaattagatttgaagaggtgtacaacgaggatgtgcagacccgtactaaagccccaactgaagaggaagttcccgcagttgttgggcccggacacctgacgcttgttgatttaatggagaagcttgatagcatcaatgacaagttgaatgaagcttttgtagctcttgcagatatgtagaaaaaacatgcaacgttcgaagattttatgaatgacatgaaagctaaggtaagattgggagataccggatatactataccatagtttgtaataccacgtaataggagtgacaattacttaatctgttttatagatgcctgcgaacccaccacaggagaatgatgcaacatccaaggacaagcctgctgctcctgttgtgaccaagcgagtgacccgttcaaaccgtccaagctctagtttaatgtaaaaactaatcctataacccgggccttattttgatttcttgtactttgaatgtggtttcagattttgtaataactcgtaatactatgtttggatttattaatgtattaagattttatatgatggaattatattgaaatccaggaaataccttgtaatactacgtttgagagaaatccgagaaatacctcgtgctaccactacaagaaaacagacaaacaacgactacagaaagcgacaacagatgtagtcgtcgtttttggcgactacgtcacgtccgttttacgacgcatatacgacaacatgaacattagtagtcaattagtcgttattttacgactaaatatgttagtcggcatatactcgtatagtaacgactatttaacgattatattatagaagaaaaacgtttgtcgttacatagtcgcaaatggacgacaacattttccgactgcggttgttagtcgcccaatcggcgactaacatacgacacatatctgtaatcgtaaaatagtcgcaactgagtcgcagaatagtcgcattaagttgttggaaaacgttttccgcattgccaagttggtacacctaatttgtttgttgtagtcgtaaattagttataaaaattcgtctatataatcaaaattcacgacactcttctttcgcaaacaaatcaaaacaacaatcaaaagaaaaaaaaaagaaaacaatagaaatttagtttattctataatg

SEQ ID NO: 17580 - DNA, 3003 bp, Unknown; identical to SEQ ID NO: 17579
  misc_feature (1)..( 3003): 2750-1469P.txt file - cDNA_ID_1810002; gDNA_ID_1621180; Annot_ID_57374

SEQ ID NO: 17581 - DNA, 3003 bp, Unknown; identical to SEQ ID NO: 16044
  misc_feature (1)..( 3003): 2750-1469P.txt file - cDNA_ID_1810035; gDNA_ID_2926130; Annot_ID_138735

SEQ ID NO: 17582 - DNA, 3000 bp, Unknown; identical to SEQ ID NO: 7996
  misc_feature (1)..( 3000): 2750-1469P.txt file - cDNA_ID_1810035; gDNA_ID_1621181; Annot_ID_57384

SEQ ID NO: 17583 - DNA, 3003 bp, Unknown
  misc_feature (1)..( 3003): 2750-1469P.txt file - cDNA_ID_1810069; gDNA_ID_1621182; Annot_ID_57404
acacggtgcaggactacttggcatcctccaatggaccggtatttcattgatctgatgttggaccaagcgaggagaggaaaccagattgaaggtgttttcaggaaacaagcatggactgagatggttaatctcttcaatgcgaaatttgagtctaactttgatgttgatgtgttgaagaaccggtataagtctctgagaagacagttcaacgcgatcaagagtattcttcgatcagatgggtttgcttgggataatgagcgtcaaatggttacagctgataataatgtatggcaagactatataaaggtaacttaatcgctctgatctatgctgtgtggttagttacagtgttttcgtctctgttttgatgtgtgttcttgtctgaattaatcacaggctcatagagatgcaaggcaatttatgactcggccaattccgtactataaagatctgtgtgtgctctgtggcgattctgggatcgaagaaaacgaatgctttgtagctatggattggtttgaccctgaaactgaattccaagaatttaagtccagtggtactacagatttgtctatttcagctgaggaagaagatagcaactctcttttgtttgaccccaagaacaaaagagatcaacttgctaatactgatacaagccctataaacccgaaaaagcctcgagttgatgaaacccaaaccatgtcaatagaggacacggttgaggctattcaagcgttaccagacatggacgatgaacttatattggatgcttgtgatctgcttgaagataaactcaaggcgaaaactttcttggctctagatgtgaaactacgcaagaagtggttgttaaggaaactccgacctcaagtgacttgaggattatgagctgtaaagaagcaaagtagaagtttgacgataaacagaagctcattggcttatactacagagtacagactactttgcgagagtttcatatacaaagacttatgctcttagaagttgtaaatgtgatcaaatatggctgatgatattaaaccttgtacaaactctctcttctttgccttctctagtagctctgtatctgacaagggagacggcgattcccagtctctgagcacacagaaatacgaaatgtatctttagacaaggtttaagaagatgagataaagcaagcagaatcaagaaaatgtcaaagaattacttacttttctgttgaatcccttattaagctattgtcttccatgcttgcttcactagatgaatcaggttgtacaagcttggacttctttggtgacggcggattgtatataaatgataataatgggtccagaacacttttagatgtatgattagtagacaacggctcatcgattagagactgtaagtatttcctagtccctggagaaaatgctgaatatgactcatccttgtaaagtctctgcttttgttcaaggtaagtattcgtcaaggaacacaaatgtcagataaccgatataaaacataccaagatatagaataagcacaaaaagacttacaagttttctactaaatggtaacgaaagcaagaagagtaaataaaaaaggataccttgaagacatctctatgctgagtggtaatgtgatcaaccatatgcatcttcactcgtctgctacaaaccggacatatctacatcacaaccaaagctgaatttgtgagaagttattacattcatcatcaccaaaagactgttttcatttctcacaccaaacacttcacaactacaaaatggttcctcatagcatcaagcaaataatccaagtgaactaaaatccaagaagtccctaccaactctccttacagaatcacaatcctgcctactaaagtaaccattagagtacaacaatgaacatcacacgataaatagtctaaatttacaactaactgcttcatgtaaaaactcaaatgtatagtttaaagaacagtaactgatttgggagatggatacgagttgcaattaccccattgttggcgtctagttgatgctcctcatcgatatggtgacacaattcaactaaatcataatcatctgagcaaaacgggcatggataatccactgccatttcatcatcatcttcaaactcaatacatgaacctaaacaaaaatttcaccatcacaaaacttttatcaattacataacataaagtttacccataaagtgacaaaatttaaactcactagaccttaagggccaaaagaattgaaatttgataaagaaattaaaaccacctgcatataaagcataaaccctaaaacaaagctaaatgcaattgggaaaaagaatggatctttacactaacccgactgatacttggcaagttcttctaatcgatatttcttcgacgaatcaaacccacaaatgcccaacaaatcttcttccattttgattctgaatccacacgaacttgaattgaaaaatctcagataataattaaaggagcatattcttcctccgtgtatttattagcatctgtcagtactttgttcagcctgaaagtgcgaggaaacacaccaaaaaggcaagacctttaaatgtggtctttttctctggcgacatgagggaatccatggacacgaatctattgagctaaatccaatgaccaaactacccctaaccggtcactatagcctcttttaccctgaaccaccaacgtccctctgttgacttttagccgccacgaatctacgggcattttcgtctttgcgccaccgtcttaaaacgtgtgctccacacacttatattgaccctatcgcgcaagtggactataagcccaatatataaatgggcctaaaaaggcccaaatacttctccttcgttgctaagtctgtaacacgcgctaatgagaaacgattttgcgattcagattcgtttgcttttgccgacgacaaaagctccgattttgtttattttctccgggaaattttactttcgagattctgttgagaatcaattgatttggtattgatg

SEQ ID NO: 17584 - DNA, 3003 bp, Unknown
  misc_feature (1)..( 3003): 2750-1469P.txt file - cDNA_ID_1810073; gDNA_ID_1621182; Annot_ID_57402
aggaaatagaggatcctaagttgtctgactgtatagttgaacccagacaaactcttccttgtaacttaagctcgagtcacacgagttctcacaagtgtacaccacgattgttgcccaatcgagagattccctctcgttcttcccaccgaagaagaacagtagctgcggcatcacctgataaaaccgccatcgaaatgatcaagaacagagccaagcttccaatatgcaagaacagagaaatgaaatggggaaaattgtgtgttttattggtttaaagttgatttgattcagctaaaattgttggccaattcttgactggtttataaaataagcaaaagaagtgactaagaccaagctaatacaagtttataaagaagagaagaaagaattacctgaaattcaaaacaacgaggaccaccacaagatttgcaactgggaagctcagatttagagactcgtccgcttgctattggccaaaggggtttagcaccagagctccgggaatatctgtatcaatacgtatttcacaaatcgatgttatgggagaatcaagatcaaaagtatgcagaaaatcataagcgtttgaatcacacctcagaacttgttcaggggctttgtctacgcgttgctggaaattaacccaattctttttatcagcatctccctgtacaagcatggaaaatgagaatcatttgaggccttttgaagtttgcaaaaatggccatgacaagtgaactgtttacctcaaaatcgttcattagcgatttcatttggtcgtcaacttctctctttgagaccaaaggtttagctacttcatcatctcctgacatctcagtatcatactcactttcatcctcattgatcaatacaaattctttccataaactcttactcgcaactgcacaaaccgaaaaattcatatcactagttatacaaagtttcagggctaggaaaagtttgtgaattcagctaacctttctgcttttcagttggagcaaccccattattgacagggcctgagtcagatgtttcgctaaccgttcgaagctgttggcattcggttttatgacccaagcgccaatgcagggcctggaaattagaaacaacacagattgttcaaatttgctcaaaagagcagaatctagcggaacaaaagaaactacgatgcacatatgcacacacctggtgtttcggtgaacagtatcgagcatttttgcagccgctacatagtttatctcctttccatgttccacaccaagtgcaaagcggagctaaagtgaaacaaacaatatcaagaattgacaattaaaagagaattctcggcattcagtcaaacccatcaatcagttcataatacctccatgacccaatggcttgtctgttccatcgtgctttggagcctcactcgagtaaaaaggattagctcgaggcaattggcaacggaaaaccttcgtacttcaggaacaaaaaaaacagtactttagtgtaacaacccacttggagaggagacaaacaatacaaagatgcaatatatagtaagaggtttctttctacctccgcatagccttctctggggcacgtttccattgttcatgttgatcacgaaggagacaagacatagatggacacatgaagagaaacaatgtccgatgaaaagctgattccttgtctgttaaaggagcataaagctgccaaatttccacaacaaatttcataaataaaccgacaaaaaacatgcaagaaacaacaaaatagtttgtatgaaacttacttgaagtacaaattgcataggttcttcacatagatcacatagaattgacttccctgatggtaaattaactggatccaaccatgcctatattgacaaatatcaacccaaagaatcaatacctaagaacataaagaagaaacagtttttgattgcacaaattgaaagatgttttaacttagtaccggaacaccaccagctaaattagggaacagttgacgaagatttgaccatgcgaatttaggactctcaacgaaacctaacatcacaggttcataatcttcatcatcttcctcatcatcatcatcaaattcatccatatttataggttccaccgcagtttcatcatcgtcatcatcatcaagctgagttattcggaggcctttgaaatcatccatggagtctccgttgaagctactcatcgaatcttctgtgttgaatttgatgaaatgaagactgcataacagagcaaaggaattgaattctagggttttactctgtttcataaacctctcaaaagtatttggcaagaaacaacgcacaaatcataatctgttaatgggtctttcgcaaaatactaaactcactaatttttcaagatttagagctcaatactcagctaattacaaatcccagaattggtacgaacaaatgttaaaaatgagctcactagtcagtatcaacaagaatcaaaatccaaaagaaacttacaacaccaggcgatgatggagatgttcttcagatagcctttaaaggtcgaatcttcttctatcaatttaaacagcaaaattttgtaaacatctttcacgaagacgaagacgaagacgacgacgacgacgacgacgaaaggaaaacaaacgtcactctggcccaaaaacaaaccctagaatagacgatgtcgtttaacataggcctataatagactaagcccaataaagtaatataagcccataaaggtttctaaattggttacgaataaaagtataaccttatcccggacaaccttatccttaaaatctcaccggtactccaactcccgttcaccggagctctgactctctgtaagcgaagattctctgctctttagctaatttagtcgaatctctattatgggtctgatccagtttcttacgagaatctgatttctgattttataacttgatttctcgatttcaaatttgtgttcttgcaatcgatttttttgcaggtaaagaagaagggagaaatagataatg

SEQ ID NO: 17585 - DNA, 3000 bp, Unknown; identical to SEQ ID NO: 6270
  misc_feature (1)..( 3000): 2750-1469P.txt file - cDNA_ID_1810073; gDNA_ID_1621085; Annot_ID_55376

SEQ ID NO: 17586 - DNA, 3000 bp, Unknown; identical to SEQ ID NO: 6257
  misc_feature (1)..( 3000): 2750-1469P.txt file - cDNA_ID_1810073; gDNA_ID_1621085; Annot_ID_170514

SEQ ID NO: 17587 - DNA, 3000 bp, Unknown; identical to SEQ ID NO: 6270
  misc_feature (1)..( 3000): 2750-1469P.txt file - cDNA_ID_1810073; gDNA_ID_2926183; Annot_ID_140638

SEQ ID NO: 17588 - DNA, 3000 bp, Unknown; identical to SEQ ID NO: 6257
  misc_feature (1)..( 3000): 2750-1469P.txt file - cDNA_ID_1810073; gDNA_ID_2926183; Annot_ID_200391

SEQ ID NO: 17589 - DNA, 3000 bp, Unknown; identical to SEQ ID NO: 8008
  misc_feature (1)..( 3000): 2750-1469P.txt file - cDNA_ID_1810080; gDNA_ID_1621182; Annot_ID_57398

SEQ ID NO: 17590 - DNA, 3003 bp, Unknown
  misc_feature (1)..( 3003): 2750-1469P.txt file - cDNA_ID_1810080; gDNA_ID_2926183; Annot_ID_140642
ttttcttcttcttcttcgtcacgtaattcaactagtttaacaaacagactcaaaaccatcttcaaaaaagctgaagagctttcgattctctgtgctattgacgtttgcgtcatctattacggaccagacggtgaactgagaacatggcctaaggagagaaatacagtgaaagacatggcttcgagatataaagaggccacaaaacgcaagaagagtctcaatcttcatgacttcatcgagaaggagaaggacaaggacaaagacaaagacaaatgacaaggggaagacgaattcgaaaaagaagaattatgtgaagaattggtatcctgactttgatcattactctcctcaacaactctctcaattgattcattccttagaacggactctttctactctgcaagaaaggcttcgtattgttgagtcgcagaaacaacaaaacaaaaacttggtgcatcagagtttaacaccatcgtatctgaaccagatccaacacttgaatcctagcaacttctcgccgtatatgtacaaccatggagatgctgctactctctcacaactcccactgtctgcttcactctccaatcaactccaattacctgaatcacttgatgcggcatggttttggtcagaacatgtgtttggacaacatcaccaacaacaacaactttcaacatcctggcgtgtcaaacacacaagaatactcaccgtttctttcggtacaagcatctgcagtgaataactacgggttgaataatcacttgatgcagcgacaggatcagcttcatggttttgatcagaacatgtgtatgatgagtgaaatcatcaacaaaaacaacgttctacaatatcctaatctctcaaacacggttccacatgaattctcttctggtttcaaccagaacacttatggtaatgctgtcggtaacactagcttctctcaagacatgttttcaagctatgatccgagcagtctgcttcacacatcttctctgccacctctccacaacaattctaacagttattgtttttctgacaactcaagacttctctgctaacaaatctgtctaaaagaaaaaacattgaagcttccttaagagtcagtcaattgtgaagtagcaagcggatcagagagagattgaagctgtttttgcttctaaattccttctgccacgttttttttcttgtttttttaagtatttctataatgaaacagatctatttgtggagattttgctttgaattttaagttgatttttttttcagtagtattcatatatatatgaacttccataaaaatctttcacaaaaacttgcatgaaacaaattataatctaaaaacattgatggtgacaagactgtttcaattgctataagttgatacaagctgcaaagtcaaattatataactcttgcatctaagaaacttgcaacttagtatccgtcttgtctgaatcagctgatacaaggagatggagattagctctgagttcgtacaaacaaggcttgtaccacaaacaaagaaaacccctaaatcaaggaaactgaaactgcgtagtcttgtttaccagaaggaggattatcatacacccaaagcagagacacaataatcgaccacaaacacaatcaatcctttagcaaacagataaagatgacaaatcacccaaaagctgaagaacactcctccaacaagcttactcgaatgcagaaaacggactgtacatatgaagatgagaacttgatgttcacattttctagtatacaaggtaaaggcaacgataactatagcctctgcattgttggccaataaggagaatttgtccgtttgtaaattcaaaaggaacgtctggaagctgcactagggagcagagaaagaacaagcaatgtagatctaaggagattagatcataaggggtgagagaaactgtaaagtataactgtatatgctttggggtagtttttcaagtagtacatgatggagagtgagtctttagctagagaaaagttttagacgttcactagtattatcctgtaatcaccctctttctccttcgttgtgaacaaatacttgtgtgctcctcttcttcctattctgctctgttatttcctctacttctttatatcttgcttactctgtttccgtgagttggtgtggatggcaaaggtttaagcttgatgtgttgtagagtttaacaaaacctaagagtatctccatcaaggagaaacccaaaaagtttctcgaacaagaaaaatattagtattttattataattttattatatgattaaatttttattttagtgtaaaaattgaatcaattaaaagaagagaaatgtaatgatggcttgtagagagtatctcatagtttctcacttgagaaactttctacactctctcttctctttttattatttctgttattttaatagtgaaaaactctcttgagagattaccaatgtagatggtctaacaatacatagtctttgcaagccccagcgcaattgcaatcaaattcaccattatgattgttcatggatgaaccatcaaaaagcttcatatcacaacatccaaaaaatcatccataaaataataaattatttagactaaaatatataattattttagacccaaacatacaacaatttttagtatttttacccattgtgatttagatcaaaactacacatcccaaaataaaaccatggtaggcccatcattgactatgtacaaatgtgcgttgacctttttctcgtatcacacaattctctccgaacccaccaaattaagaaacatggcaaaaactaggaataacctaaaaatagaatgaaagaggaagaaaagaacttaaaaatagaataacagatgtaaaagaagagttggataaaaaatagaatcaacccaaaaatacatttctcaaagctctttaaataaccaattttcaatttgtttgtaacaattaataaccacgagaagagaagttgagaaagaaaaaatagtaacgatg

SEQ ID NO: 17591 - DNA, 3000 bp, Unknown; identical to SEQ ID NO: 8000
  misc_feature (1)..( 3000): 2750-1469P.txt file - cDNA_ID_1810086; gDNA_ID_1621182; Annot_ID_57396

SEQ ID NO: 17592 - DNA, 3003 bp, Unknown
  misc_feature (1)..( 3003): 2750-1469P.txt file - cDNA_ID_1810090; gDNA_ID_1621182; Annot_ID_57395
aacatcaacggctgcgaacaaagtgaaaaacttacaattttcagcagtttcataacatctttaattagcaactaaagaggttttataggaaacttacatgacctttgtacttatgaactctaaggaaatcaagcagaggctccaagcaatctttgttacggaacataacagaagacaagtgacgattcagaaactgaactccattaccaatcgaagacgaacgagaaggacgtggcacgtttgcgttaaagggctcgaaatcaagctcaagacaaaaagggtcactattaggtccatcaacgagttcttctttgaaacgaagatactcagagactgttaattgttcaacacttagctcgaagacattaacacgaacatattcccaaacaccaggtcttggtctaacggctaacgcaacaaaaggtggtacaactatagcttcctacaccaaaattaacaatctattattagtttcaagatgaattttgaagaagaggaaaagttttttttaccattgctgatttaaggatctctccaaaaggaccatcagagagactcttctttgtttcatcgtctccgataacagattcgagttcgtcaattaagttatgtggttgaagaatccctttcccctgatccacataccttcacaaaaccaataagaaactaaattaaaaagaaacgagctttgccgggagaaagaaacaggggaataaggatcttgacgacgaacctggagagaagagcaacgagttcgttgcggtgagcggaaagcgtgtcttgcacgcgatcccttgtgcttagaaccctagtgagcttagggtttgccatgaatattcagatgatcactaaaaccctagaatcctagtccgagaaaagtttggtttttcgaatcaccaacgattgctactaaaaggaaaaatcattgattaaaagggtaaaaagcagagtgattctggaattttaggcgacaaagagagagagagaaaagaagacgtgtttgatcttctctttttcttgatactgttttcgctacaagtgacgtgtttatgttagaggagagtacatgtgactctgagagtgtatgtattttattatataaatgaaagcagtcacagtttaaaggaaaagtaaagcagtggaggctccggtgtcgtctcttttgctctgctttgaaagcggtttcaacgagataatcagagcaagaagacaactggtgctctgctttctcgccacgtagtttctagagaaaaaaatgatttttgattttttgcatgatttcatgaaaaggaatgaataaccgatcaaataatatttttaattcctaaacagatgtgtgaatcaaaattttgatggatctcttctgagttacttttaatatgtttgggcctacgtgaaccttattgggcctctaatctatataaattacttttattgtatctaaagagaaaaaatcagaatatgttttggtcttttgggcctttttggtaagctgagcacaattgtgcattttagtaatttaggagattcgctcggatctacattgaattgttcggaagaaagaagaaggaattgtttggatctttgggaatgttaaaacaggctatttgggcccaatctagcccagtccaacacatcgaagcacacaagttgctaaattggtccgattagtcttagagcttgattggttctccctctgtcacccgcaaacgctgcgtttgcgggtggtagcagttgttagcgtttgacaccaatcataaaaaccgttagataccgctttggaccgctcgaaatcgccatattttaaaagttccttcccgcaagcgtttgcggttgcgggcggtagcggttaggttaatttttttttttaattaactaaaataattatgtcttccacccaaaccctatatatcttattcttatcagaaaatcctaatcaatatattgaaaccctattctctcaattatggcatctacccaaactaacgaaaatcaaaatcaaaatcaagaatcaaacgtaagtatgatctatcctttcatccattcattagctagtgtaattctctgagtattttatggcatcgtcattttatttattttgtatttttttgagttttttgattgaatacatgttttgatttgttttctcgattagaaaattatttggtcagacgagatgacccgtttcttgttagaactttatcatatgtatagaggcaatccggaaaacccacgagttcaacgttatttacagtttattacactacttgatgcaatttttggtgatgtaccaaatgcataaagtactaagctttttcttacaaaatttatttatttttgaatttaatgttttatttatggttttaattattaagcatgtttaatttttctaatattatcaatttatcataataatatattgtatttttttcttttactagtaatatattatatttattttggttattttttatttaattactatcgcacccgctggtttaccaatcataaaactcccgcaaacgcactcattatcaaacgctcaaccagtcgttcaaaacacttgataacgcttgaaaccgcaaccgcctgtttccgcaaactcccgcaaccgcaaccgcatccgctgcgtttaaaccagtcaggcccttatttgttagagacatccgaacttttaaaagttaaaactgatatgcttgtccatccataatgttagaaccgtctttggaattggtaatccacacactataatgcgactcacgtcgggacaataacactattgtctaccgtgcatacacgttgttcttatttcaagttttgtttggttttactattacaagttgctcgttttcttattagttaatgtacactaaaccaaataatttaattagaaaattaaccttctttttcaacgcaattaatctataaaacccaatagttagttttcaaaaaacttcacttgcttaagcaacatataaacaaagcaagcaaaaaaaaaaaatg

SEQ ID NO: 17593 - DNA, 3003 bp, Unknown; identical to SEQ ID NO: 17592
  misc_feature (1)..( 3003): 2750-1469P.txt file - cDNA_ID_1810090; gDNA_ID_1621182; Annot_ID_174311

SEQ ID NO: 17594 - DNA, 3000 bp, Unknown
  misc_feature (1)..( 3000): 2750-1469P.txt file - cDNA_ID_1810090; gDNA_ID_2926183; Annot_ID_140643
atcaacggctgcgaacaaagtgaaaaacttacaattttcagcagtttcataacatctttaattagcaactaaagaggttttataggaaacttacatgacctttgtacttatgaactctaaggaaatcaagcagaggctccaagcaatctttgttacggaacataacagaagacaagtgacgattcagaaactgaactccattaccaatcgaagacgaacgagaaggacgtggcacgtttgcgttaaagggctcgaaatcaagctcaagacaaaaagggtcactattaggtccatcaacgagttcttctttgaaacgaagatactcagagactgttaattgttcaacacttagctcgaagacattaacacgaacatattcccaaacaccaggtcttggtctaacggctaacgcaacaaaaggtggtacaactatagcttcctacaccaaaattaacaatctattattagtttcaagatgaattttgaagaagaggaaaagttttttttaccattgctgatttaaggatctctccaaaaggaccatcagagagactcttctttgtttcatcgtctccgataacagattcgagttcgtcaattaagttatgtggttgaagaatccctttcccctgatccacataccttcacaaaaccaataagaaactaaattaaaaagaaacgagctttgccgggagaaagaaacaggggaataaggatcttgacgacgaacctggagagaagagcaacgagttcgttgcggtgagcggaaagcgtgtcttgcacgcgatcccttgtgcttagaaccctagtgagcttagggtttgccatgaatattcagatgatcactaaaaccctagaatcctagtccgagaaaagtttggtttttcgaatcaccaacgattgctactaaaaggaaaaatcattgattaaaagggtaaaaagcagagtgattctggaattttaggcgacaaagagagagagagaaaagaagacgtgtttgatcttctctttttcttgatactgttttcgctacaagtgacgtgtttatgttagaggagagtacatgtgactctgagagtgtatgtattttattatataaatgaaagcagtcacagtttaaaggaaaagtaaagcagtggaggctccggtgtcgtctcttttgctctgctttgaaagcggtttcaacgagataatcagagcaagaagacaactggtgctctgctttctcgccacgtagtttctagagaaaaaaatgatttttgattttttgcatgatttcatgaaaaggaatgaataaccgatcaaataatatttttaattcctaaacagatgtgtgaatcaaaattttgatggatctcttctgagttacttttaatatgtttgggcctacgtgaaccttattgggcctctaatctatataaattacttttattgtatctaaagagaaaaaatcagaatatgttttggtcttttgggcctttttggtaagctgagcacaattgtgcattttagtaatttaggagattcgctcggatctacattgaattgttcggaagaaagaagaaggaattgtttggatctttgggaatgttaaaacaggctatttgggcccaatctagcccagtccaacacatcgaagcacacaagttgctaaattggtccgattagtcttagagcttgattggttctccctctgtcacccgcaaacgctgcgtttgcgggtggtagcagttgttagcgtttgacaccaatcataaaaaccgttagataccgctttggaccgctcgaaatcgccatattttaaaagttccttcccgcaagcgtttgcggttgcgggcggtagcggttaggttaatttttttttttaattaactaaaataattatgtcttccacccaaaccctatatatcttattcttatcagaaaatcctaatcaatatattgaaaccctattctctcaattatggcatctacccaaactaacgaaaatcaaaatcaaaatcaagaatcaaacgtaagtatgatctatcctttcatccattcattagctagtgtaattctctgagtattttatggcatcgtcattttatttattttgtatttttttgagttttttgattgaatacatgttttgatttgttttctcgattagaaaattatttggtcagacgagatgacccgtttcttgttagaactttatcatatgtatagaggcaatccggaaaacccacgagttcaacgttatttacagtttattacactacttgatgcaatttttggtgatgtaccaaatgcataaagtactaagctttttcttacaaaatttatttatttttgaatttaatgttttatttatggttttaattattaagcatgtttaatttttctaatattatcaatttatcataataatatattgtatttttttcttttactagtaatatattatatttattttggttattttttatttaattactatcgcacccgctggtttaccaatcataaaactcccgcaaacgcactcattatcaaacgctcaaccagtcgttcaaaacacttgataacgcttgaaaccgcaaccgcctgtttccgcaaactcccgcaaccgcaaccgcatccgctgcgtttaaaccagtcaggcccttatttgttagagacatccgaacttttaaaagttaaaactgatatgcttgtccatccataatgttagaaccgtctttggaattggtaatccacacactataatgcgactcacgtcgggacaataacactattgtctaccgtgcatacacgttgttcttatttcaagttttgtttggttttactattacaagttgctcgttttcttattagttaatgtacactaaaccaaataatttaattagaaaattaaccttctttttcaacgcaattaatctataaaacccaatagttagttttcaaaaaacttcacttgcttaagcaacatataaacaaagcaagcaaaaaaaaaaaatg

SEQ ID NO: 17595 - DNA, 3000 bp, Unknown; identical to SEQ ID NO: 17594
  misc_feature (1)..( 3000): 2750-1469P.txt file - cDNA_ID_1810090; gDNA_ID_2926183; Annot_ID_200398

SEQ ID NO: 17596 - DNA, 3000 bp, Unknown; identical to SEQ ID NO: 7998
  misc_feature (1)..( 3000): 2750-1469P.txt file - cDNA_ID_1810092; gDNA_ID_1621182; Annot_ID_57394

SEQ ID NO: 17597 - DNA, 3000 bp, Unknown; identical to SEQ ID NO: 8025
  misc_feature (1)..( 3000): 2750-1469P.txt file - cDNA_ID_1810115; gDNA_ID_1621183; Annot_ID_57417

SEQ ID NO: 17598 - DNA, 3000 bp, Unknown; identical to SEQ ID NO: 8017
  misc_feature (1)..( 3000): 2750-1469P.txt file - cDNA_ID_1810125; gDNA_ID_1621183; Annot_ID_57413

SEQ ID NO: 17599 - DNA, 3000 bp, Unknown; identical to SEQ ID NO: 8017
  misc_feature (1)..( 3000): 2750-1469P.txt file - cDNA_ID_1810125; gDNA_ID_1621183; Annot_ID_174334

SEQ ID NO: 17600 - DNA, 3000 bp, Unknown; identical to SEQ ID NO: 8018
  misc_feature (1)..( 3000): 2750-1469P.txt file - cDNA_ID_1810129; gDNA_ID_1621183; Annot_ID_57412

SEQ ID NO: 17601 - DNA, 3003 bp, Unknown
  misc_feature (1)..( 3003): 2750-1469P.txt file - cDNA_ID_1810137; gDNA_ID_1621183; Annot_ID_57408
gagttaccagtaattagaaaactttgcaaaaaccaaaaaagaaaaagagtgattagccaaatgcactttcaaatagaaaatcaacaaaatacgcaaatatagaggtttaccatatatgtaaaaaaacatctgaaaaaagttcgtcacaataaagagaaaattttggacaatagagatattgacggagtacatgtatgtgatattgttgcaaaaggatagcctcaaactcatattcataggaaaagaccacaaactttatttgttatgaatccatttagttacaacgtcatgttaagtagattcttaaaaaactatagaagtaattattatcctaaatagtatcaacataagacaacatattcgattgagataatagttggggcagtccgtagtcgtcagagaaagattaacatcacatacttttttggcttatcgttcacttttcattttaagtggtagttgggttttacactttatatattgaacctagataacaactgttgtgaattctctgtttttgattcgaccctcttttgaaccatggttatataattgttctcgacagacctcaagatttttttgttttaaactgattacaaaaatcttatatacacatgcacatagtaaagtctaaaccaaagcaatataatagatataaatgttcagtcagagtttctattatcaatcttgcaaagaaatgaaaatatctttcgatagatgaagattaagattcagacaataacatgcaacctttttctttccccccaaaaacacatcgatcacccaccatcaatccatcatggatcgatcatccatttagggacctatttacgtttgattttttttttcctataactttctttaataaggacaacaaggccaagatcttcatcgtgtgtttcgtgtgtctcaaaatccctctaaactttttattgtagtttggtgagacttgtttggtggtgctgatgatgatgagagagagagagagagagagcgcgcgaggaaatcatggctggtaaacagaagaagagacatgatgattactgattgaaatattatatatgtacaccattgaaataagttataaaagtgtcgtaaatcgtcaaaagaatcagtagtatatatctactctatatgatctatatacaccattcatatataaaagaatcacaagtatgttattgaggatgtgtgtcaatgaagccctacgagaaaggtctgtgcactaccaaaaaagagacacatagtttgtttgagtttttttattgggttcatttgttaaatttatatccataaatacctccttgaggtatagccgtacagggtttttttgcagttcaagatatggcatttgtatgaaacttatatacccgccaaaaaaaacatacctaggtcacccgtgggtattttttgattgggacaaactggctgtagggaaagaaaaaacagacaacgttaggtgccttgtctctcaaatcacttatcaggactcaggagcaataatttgttcgaaccaattgtacgttgtaacatctaaatgggtccataacaatcagataataaaattttatcatctttcttaatttatttatttccaaataactttctttatcatgtttcttaattacgttgatgcatgtttagatagccgaaacaaatcactattactttgattcttattatttatttatcaatttctggattcatgacatttgaaaaactaaatgatgtattactgtgcatttgcaattcaatcgatcttaaagtcttaaaatcaactagacgataaaacggtctatttccctatagaactagatatatatactatgcattgtgatatagaattaagagattactgtttctttggatgtatgatcttttatcagaataaacttcttattttgtcttcagaaataatcttgacttcgatcaatcattatttcgtaagcgataaaaacttctgattatctaccaaaaaatgatttcaatatattgtgacattgttgcaatacgataaccacaaactcatattcatagggaaatgttttaacaaactttgttacaaattcatctacttacaacgtgatgctcaatcattgatatacattataaaaagaattattatcttaaaatagtatcaacataagacaacatgctcgatcgagataatacatgtgccagcgcagtccatagtcgtcagaaaaagatcaacatcaaatactttttaggcttatcgcgcacttttcactttaagaggttattgtgattacactttacgtattgaacctaaatatcaatttcacagttggaagtttacaaaaataatgccagtgtcgatcctaggatgatgcgaaaccaaaagatgatgttacatatatatacacatgcacatttagtattctggttatcaagataaggatgaaaagactaattaaaccaaagcagtgtctatgacattgcaagcattctccaacccataagacaaaattgattctacaaactttcatatcatcagaatctatgaaatgaatcaacaactatcacatctcagcagcaaagttaaaggactttccacatgatctatatttataagggtatcgttaagatcttctcacatgtgtggcacgtgacatatttaatattcttgatgggcttttctgttttttatgggccttttcgaatttcagggttttaaataagttagaaattagataaataaaaaacaaattagcaaaaaataacgaagtgtctcgtctcttctctcttgtcttctccagatcagtgtttgtggggttttcccaatggagcttcttctctcattgtctctcctcctggggttttggtgtaacaacaatcctcaattcacgaggcatgaatcattattctccccatttgcttattctctggctagaatccccagattttactgtatcgactttgggaatttaactggagaaccatttccactcaaactgggaaacaaaaacctgttattgaacaatg

SEQ ID NO: 17602 - DNA, 3003 bp, Unknown
  misc_feature (1)..( 3003): 2750-1469P.txt file - cDNA_ID_1810155; gDNA_ID_1621184; Annot_ID_57424
aaagacttttgtcacaaaataaagtttcaggaggccgtgtcactctttgattcaatggcctacatgggattcaaacctaagattgtcatatgcaacattgtgactaatggtgtttgcaaaaacagagatctggataacactagattgctttttcatttttttataaatgattttattttgcttttcgttattaaaactatctaaatttaaagacgtttaatataaatggtttagtaactgtttaaatagtctttttattgggtttagttcaaaaaccgattaaaccaagtttatggagaaataagttccgaactatcgatttggggagatataagttgggaaatttagtttccgggaggggggggggagggataatggcctatttggtacgttgtaatactttttgtggagaaatatactatgttgtttttctatttcttcactaaagtttttacttttttattctctggattttttttctgtttttatttccttcacgttgtccccatgaaaaaaacaattattttttccacacaaattaattttgagtgaagtttctagctactctcaacagcatttctcttgatatttgatagttctactcttttttttatcttgatcaagaattggaagaaaaatgctcagtggtaatggttcgatccatatcgaacaataatatgattaataaaattacaatttctttttaaatcaaatgagctttttctaaaattctatattttattccaaaatcaaataattttttttccaggaattgattaattgcttaacccatacaagagcaaattgaggagaaagatgagaagatgatgaagagaaaagatagttgagcaatggaggaagaagaagttgttctatgaagaagaagaggaagtgttgtgaagaagaagaattatgactttagtcacaattggattaagaggctattggggtagaagataagtaaagcccaaatagaagttggtttgttttgtttaatagaaagttgaagcaccagtgatgtagattggagagaagaagcgtctaatgtattgagcttatatttttctaatttgttttttttggcccatctctaacttaacctccctttatataataaacgtaaaagttaaattaaaacctaataaaaaacgagataaaaggtattgttatcgtaattatgatttttttttccaaaataaaaaactagaagaaatagtaattaatgtgtatctacatatatatttttgcagccattttgtgaaataaatcctatagttggaacttatttacaataggtgccactggattttaatgtttgtttttgataattagaaaaaaatcttcaaattaaatatttgacatttaacaatcttccctaaatctctccacattaactacacgattagttactaaaataaaacttccaaaatatttaatatcatttaattactacaaaataaatggtttttttacgggacggattggtgggacgggtttgacaggacgttacttaataacaattgtaaactataaaataaaaatattttatagatagatacaatttgcaaactttatgtatactaactttagaaaataaattgtttccgcggtgtaccgcgggttaaaatctagttttgtaatacaaccgtagtttgttgtttccaaaatgttgttcgcattgtgtataatgatagcttattgtctaattgttgtgatctgcttcttttttcatgtttttatttttacttttgagttatacatatagattaacatatatgtcaatgttttttaacccgactcgcacgatgaaccggactactttcgtgatcaccggttcattgagtcaatccagttcgatgacgggtcaatttcttaaagttttttttaatgttacagagattatatagtttttatatataaaagatatatcatatttaacaaagtaatatatttaacaataataataaagtgattaattttttaagtccaactaaagtataaagccgtaacaaatatgaaaatagtggagatcaccgatgacataaataaactaataaaacatcgcggatttaaaacaacgaatctcgattttctctctcatcatttcattcactcttaaggcgggattgtgaagtcttcatcaatttaaaacatcaaatgagtatatgaactagaaaaagttataaaaataatataatatagtctaaaatcttttattttagactttttttccgagatatcctatgtatttttttttttcttcattaaagtttctaattttctatcctcttggtttttgttctgttttcattttcttcccgttgtctccatgaatttttttttactttttcctcataaattaattttaagctgtgttctaaaaagcggtttaggcggcactacgctcttaagtgactcgtagacaaccgctttgaccgcctaaatttgcataagttccggtttactgtattgttttttatttttaactatataaaactttcttataagtcttaactcaatatatattctttgatatgaatttaactaatttttgtttatgatttaacattttaatttttctaatagatagttatatataatttattatctataatattatattcaatatgtattatattataaacttttaaactgtataaaatcgtctaaactcctattaagcattgtaggcgttaggcgctatgttaccgcctgcctagcgttttcttcgacactgattttaagtaacatttcgagctagtctcattaacgcctctatttatatttgataattttactaattcatttttttatcttgatttgaaagaaaaatgttcagtggtaatatgattagtaaaattataaaaaaatttctttcttttattaaatacaaaagttcttaaaacgtgcagacttgaagatctccacaaacctccaaaagtctattcaaatggcagagacagttgaatccatcatcatcatcatcatcgtcttctccaaatg

SEQ ID NO: 17603 - DNA, 3003 bp, Unknown; identical to SEQ ID NO: 17602
  misc_feature (1)..( 3003): 2750-1469P.txt file - cDNA_ID_1810155; gDNA_ID_1621184; Annot_ID_174370

SEQ ID NO: 17604 - DNA, 975 bp, Unknown; identical to SEQ ID NO: 2783
  misc_feature (1)..( 975): 2750-1469P.txt file - cDNA_ID_1810155; gDNA_ID_1620594; Annot_ID_161488

SEQ ID NO: 17605 - DNA, 3003 bp, Unknown
  misc_feature (1)..( 3003): 2750-1469P.txt file - cDNA_ID_1810214; gDNA_ID_1621187; Annot_ID_57441
tggtaaaatagagaacaatgaattatatttcacaagatcttccttttcaaattatttaatttaatctttgcatatttagacttgcagcaactgtcaacaagtcggacacaacaaacgttcatgcaagcgtaaagcagtgccaaaaccacccaagaaacctcaaggacgaccaaggaaaaaacagaaaacaatggatgaagagaaccttatcactcagccaatacaatcttctcttcaaagttaatgtttgacaagtctttactttagaatatcttgtccctctgaaacaattgtttttttttgtgacaaatattgttgtgttgcaacagcttcgatagttatgttggttggatttatttaagcatgactctttggattattttaagttgttgtgtctttctttcagcttctaaaatccaaactaattaagcaattcaaaatcatttagaacgtttttttgtaataaattcaaaacagttttaaagaacataatgtggtttttgcgctaaatacaaatgtctcgttgttgttttttttggaaattaatatcccattaatatttaatttttgtggggttaagtttattaacaggttttagttcagggtttgttttactaaaaacatagtttagggtttaaaaatggatctggccaaagttgagggtttttttcattaaattctcatatataaactctaacaatcaaatcttctattcttttttttcggatctaaatcatctctttatatttactttctaaacatactaactaatacatatatttctttgcaatgatcatcaattgtttcaacacgaaaactaatctgttcgattgaccatgtcatgaaagaaaccatggcatattctttctctgttatatatcacttttgtcgtaattgtttcagtataattctcgaatccccaattttttagaatagtttgttgataaaattttatttactacagtacaaacaaaatattatttctagttccaatccttattcaaactagaattggtttcttttttttgttacaacaactttctctatatatattgtaaacatttcttttcacttgttttgcttccagagtgaagagaacagaaaaatatcgagatggctaaccaagaagaaggaagcatcttgaaagctcttgacgttgctaagactcaatggtaccatttcacggcggttgtagtcgccggtatgggtttttcacagactcatatgatctcttcgtgatatctctcatcacgaagctacttggccggatctactatcaggttcctggctcctcctctcctggaagcctccccgacggcatctctgtagccgtgagtggtgtggccttcgccggaacgtttctcggacagatattcttcggatgtcttggtgacaagctcggacgtaagagagtctatggtttaacactcttgatcatgactatttgctccattgcttctagtctttcctttgggaaggacccgaaaaccgtcatggtaactctctgcttcttccgtttctggctcgggtttggcattggtggtgactatcctctctcggctacgatcatgttcgagtacgctaacaaacgtactcgcggcgcgttcatagcatcggtttttgctatgcaaggagttgggatacttgccgcaggaggggtttctttacttgtctcgtatcttttcgagattgagtttccgtctcgggcctacatattggacggcgcagcctccaccgtcccacaggcggattacgtgtggaggatcatcctaatggtcggagccttaccggctctcttgacatactattggcgtatgaagatgcctgaaaccgctcgttacaccgctctagtcgccaagaacgcggagcaagcggctttggatatgaataaagaaattttcacagaagtggacgaaaaaagatttgctctcaccatttgtcaaagtgagaactggttttcacggtttgtcttttcattcaatttcggaccaaattaccctgggaaaacttaataatggcacaaaccaaaccgtgcagcagttcgtatcggttcagttaacggcgtaaaccaaaccctacagcagttggtttcggtttagttgatgcggttcagttttgaaaaagacaaaaaaaaaaaaaactgaaacgaagaaacccgagaaaacgaaaaagagaagagagtaacggagagatttgagagagaatcagaaagcgaaacgaaattcagtatccattgcttcaaaattcgacataacttcgaattgttgggtagttgaattgagccactgaactcccacatccggggaagtgaaagttactgtttttcccggcgaagccaagagaaagttactgtttattccggcgaaatttgaacctccggcgagatagcatctttagctatagctgggaataaagctaacgacgaagtcccgaggaagcagcatggtccagggaaggagaagcgggtattaagagtttccccgcggagaaaacgctctgcgacaaaggcaacggaggaactgggttagaatctctaatttaccgtttgttgtctttgggtgtatcagaattgtaaagcttgtttgattaaagggttagaacttgtcggaatttagcatatctttaggatgaaaaattgagaagtagaattggaaatgtctgtttccgccaaaaatatgattttgagttataatctggaaaatgtctgtgtacgtacactacttcggtttgcttaacagtatatgacttttaattgcaggtagtccaagtgttgctccgactgaagatcttacagttgaagagttaccaccaagactctttgctctagaccggtacccttccgagacgaagatgaacgcgtactctaaaccagagatgtagtttcttctcgattctccatttggggaactttttaaaatacccaaaaacaaggcatctttcaatgctaagcttgtccttggactaatatgccgtcagttagtgacaaagaaggtgaatgagatg

SEQ ID NO: 17606 - DNA, 3003 bp, Unknown; identical to SEQ ID NO: 17605
  misc_feature (1)..( 3003): 2750-1469P.txt file - cDNA_ID_1810214; gDNA_ID_2926145; Annot_ID_139070

SEQ ID NO: 17607 - DNA, 3000 bp, Unknown; identical to SEQ ID NO: 8061
  misc_feature (1)..( 3000): 2750-1469P.txt file - cDNA_ID_1810226; gDNA_ID_1621188; Annot_ID_57455

SEQ ID NO: 17608 - DNA, 3000 bp, Unknown; identical to SEQ ID NO: 8061
  misc_feature (1)..( 3000): 2750-1469P.txt file - cDNA_ID_1810226; gDNA_ID_2926216; Annot_ID_142245

SEQ ID NO: 17609 - DNA, 3000 bp, Unknown; identical to SEQ ID NO: 8071
  misc_feature (1)..( 3000): 2750-1469P.txt file - cDNA_ID_1810242; gDNA_ID_1621189; Annot_ID_57477

SEQ ID NO: 17610 - DNA, 3003 bp, Unknown
  misc_feature (1)..( 3003): 2750-1469P.txt file - cDNA_ID_1810256; gDNA_ID_1621189; Annot_ID_57471
tcagtacggtgggttcaaaacagtagacgataccgaattctccaacgaaactgtctctgaagttgttgttaagcctggatcatctgaaaccatcgaaatcccagctcctgaggtataattagaaaaccaaaccctaccttattcctgaagttgttaaaccctatctttctaattatggttttttgttttgtggttgttttcatagactgaaggtacattggtatgggacatagcggttttgggatgggaagtgaattacaaggaagagtttgtgccaacagaagaaggagcttacacggtaatagtccaaaaggtgaagaagatgggagcaaatgaaggaccaatcaggaacagtttcaagaacagtcaggctggtaagattgttcttaccgttgacaatgtctctggcaagaagaagaaagttctgtacaggtacagaaccaagactgaatcctcttcctgaagtggaggatttcatgtagtctctggatatataatattcttttctaaatttaaacgtttggtgttattatttatttttgagtgatatgtaagagaaagagatactcccattatttcattgatattcaatcttttgcttctttctttttttggtaaggtcaatcttttgcttctttggtatgagatttttcctctcttccctatttgatttatttgattaaaactgtatggataaataaatatgttcgaatattcagagttttacatgggctgagtattggcccaatggcctttcagagtaacaccaaagaagaaatatgtgatatgttttgtatggttgttctgaaaggttttacagtgagaaaaacagttgaacaaccaaaagaggaatggtttgatgattaataatttttcttttgatctaacattcattatattataaaccccaaaaccgggaaaaaattgaaattcggatggaaaaaaacataacaactctatccatagttaaatcttttttttgtttgtcatctctatccatagttaaatcttagttcttacttatgagtaaatgtccttagactactcatgttacgatcgatgatgcatgtgtgtgaacttaccttaatggatatacgcggcgaaaacaaagactgccacaaaatctactctttgtgttgttattggtacacatcaatggatgaagaatagtggctcgaaccgcttcattggccagaaaaatataagattagctactacatttttttctaaagtaaaatcaattttgttttttgggatcaatttttgcagaattctatgtagtgattacgacaccacacgcatgcatggcatcatcagagaaaaagattatagatgactagacgcactgatccttctacctttttttctttaaattgaatgattttaatataaacaatttgtaacttgtaatagatttgcacttctcctcctataaatgcgttcgtcaacatctttgctttcgtacggtaaaacaacatctctcgttgaaacaaaatgtgtttgatcattttaaattttctaataccttacgtcttttattttaatttctataagaattgtctgtatggaaagtttttttaagatttttgttgcattttttttaatggacagcttagtcatgcttctctctaatctatagactaacatgcgggtaacatataaatggcttatataaatatattcttaacaaaaaatatcaatattcttttcagcatatcagtgttataattaatttagaatccacgtctagtttatattttcttctttatttgcggccccaataatactacttttggtcaacaatatgaaagtcaaaccagccgctcaaatgtatccttcatgagttcatgttatatttcagtcaatacttttcatatttaaacacttattataattacgtaatatttttttgcccaaaaaaaaaaattacgtaatattcaacatctctaccttgtagagttccaaaacattgtcacaaaatatttataaagaatttattttaactaattaggtcgttaattgtccaagggtttttcatagttgatatagttctgttcaaatatagccatccttaatcgattcatgggatcgtaaattactacttcgagtgttgtaaaaaaaaatgaaacttctacattacaaactcgaatttaatgcatctggagtgatactataaaagtagggatgctctcaggtcgcatttgagagacacagaaatgattttaatggaattaatatattttcagtttttcacaaaaaaaaattgtgtttataacaactgcagattcaatgctgattttatgagtctcacctatagaatttatatttctatattcatagaggcagtataggtgttgacccaacatcgaaagaacacttcgtaaaaaattctttggaacaaggctgaaaatttactcccaaatttagctatccgatgaagataaatcatttaccgtttattaaagaattatcgagattttagtccaaaccaaaagagattatgagcctaagattttgaatttgtattggtaaaagaaattgaacgaaaatttcagaaaaaaatattaataaattgaacgatagagttcacttactacatagtcaactagtgcctagctataatagtttcaaaagacaaaaaaaaacaaaatcggttaactacttccgtgacataattctcattttgatttttgaatccagtctaatttgaaaagtatattcaaaatctttaaatccattaatgataacttttataatacgttgacacacgcaattgtatatacaatattcttgaattttaaatgtaaattctagaatatattgcgatcaccacactaatcaaaatctttgggacaacttgaacccacatttgacttttcttggtcaaatattttggcatcatgcatgatcttctctataaaaaccaaaaggcctcaacgacattcataaactcagtcattatatttatttttgttgtatttcaacgttcaatctctgaaaatg

SEQ ID NO: 17611 - DNA, 3003 bp, Unknown; identical to SEQ ID NO: 17610
  misc_feature (1)..( 3003): 2750-1469P.txt file - cDNA_ID_1810256; gDNA_ID_1621189; Annot_ID_174536

SEQ ID NO: 17612 - DNA, 3003 bp, Unknown
  misc_feature (1)..( 3003): 2750-1469P.txt file - cDNA_ID_1810260; gDNA_ID_1621189; Annot_ID_57470
aaaatattttcactgaataccctctttcctttctgaaacatgaaagattaatattcgttttgataggacggagacagagtatgtcagccagatgcttacaaaaatcaaacgcttttcccaacaccactcctgccatgtctggtttgtcgctcatccaaaacagttgcaacattgggatggcggtgcaccaaacctttacgatattagtggcagcgcacattttataaacaaatgtgacaatggtattatagttcacagaaaccgcgacgaaaatgctggacctcttgatctagttcaagtgggtaccaatcccttcatcttcatctgtaatgtattattttaaaaatggccttcttattgtgtaaagttactaacctttttgtatgttttagattggtgtgaggaaagtacgaaacaaggtggcaggacaaattggtgatgcatacttgtgttatgacaggtacataaacttttcaactaccttcttatttctactaatctaacttaacggactaaacaagttttcacaagaacttatgatagtattttgttactttggcatcgaaaactagctgaagttattccgaagtacccaaagcgtagagacctttgcctagaacaccaaacctttatcaaaactctgttcaaagttacaatcgataattctactatgttggttcagtaatgaaatctttattcgacaggacaactggttcctactcggattctccagtgacgcctggaatgccagagaggagatcacccaagcggtactgatcagtttggtgaatttaaaggccgtcaaacacggtggacatagcgtatcgataacatttgtcaactaaattttatcccttttgggttaccattggtgaggaaaaagatgatcttgtgagattcttacctttgtgttttaacagactgtcaagattcaagaacaagattatgtctctactatgtaatgtggaattatgaatcatggtgtttctctattgtgtctggtaggtctgatccaaaatgtgactgaattcgatttttgtacagctctgtgatctttttgtgctctgtctgtttctgtagtttgttctgtttctctctgtctctgtctcctccttttgttgcggctgatttggtgttgtgaattagctgtataactgttgacttcaactacctctctgttataattatgcaaactctttgcaaattgattcaattatttccaatgttatactgctttgtgttacgtctatctagttgatttctttgagtattaatctaattgtcacgcaaatattttataatagaatcagttgcggcggtgcactataaatgtcgatcatatataatcattgcgaacgtaattaatatagggaatataggtgaaagttgtggaaatagtttattctcgtcaaaggatatgaccaagaccaaaattattggtattatctaatttatcaatccattgtttttttttcacacatttgcttattctgatatatttagtattgtttttaattatacatcataaagacataaacatcatagacaaaacttttattgagaacttatataaataatcattttttgtgtatgttaatcacatatttacattaggaaataactaagtttagaatttttcgaccaatattcaaatcacttaatcatctgatttacatgcaaacatttgatgatatgaaaccattcatatgaaacagcaactcattaatataaaaatataatgattagtgtctttgttggcatattttggtgtcaacagctaaaagagacatttacttaccaataaaggagaccgtatatccaattccgactgtttaatgaaaatcatgatatattaaggaacaaatatttgattgagaaccgttacaacgaagagattcttctccactatcacattatacatggtactttctaattatattaaaatgggacgtaatttagaattaagtgataactctgtaaaattagaaaggaaacaaaacaaaataaaaccatattaaaatgaatttcacacaaaaagtgactttggtagtgaatatatccgtccgttgcgccgaacatactctgtcgaatagcaccacgtgtcgtgtaaacagatcagcatcgacgaccgttgagagaacatgagaagcgaaacgtgggacctcaccaatatctttgtttattaatttatatttcttggtgctacgtaaaatatttgttctgcgattttgagaatttgccaggctggcaaattggggccaggttggatcatccaacggctgtggttggttcttcatgtttactggtagggtccatcatgtgaccgttgctaagggcggtgtggaccacctctagtcctagggttttttccttctctgcataaagctcccttctttgttcctcctcctctctcttctcttatttattcacaaccccccattaatctctttctctgctgcagcttaaactttaaaaaacactacaagaacaacttcttcaggttctataaagagattccgaagaagaatcttttccagaaacagtgtaagtcttatcttcttctttaggttggtttctctctttttctctctttagaagctgttaaattcgaatcctttttgggttttagttctattgtctctcttgatttctcgatttttatatagataaacttagaaagcttcgaatttgagctaggtttctctcgccttcaggaaaaaaaaaaagaaagtttcaatcttttcctcctgagatttagttctgcagagttgaaattggattctgtgttatgttgtttgagttcgtttaatcgttagggtttatacaagaattacgtttttgattttagatctctactaatcaggaagaagaattaagcttgtttcttttagatctcaactaattcaacaaggttaattagttctagggttactactttggtgaattgtataattggtgactaaatattgtttgaatcgattctgaatgacaggctttaagatg

SEQ ID NO: 17613 - DNA, 3003 bp, Unknown
  misc_feature (1)..( 3003): 2750-1469P.txt file - cDNA_ID_1810264; gDNA_ID_1621189; Annot_ID_57469
actgacggagatggacctggtcaagctctagcggaagaacttgcacggcgtttggggaaagaaagatgttggcttgtcaaatggccgaagaaaagtgaagatgaacatttcaaagatgcaaacgaggttagtgtagattatatgtaaaatttatgaaattgcttttgtggttactctggtcttaatgaccattacttggatgattttcttaggtgcttatgtctaagggacctcatttactcaaggaagctattctaaatgctgagccttaccctttgaagtcatgaagtgtgtccaagtcatgttcttcatatttgtcttattaatttttcggaactagcattaagagtataatttttattttctttctaattttgcatattatacacattctaaatttaattattaaccaagaaaatatattaattgaactttttgatgaaacagagtacatagcacttttggattaaaaaaccaacgaatttacattagttaagaagacaattaactaatggttaaactctaactaatattgaaactaccaaggaacaaattagaaacagacagaacatagacaaatctaattcatcagatttgttgacaacaatttgttaatgtctcgagaaatcttagggtttgtcaagatgcattcttcggcttttaggacttgaaccatttcccttggaaccacacacacttcttctgtagatagcttctcctggatttcttgagaaccaagcaaaaactgcatttctcttcccacctttgaactatccagagtctgcaaaatttaaacaagtatcgtataaaaaaaggaaggaaaatactgcaaggaaccatttggatttagggtttatcttatacctgcattttggtctgcttcagttggagaatctcaatttgagcctgcaagaacttgacatatttagctgcggcattgaacatttcggcagtgttgtgtttctggcttccagggattagttttcccagctcttgagtcttctctgtgattcttcttctcctctttcgtgctgcgatgctctgagcagatagctctcgcttcttggtgtcgccttgttcagtccacccaaccttgaacgtcgatgagaaatcaggagcttgaaacttggaaatgttggaagcttctgtgatgtaagaatccaagaggtaattagattcagggctaggggaaaaagggtcgtgactgttgaaatggaagctggagtcaatgagtttctggtgttttggcgtgtggaaggaatctaattcctgtgactcgttgaagactcgggtcttagggctaggaaggaagatttcttgagatggaagaaacgactcgtagaaatgatcatagtgatcaaacccgaagagagacggtgaaagagcttcgtcgggatacaatggctgatgttgcggttgctcttggaagaagaaactgtcagtttcagggataatcatatccacatcagggataaagcaatcctgaagctggattacatctgagttggagaagtagcttaagcagtccatagttaagaaatagatgatgaatttttagcaaatgaagaatgtgaagcaatcaggagcagttacagatggggaggttttgagtaaatggtttaattaagacttaattagctttaattgctgctaatcaagcttagagagagtaaacgcagaaaacaaaggaaaggacaggagaagatatatgagagaagcagggattctgtcttttgttttcttttgagtgaagtaagacaattcaggtagtaagtttgtaacttgtaacttaactgtcacgaaataaatatgaaagagagagggagaagttagggttttggcgaggattaaggaagggctatagtgggttttaacttttagatttagcttaacaacctcctaaatattaggcctcgtttattttctttttcttaattccatttcaagaaatatatacttatattagcttgacgttattttggtacattttattagttcttcaaagatactagattaggaactaaaaaaaagtttaaaatgaagttagagttctacagcctctaaagcctcagtaggctactaccaatcagcccaaacaattttaatttgccaataacttttttattcgtggaatttcacgaaatatatacaaaaaatatataatttctttatattataccacgaaagcatacaccacatttcacacttgaatcccaaagagaaatcagacactactttctaatgaagaattagttatctagtaccatagaaatgtaattcacaaaccgcatttagtttatcctcatgaacttatgtttagtagtataaattcgcaaaaacatatattaaaattcattaattctacaacatctaaaattcattatgtatattagttcttagtattatataatagcatattgggctattacatttattttttactattttaaaacaatttaagaaaaatgaattaagtaagtaatttgtgtcatattttagcgtttttcttttatcggtggcgcgatttactcggtaaaagaagagctactacggttttagcggctaaaaatgttgagattggtggttccacgttgttctctctgactttgccgccaagtttcctatctcaactaattaaaaatgggccaggcccaatcgctcttctacgtgccacacacgctttgactttgttgccaaggtttttcttaaggaaataatgggtcgaaataaatgctaacaggcctaaagtaacaattaatgggcctttttgcttcgaagcccatttatctcaaagagagcgaaatcaaaatcttccttcgtcttcctccataagacacggatacagaggagggaaagaagaacccctaaaacccttgagcaaccactatgaatggataatagctgaagagcttttactcaaatcgatacttcgagatgcgatttttgcttcgtttaccacaaattcattttcggaaactctcgtgctcgatgtctgtactcatg

SEQ ID NO: 17614 - DNA, 3003 bp, Unknown
  misc_feature (1)..( 3003): 2750-1469P.txt file - cDNA_ID_1810274; gDNA_ID_1621189; Annot_ID_57465
tcgttttcaaaagtctgccttttgtctcatcagttatggagattctggatttcaaggaacaagatctgtagttctgttggattcgaaactcaatgaaaacaaaagcttcagtgagaaatcaaagtaaaatgcaacatatccaatggaaaaaactgtttatctatgataatttcaagatagggtcggtaataatatgatgttcttctggtagatcataaggcaaattgattccatggactttgaggtacttcaggcgaaagattgaagtgctctctcgaagttatcttcagctgatgctgctcgcttcacaaggacgtgttctggatgtgaaagtttcagctggctgcaaaaggattggaaatggaggaataagtcagcttactgatgcacttgttgttatgcagaaaatgcaaaaggtcatgaatatttatactttaggtagcgagaagatgatttcccgacgtgaagactgcatacaacgaggtttgcaagagtttctgggtctttagcatcctgcaatgagaataaacatctatgatttcaaacttgtccattttataataaacggaatagttgaaaagtttagatttggtgtaaggagttttcaagtatcctcatagatttaaatcgagtgagcatttccgatgacatgatattgagaatgggttgtgtcgatacagatttaaggaaagaaagagtaggttcatcactcaccttgttgagtgcttcaagtagtagagtctcagcttcttcaaaattacccatatgcatgcagcaaactgctttgccgttcaagatcaagcttgtcattgggtacttctcagagaaatcctggaagattagataagcttcctgtatcttggaaccaccctgagatcataaagaacaatttcatattaagaaacacattaacaaacttctctacactatatggaaaaaagaaatggatattcatatcatactactgccagattcaaccacgcgctcgcgagctgagtgagtgtgtggtcttcatcaatctgttgcatcactctcagttgtttctccgcaaaatctgatctgtgcatctttatgaatatctggacattcaaagcatgcctaaaatatgcagaaacaacaatcatttatcgagtaaacgaaaagagatcgctgtgacaagacaaaacaaatcgaaaagctcacagatccatggttcctccagaatgagtgtgcttcagagcctcattatagtcttcctcatgcatgaatatagtaccagcaatcaacctgataatagcattgtttcctacagttggatctgccaaccattccctcaagctcgaaatggttgattcctaaccaaaatcacagaaacaactacgtattcaacaatgcagatcactaaaataagatcaagatatattcaattccggatctctgaagctaaatcatcaaaagaatcctagaattctactaaagttatctgaaattccgctaagcaaacgttacagaagatgaattgaaacatctcaaaatctcttgaattaccttgttttcaggactcgatagatacatagcaaggagtttcactgcctgtagaggagtagcagcggcttcatcgatctcactgatgacaagctacgaagacgaaatttgaaaaacgtaaatcagcaaatgatcaaaacaaattgaaatccaaatcgaaaaacacgagacggaagcaaaacctggtaacttccgagagcgatgtaagcgcgatggacgagacagtctcgctcgacgatatcttcctgcgaaagattagggatctcgctgttgttgatcgcagcttgataagcacccaagtagaaatggtttctcaaattgaagagatgatctggtcctgccatggatgccattgtcttagcttcttcttcttcttcttcttctagatctcacagatccgtgtctaactccaaaataaagaaaactgaagtgtgaataatcaaaaccaaaaaaatatgacgccttaagatgtacataaagccccatacattttgaatgttacaattgacactcattgttatctattttaggcccaatgggcttttcgatgacccaattagttcgacactctgcttctctttacacgtctcctacatacggacggtgacaatcttgtcttaccaataaaacgcgtttttatccaattcgcgcgggagttgttctaatgacgttagcaaaccactccgttcaatcgtgctgtcacgttatgtcgacaaacaaatccaacaatttactgacacgtgtcatttagcttccccaataaatgacccgggaatagttaaaagccggtttaccagtattggttttaatcagccaccgagtcatcgtgactgtaacttaaacggcgtttactgcttcaagataaaatacgctttgcccaaaaaacgttattagttcgtaatccgtttttgctctcccttttgagatcttttaattaaaaaaattccgttttaagtgaatgcgtgtaagcaacagttcgaattcgaagcgagagctaaaatcaaaatctctctgatttgttgttttgttgatgtaagtttctttgatcctttcgcgaaatttgtcatcttccccgatcgagttttactttttctttgtgaatagtttgacttttcgtttttcttcttcttcaatctcgcatggtgtttgtgcgtatcttgtttggaattggagtttgtaactatttgattataagcaagttttgattcgaatgcatgcgtgcaatccacaatccagaactagatgtatatgtatctctatgtcaagagtgattaaaatcgattcgtgtggaattaacttggaagtgaaagttttaatattgtttccggaatttacggtgagattttaggtgttgaccagcgttgttagacaagaatttgtcatcaatttgatttagttttgaagcatttgggttttggaattttgttttgattttctgcaggttttatgaagtgatttgcattagattggattgaaatg

SEQ ID NO: 17615 - DNA, 3000 bp, Unknown; identical to SEQ ID NO: 8063
  misc_feature (1)..( 3000): 2750-1469P.txt file - cDNA_ID_1810286; gDNA_ID_1621189; Annot_ID_57461

SEQ ID NO: 17616 - DNA, 3000 bp, Unknown; identical to SEQ ID NO: 8063
  misc_feature (1)..( 3000): 2750-1469P.txt file - cDNA_ID_1810286; gDNA_ID_1621189; Annot_ID_174525

SEQ ID NO: 17617 - DNA, 3000 bp, Unknown
  misc_feature (1)..( 3000): 2750-1469P.txt file - cDNA_ID_1810290; gDNA_ID_1621189; Annot_ID_57460
tcttcctatggtctacatgcaggctttactccggtattacaattcttctctgttgagggaaaatggttcagggaagattgttgggtctgcgtctgttgctaaaattgttggtggcatgaggcctacctatggcattacagctcccaaggtcatgtatttctctgctaggggacctgacccagaagatgattctttcgttgatgctgatataatgaaacccaacttagtagctcccggaaacgcgatatggggagcttggagtcctcttggcattggtacaaatgattttcaaggtacacataccctcatttctctttatcagattactcattatgtgtttctagtagtctttttgagatcttgaattggcgatatttaggtgaacgttttgcgatggaatcggggacaagcatgtctgctccacatgtaaccgggattgcggcgctcatcaagcagaagttcccacatttcactcctgcagccattgcatccgcactttcaacaacggcttctctatcagacagaaagggtgagcatataatggcgcaacgcactgtcttaaaccccgacattagtcagtcccctgcaacaccgtttgatatgggtagcggatttgttaatgcaactgcagctcttgaccctggtttgatttttgacataggtaaatactttcttgaacccccaatgttcatattattttaccttgagcatatgaaaaaggagatcaatcactgatatgaaatgtggctgcaaatgtaggttacaatgaatacatgaagtttctctgtggtatcaacggatcatctccagtcgttctcaactacaccggtgaaagctgctcgtcatacaactcttcccttgcagcctctgacttgaacctaccctcagtcacaatagctaaactcgttgggactcgagccgtcctaagatgggtgactaatatcgcaaccacggctacaaacgaaacatatatagtcgggtggatggcaccggactcagtctcggttaaggtctcacctgccaagtttacaataggaaacgggcagacacgggtcttgagccttgtctttcgagcgatgaagaatgtttcgatggctagttttgggagaattggactgtttggagatagaggtcacgttgttaacattccagtggcagtcatctacaagattgctgtctgaaaaaataggtttgttacatgcagaggtttttgtgtgatgatgaaacaaacttaagggagttgatcaaattctttttctttttttggggttagttatatgtttttgtgcattgcttaaaaagctttagagagatttgtagtttgtaaatgcttttggaatgatgaagttgattgaatattaatctaatccaatcttttggatgtttgagtattttaaagtggtctttttcttgaatcttgagctttgtttgccaatgtggggtgctgagagtgacaaacagtagttaaatacccaaacacaacgaaacaaaaaataaggtccaaacaaacaaagaataggggtattttcgtcattagcttcataaagaagggttaaattgttaattttgagggtttcgcgtaggcttgggcattcggttaactcgggttaatcggttcggtttaatcggtttttcggttttttcggttctttaaaattctgccgaattgaaccgaataaagattcggttcgggtcggttcggttcccaatttgttcggttcggttataggctttaaaatcaactccgaattaaaccgatttttttttaaattcggttaattcaaaccgagtaatcccaaaaacaagatattgggtcaaaaaaattgtagaatgggccaagataaacaaaaaattacagttacaaattaataaaggggccaaaacgaaaataaacttcagcccaaaataaataaatttaagcccattaacaattagggttcatggtatcttgccgccgctaccctcttctctccctccagcggatctgcgaaggagacggtgacgacaatggcgagggatgagaatatctccgtaacaaaatctgcccctaacgtgctaccatagtcaacaccacatgcaatggagagaattgacttaaaatagccatggatgaggatgattaggctactacgttttaattctctctagaataacactggcatggatcgatgtcgaggcggagtaagaagaagagaacaaaagaaaagggatggagaaggaagagttatgaaaataacgaaggtgcaagaagaaggttgaaggagaaaagaagaaacgagatagagaacaagaagctatgaagattagatctaggttttttttatctttttataggtagtatctattaaccgagaaaaccgatcggttatgtctgccgaaccgaaccgaaccgagaaccgaactccaattataattttgccgatcggtttagccttctcttcatagtcggtaatcggaaccgaaaaaatcggtttgttcggttcggtttgttcggtttaatccgaaatcccaggcctagtttcgcggatccatcgaacttcttctctcttcttcttctgactccttagccgacgacacagagaagaagaagacgaagacgttggagagtcacatcaaagcttaaacctttcgtgatttattctcctttttcccgggttcggattaatttttcaaattccgacgaaattcgctatcttctggtgcttgagctgcttagctaagtgaagcagagagagtacaattgtttatcttttgtgagttatttaacctttgtttatgatggtttctggttttgatttcaatagtaggcgtcgttacttggtttagaagcaaattgttagggtggtttcttaaagggggctttatacataatctactgtttactttcgtgctccttgcattttgatggtttgttttgttctttagtaggttaaattaaggagattcttggcaaaattctgaagtagcagcagtagctgtgttttgtgttcatagagaatg

SEQ ID NO: 17618 - DNA, 3000 bp, Unknown; identical to SEQ ID NO: 8083
  misc_feature (1)..( 3000): 2750-1469P.txt file - cDNA_ID_1810316; gDNA_ID_1621191; Annot_ID_57496

SEQ ID NO: 17619 - DNA, 3000 bp, Unknown; identical to SEQ ID NO: 8081
  misc_feature (1)..( 3000): 2750-1469P.txt file - cDNA_ID_1810344; gDNA_ID_1621191; Annot_ID_57485

SEQ ID NO: 17620 - DNA, 3003 bp, Unknown
  misc_feature (1)..( 3003): 2750-1469P.txt file - cDNA_ID_1810360; gDNA_ID_1621192; Annot_ID_57500
agctcggtgagctgatcgtgtactgacccagctgggtggtccggtcagctgacactcgagctggtggactgtggtagctcacgggtgaagaggtgtctcggccaaaaggtgtaaggtcgagcgggtaccaacgaacggttgcatcgcctaatagatgcaaggaacggatgtgaccttttggaaggatgcaaggaacggatgtgacctttcggaagggtgcaaggaacggatgtgatgcttcgggaagcatccattcgccccctatataaaggaggacgcccaaggcctttggaataatctcacatcatctcacaatctcacaatctcacatcatctcacaacatccaaaacaccataaaacgttcttaaaggagtcccaacacatcctagagttgttggtcggaaaggggatgcggctcggcgagtataactcgaccgaactgatgcacatgctacctcccgatccaacggttcgatggagtgtagaggatggagagggtagaccgttcgtcttagagacgaatcggatctagtagaccgatcgttggatcggatcggccagaccgatcgtaagacggatcggccagaccgatcgtaagacggatcggatcggccagacggatcggacagaccgatcgtcggacgggtcggatgggacaggccgatcgtctgacggaacgggtcggacagaccgatcgtcggatgggatggatcgagaaaagtgttcgaggaagcacaaggataagtgcatccgaacacacccaagggtcgcccatggatgcaatcttaccggtaaagggagaaagcaccaagaatgggtaaggaacgtgattcaccatataagatcaacatcgcggccgccttcatgtatctatctcctcagccatggtgaaaccgatcagagatcggtaagaccaaagggtgactcgacggataaccaacgggaaagtccacggtgggaaccgatggacaaaacagatgttggacccgcgagaaaacctaaggccgacggaagaaagatttcatgggctagcctacgatgatctagtggatgaatccacggacccttgggtgtgataaggatatagttcggatcgtatggatggatcaataagccaaaagctttatcgaccaccatagaccggacggataaacggttagtaaaccgtgggcggtcgtagtaaatgacaggatcggaaacatggatggttcgataagccaagggctcaatcgtccaccatggaaccgaaggggagtacgtttggaggacggatggaccaataagccaagagcttgattcggtcatcgtgaaccaagggaatcgtacgatccccaatctctatcgttgtacttagaccagtggggttggttggttgtatggctaagtaatgatagggattggttcatcaattcacgaccgatgacgagtcgttgaatgaatggagtaaggcgacaaacgggctaaggaatcaaatccgcatattggccaaggtatgtaacgatctagcttattagttaagatagacgtttggtaattgaccgtgaaagtaagataaaggaatatgcgattgtttggcttagaatggttagcgaacatatgcatgtcttgaccgagtaaaggatcgatcatagaattaaacgaaggttagaaagacttccgctgtgtaataagagagcaattatagaatttagcctcgtaaaggcaattctatgttgaatcgcgaaaaattaagaggttcggccggggagaggcgcgaacttgagtacacagtcgccggacaccgagacgtccgggactgggtctcacagaaatcatgcgggctaagctaggatcgtaaagaaatcagctgggtcagctcgcccaaagctcaagctcagctggaaggagtgacggttactcaggttaagtgacagtccagctcgggcagctggacgagtgacggttgagcttgaggtagctggacgagtgacggttgagctcgaggtagctggacgagtgacagactagatgggcggttatgggcgaagagatacaactcttcggaaaggtgcaactcttcggaagggcgcaactcttcggaaaggtgcaaggaacggatgtgttgattcgggaagcatccattcgccccctatataaggaagggcgcccaggaccattccactcaccacaacacaccgaaaacacaagaaactcaccattaaaactctctccctcttgggagaataaatagtcttaggattcggtagtcgggctgtggccggcaataaagaaggagggtcggatcgacctaacctcgagaaggaaggtaagggatcctagactttgagtctaagggttctaggatgtgagttagtagtcggatccttgaaaggatcaactagagggctgggtagtatccgggtcatgtgcatcctacacaagactcggtccgggtagggatcggctgaggcggggacgcggctcggcggaggaccggcgggtcttaactgatctgccgagaatcggccggactgatgtgcgatcttcccctctctgaattctctccacggatccgagtagtgtatggcatatagagcattgcatggacttgcatatgattaagtaaatgagattacttatggctctatgactttcaggaacgaatggtgatcgtgggaaggacttggcttaggcgcgagagactcaagaccgggatgatgggtggtgatagttcggatagtctagggatcgattatatgacttgtaatagcttatatgcaaactcataggttgtatcgaatcctttgcttaatcaataaagtatccgattgtttgtttactctattcgtctcatatattgaatcacggaatcatatggaacggattagactaggaaagaacctcataaacggttagggccgagtcacttagtggcttgggtcgagagaactcgtccggaatttaggcagtccggatcggggcctttcaaaaaccaaggtcctgctgctcccgatgctgaaatg

SEQ ID NO: 17621 - DNA, 3003 bp, Unknown
  misc_feature (1)..( 3003): 2750-1469P.txt file - cDNA_ID_1810372; gDNA_ID_1621193; Annot_ID_57524
taccatcaacatcaacatcatcaaacagcctgtctttgatcttatcctcagcacttctcctagttccacctctactatcaaactcatcatcggatgattctccctggccatttccctgttccctttgagctttcttcaaccgcttatactgcctctgtcatggttcaagaaaaaagtcaaatgtattagtactgcacatatatttttagtgtatctacaaaatcctgatgtattgttatatacacaaatatgactaacctttttgaatttgacgttgttatcttgtagaagcaaataatcatcttcatcaagaccttcgtccctattaaaattatcataaatggaaggttagtcagaaagagaacagacctgctatagttcgtctaatggtaacttacatactcatcacaaacaatgtatgaaaatcacaaataaagactgctgagaattaagggaacatttcttcaaaagtatcatgcatgtcaacactaacatttagtttttcatatgttagaaaaggataaaatctaagagaatgagtaaggatataaaatattcactttttctttcgtttcttcttctttttctgcctctcctcatcgctatctttcctttcttcgtcttcttcctcttcttcctcttcgtcttcatcattcactatgaacccatcattctcatactcattcccaactacaaaacagatatacggatcccacatcatggaacaaaaatagcctgaatctaagttaaaaagcctagaaagaaaaagaaaaaaaaatactcaaacccaaggtgagagaaatgtgtgcagctcaaaacttgcagaaaccatgaagtctaaaaaggaacaaatcaagcaaccgtatgaaacagagaatatagaaacaagaagtggtagaaggagagactttgcagcagataagtaaacatctaagaaacaagatgcattcactttttttttttttttggttgccaaatccagacactgcatcttctaatggagcaaatgcagcagaatttctccaaatgaatcgattttaagacaaagaactgcatgcgcttcagtactaaaccaaaccataccactaatttccttcgatgcaatcagactctacagcttccagatttagggtggtaagcaaaaagaaacgaaagacgacacatttctcactgggagaagtcaaaatcaaggaaaaaacttataccgtcatcatcatcttcttcatcatcgttttcatcatgctcagctggatctccatgaactggctctccgtcgtcatcctcaagctcatgatcctctacgcaaaagagaaaaggattcaattttttcatacaaatcagaagaaataaacaaaaccctagtattattacggcgtttcacacagaaaaaaattagggtttgcgacgaagcgattaaggtaccttcatcgtcagagattgcgttcctcgccatgtttatctcaacaaattagaagtacgataacgcagaaattagccctgcaaactgcaaaaaaaaacgaagagattgtgattatgatttctgattttgcgaagagaaagggggaagaaggttctcgcgattactagggttcttcgaaaagagaacccagaaggagctagagaagagaaatgggtttggtaaaggaagaagctttaccagtgtgaatttttcataagcgaaaggcgacgaagaactgataaacgaagaagaagacggagacgatgaaattacaagtttatactgacagatttgcctcaattttttctctgcgttttagaaatattttttttttaataatgtttttaaaaattattatactttttgaagaaatgtaaagaaaaaaaagtcgagactaaaaacaaaacaaagtttattcaacttatcttataattagagtggagaatatttaattcgataattcgaaatataagaaaatagacatacattaataattaataaaaaaacgttacatcggctaaaatgtttaaacaattatttaaatttatatgataaataaaattaaaataaatctaaatcggattcaaatttaaaagtttgtctatagattaatttaatttttagttaaacaatttaattttatcaaaaatataaaattttaaactgtgaaaaagttttaaatcttataattgatatatttaaaattaaataacaagttgataataatataaacatttggacatatataaaaataaatataacactagacaaattatattgtaggacaaattttacacatgaggccctaaaaactttttatattaggtggcctaaaacaaatgtttcggcttttttatgaacgggccgggcttggattcggccatattttgagttcatgccttttaatatggcaagaaaaaggttagaaactagactaattgtagattgtaagtttgtaaccgtaatgagatactgcaaatgggtaaaaatcgtattattccataaaccacaaatggagaagtcaaagtttggcaaatatcacaacaaaaaggttgatatatcacatgcatattatgtagctacaccgacatatcaaagttctcctatcaaattttaaaaaacataaatcaccaaccctactcacacccaccaatgcagcccatcattcttcccaaatctataaacacaacacaataatacaacagtgacaattttagcttttaaagaataacgttttcatgtgactggataaaaacgacgtctacgtagcacgaaactgctttgtttgttcttgtaacgatccgtaccatatctttttttattaaaaagtcacatttattatgggatcaataatttactctccatggattatttcatactataatgtacacgtacattatcataaagccaagataaaattaaaaacgccttttactacgtgttagtctatataatatagattaagtctgaaacccaaatcacaaacttcactcaaaacctaattaacttagagagaaagagagagagagaagggttgcaaaatg

SEQ ID NO: 17622 - DNA, 3000 bp, Unknown; identical to SEQ ID NO: 8106
  misc_feature (1)..( 3000): 2750-1469P.txt file - cDNA_ID_1810376; gDNA_ID_1621193; Annot_ID_57523

SEQ ID NO: 17623 - DNA, 3000 bp, Unknown; identical to SEQ ID NO: 8098
  misc_feature (1)..( 3000): 2750-1469P.txt file - cDNA_ID_1810380; gDNA_ID_1621193; Annot_ID_57522

SEQ ID NO: 17624 - DNA, 3003 bp, Unknown
  misc_feature (1)..( 3003): 2750-1469P.txt file - cDNA_ID_1810384; gDNA_ID_1621193; Annot_ID_57520
ttttggccacctaaagtttcaagcaaaacaacaaaaatgatcttttagaataattattataataataacgacgattaatgaactctatatatctcacaaaagaaggacatgtttgcaatcccaaccaagaagataaacaccttagcaaattcaaagaagaatatatcaaacatcttttgtttctaagaaataagctctctgattatgtcgggagcatcttctgtttcttctatttgttcctctaatgtatcattgatccctacgggacctcaagtgttcatcaatttccgggggaaagatttacgaaaaggcttcatgagctttcttaagcctgctttgaaaaaagaaaagatcaacgtgtttattgacgaacaagaggagaggggcaaatacctaatcagtctttttgatacgataggtgagtcgaaaatcgctttggttatcttttctgaaggatactgcgagtcacattggtgtatggacgagctggtgaaaatcaaggaatacatggatcaaaacagactcataatcattccaatattctacaggcttgatctcgatgtggtaaaagatcttacaggaaaatttggcgataatttttgggatttggtagataaatatcaacctgaaccaaaaaagctccataaatggacggaagctttgttctctgtttgcgaattgttttccttgatcttaccaaaacacaggtttttatttttccacttttatatgttcttattacttgataaattaagtgttatctgtttaactgtaacaatttctgttcactcattgacattttactctcttttctttgtatcatagtgacatttcggatagagattttgtaaagtcaatcgtcaaggctgttaaaaaagtgcagaagaatttcttccaacgaagaaatggagaaatagaatatcaagatttctcagtccctgcatgtaaactcactatcactatgcacgagtcaccaaagtaagtagtgcctctcttacgatttcatttaggaaaattaatgatattctgatgaaacatacattgcttcagtggtatgtcatgtgaaagtattgatcgaatagctaagttaaatcattttagctactagtatttccacaaagtaataaataaaaaaatgctaaaagcttgtgtagtagattgttaagttttacttttattatatttttagtacatctctatcatattttaacttgtataaaatgtctactatattttccttcatcatttgctttctaatttattattggaaaaagttcaacattttcttcttaaggatagattagaaactgtgacattaatttgcatgaaaagattagatcccctaggtctcgtttcctgataactttttttttttcatttcgatgtttctatttatgtacagtgaggaagccgttcaagttacggtgctaaatgaattttaccagatgaagaatcagtcaccagtgccctcatacgaggtcctaatttacatttgctgtcttgttagttgattttctttatatatgtttattggtatcatttcatgaactgacatggagatttatatatcgacagttcaaattttgggtcgaccttacgagaccaaagggtaacgttttcatgattgacgcaagagatctttccattgcatggtcagaggactccaaccattggacctggctccctctcccaaaccaaaattcaaagtaaaacttctcttaaaagtatttcttatataaattgaaagaaatatcttaaatcacgaaaatatataccttataacgataatatttctagatttattgtctaatactaagcacaatactttccagtgaatcagtgatggaaattgcatttttgaaaagtgctagctggctagacgtagctggaaagtttgacactcgatatttgaccccgaggacaaggtacgaggtggtgttcgtagtgaagttagaatacacattcgaatgggagacactagtgaagctaaagctagacttgccgaatacttgggagaaaccgcaagaacagagtgtggacatgtttgactacataagtgaccaatggctcgatattccagttggagagttcaccacatcgaagaaaaacgtcggggaaatctcttttgcaatgtacgaacacgagtgccaactgtggaagtcaggcctcttcgtcaaaggtgttacaattcgtcccaaatactaagtcattttataagcatgtatgttgttggtctgagatatatatagtggaaatgctcgctttgaaccataatcttagtttcacctcccaaatgtttgttacaatgttacttgtgtagatagtttgaccggtttcaaaacttatactctatttactctcttctgcattggttatcacatccataaccaccaaactattgaattctataactgaccaaacccaaaccgaatttttagaatatccgaacagttcccgactctctatcctattagacccgaaaccgaaaaaaaagaactgattgggacgagtatccgaatgcccaaacctaccaaagttgtaggcctagagataatcctatcgaaaaatgaccaacaacattttgcaaaatttgatattcaaccgattttaattaaagtccacaatagtcatccataaaaaatattgtttacaatgataaggtgcggttcgatactaactctattttggtattcggatgattgatcaacaacattttgcaaacattgaaaagaaaacgtaaatttcgtttcctaaaaaaaaaaaaaattcgtttcctcacaatataataaataatttacaaagaaaaaaacgaaaaatggcaatgtgactcactcaatcggtgactcgctatagtctgtgaagaaaggccaatttcgccataaagttcacacctttgatctcctttgtttctgggtttctcctaaatcatccaaattggtatcgaatttgcccttctccgattcaatttcttcacgatctcaaaacccagaagaaagaatcatg

SEQ ID NO: 17625 - DNA, 3003 bp, Unknown
  misc_feature (1)..( 3003): 2750-1469P.txt file - cDNA_ID_1810388; gDNA_ID_1621193; Annot_ID_57519
ctcggtttcaactgaaatatggtttcggagaacctgtgataactttgccaaaaccattcactaaaccataaccaggttaatacttatctgagtcagaacaagaattccgaaggtttgaagagctgaccaaagaacaaaacggtcccggttttgtcttctcggataaggaaaataaatggatgatcagccacaaaatctatcttcttaggaggtggccccatatcaagagcacaaccgtcatcttctacatcagcagttgcagccgcagcttcagcaccttcttcatcgatctcgacacaagctttatggtacattgacactgaatgcagtactcccacttgattcaaaacgcttgtagcagaaaaaccgaattcgatcttaaactttggaattctaaattcctcaagttcaactttgtatctcggaatgtgactatccaagaatccaggtgtagatgctattttcttcaagagataatccaatccatctttcttgtcagggagatagaaatacattgagaatttgcggttggtatcatcacggcctcgtcggtaaggaccttgaaaccgttataagctcttactttttgtgtctcgtagctggtcatgaatggcacagagactgtagtgccattgaccatgtggaagtctctgtcttttgtatagtacttttcaaatggtctcttccaagctcccttgaaatacaatgcgtttgcgtaaatcttgttggttcggcttgtcacagattcacgaggaagaagatctttgatgagattattggtgtgatcttcaacccatgaattcacctccttacgcacttcttcagccttcaaacaaaaaaaacacatattggatgatttttgaaaacagtctcctaattcgaattatgatttgggaatcaacatacattacgaactattaggtttccaatttgactggttgagtatgttctttaagtcaaacagctattacacacttcatctagaaacaccaaataacgtttctgcaaaaccctaattatatttcttcgaaaccctagtttcttttttgctgttaaagtggaaaattacctttgatcggaaatctacgggaacgtaaacagccttgaagaagttctcgaagagagccttgtatttgggatcaatcggtagtgatttctcaatccagaggccattcaccgccctcatctttgggccgccactagcgctgctgtcggcgtagacgatggatgatagttctcggaagacggatttgagctcatcgattgaagaagatctgaggaaggagaggatttcaccggcgactaagccacctccggaaccagcggcgtgcatggtgatcgcagagtttattgacgccggcgagaagatgacgttagattccgactcagaagataagacgtgcctcccaaggatcatcgcgacgtcgttttgcttcttcatagcctttttcacattcatctttggtctctccaactagatagagaacttgcaaaagggtggaggattatgcatggtctatggagggacagttatatatagtgaacaaatccattaagaaatttttaattattattagggtttcttggaaaactagtcactttgcaatccaggtgtataaatcaaacacttaaaaatgactactttgcaaattgtaaatagtaatatgactactttcccaaatatgtttgaaaaaattaaaatgattacttttcacttatctcaaattatttttacaatggaatataaatagatttttctatactaaacctctgtaaattaatactcgataagttccacttcaaaaaacgaaccaaaggtcatatttcatccatgcatgttcgaacatgcaaagagaacttactaataatgtttggtcccaaattcaagtattctctggttctctttgcatggatgaaagaagatggccatatttttataggaatgttcagaaggagaattcacaatgtggagaagatagtgctactggtttatattgaagtcaggttaaggtttatgatagtttcaaggacattgatgcggactaattggcatcagatagtcgtgcttccaagactaatatcaggcgtaatgggttttactaatacgattatgaaacagcctcaagaaaaaaggcaaaaaaatcgtattggagcaaaaaagtcgaagaaatatcacgaatatgtgttttcgttagcgaataaggcgttttcgtccaaaacgcatcgtgaatcttatttttcgtatttttttcagaaaatggctcacatatctgcttgtgtaataattttggttctgtagtcttgtataactttaacactttaatttcgatataatggaatgattttaaaaggaaaaaaaaataataaaaaagaagtaaataaatcgatttttattaaattagaaaacaatttaattttggattgaaaaaaattaacgtactagttcaaaacgccaagttaatatctcggatagtcctactttctcatgattcagttctttatagaccatctaaatcaatccgtctatggatctaaaatcgttcttgaaactaacatgatgaaacggtccctagataggttggccgaggcaaagaagaagaagtcagctcttaactctaaaaaccaaaaggaaaaaaagaagtcagaccttactcgttttgtaaagatttagtcagcgaagaagtcgactagtgttcgagtggggaaacacgttgtcaactcttaagtctaaatctttgaccccaaaaaagagagcaagttgtccactataattctgtcttcttatgcaactttcatttttggccacctaaagtttcaagcaaaacaacaaaaatgatcttttagaataattattataataataacgacgattaatgaactctatatatctcacaaaagaaggacatgtttgcaatcccaaccaagaagataaacaccttagcaaattcaaagaagaatatatcaaacatcttttgtttctaagaaataagctctctgattatg

SEQ ID NO: 17626 - DNA, 3000 bp, Unknown; identical to SEQ ID NO: 8095
  misc_feature (1)..( 3000): 2750-1469P.txt file - cDNA_ID_1810408; gDNA_ID_1621193; Annot_ID_57514

SEQ ID NO: 17627 - DNA, 3003 bp, Unknown
  misc_feature (1)..( 3003): 2750-1469P.txt file - cDNA_ID_1810432; gDNA_ID_1621193; Annot_ID_57506
gtatttgtagaatctgctgaaaggagatgacttttatcggattcggcttccatctaatgtggttagtccaccagggagagagtttgtgattgcatcagtgagagctgtaagtctatgtctacctttttggttgatttctttgtgattgttctttgattgtttgctagtgctttcccatgtctggaggtgtaaattacaggctttgttttaagtctatataaaagactctttgtaaccatggtggttttgttttagtttcactctttgaactcttagtaggctacacctttctagtaataatctaattctactctttcgagatatgagagcttgtttatataattggatcggtatgaaatggttagtcgttttgtaatacacttacagatttgtttctaggctagactgataaagacaacactcgtttagacacccttcttgctttttcccacttttcagtcagtttatgtgtctgttatagaacaatatacttgtttgattgcagagatgtctaccacgggatggcttggatgagcatttcattatacacatggtaatgcccttttttggtataaacttttgttgagttcaaagtttagtttgcgccttagcattttaactactacttgagtgtattacagagaaagttgggactatgaatatagttcaaaactgtgttcggcacagtttgtttacttgctaattgctatactgtctccgtttgcaggaaggtgctaacatcttggcagttagttatggttctcctggggcgtgtcaatatcctcgccaattgaaacttgtaagtgaactcgattatcccagcttctctttttatttacactctaactgagataaattggacatggactgatcctttcttgccttcggtctagaatcagataatactgatacaattatgaatgcggatgatgtaattgagtcattatctttccattcaccaatattttctgtgatttaatatattttgagtcatattctagagtacagtatcgcaccctctttctctactgtgcctaggtattttcagcataagtggactatctataagtgttctgtaatatgttgatagatccgcagaaacttttgtgaggaaatagtaataccgtcagaagattagatatgtgagagtatggtcttaggatcactgtaagcattccataatgttgtgattttgcggtgtggtgtgaagtaattagtgttgggtgactgtgccatgttctgtgagtttttttgtgctggtctctctaagtgtcactcatagtgatattttctgatagaatccgaccttgggttctatcacatctcttgtctgaacactgaaaccgtatattcatgaaggaaaaaggttacattatcgttagagcttctgactttgattatgtatgcgttctaatctacgtttttcgttttgcttactgtagccagcaaaatggtcgtttaactctcacacaattctgaaaagcagtgagcaggcgccaaggtagaataattattgtgttttttttttgcatcaaaatggcttaactttgcatgatcctggatgtctatattcgacttgtgttctatagatataaatatatttgtcagttcatcaagttatatcaatcaagaaataccattgcttctccaccctttagcccaataactaatatttttttatcttatccttacctgactgtttcacagaactccaatattcactgaggagattctaggcagtgagaatgtagagggagaagttgaaccaccaccagagagatcattttgggcgaaatatgtgagtaatacgataaagatcttttgatgattccttctttattttaggtcttgatgtaactttcatatgatacgcagtggatgtatttgataccgctgggactcgtagtgatgaatgccgtgacacaagcatcaaacatggctgaagaacctgcgggtggacaggcaggaggtgcacaagtgcaaccagctgccaggagaagatgattccacttttacttctcccaaagcaatgaaaggtagaccacgccgcaattactatgcacaaatttctcttttacctagcagtctttaaatcttatgatcctaggagaatacatttatatatttgtttggctatcttcgcagctgtggatttatattatttggttgtaacttataagtcacgtggaattaaatgaattcggagtttgcatggaaatatcaacaaggtttaggaagctgtctttgaagtgcgttataagatcaaatctgatttttagcttatgttgttgtagctgcagctggttagagatgatgattcaacagatcttcatgtaaaccatcttgccatcatttggttttatgtaacctttaattttaatcctcgatcggtgtgtttttgtactcaccaatcgggaaatcaaaaatcttgtcttcatgacatatcaagaacaaagacatttagcagcttccatatcttgttttgatcgcatttcacctgtccaaccacatgtttgtcaatttgtatttgttagtaaatttaagggaagtcaagtcgtttacaggccatgagagaaatcatttataaaataattataaactgaaaaaataaaatatataaagggtttattttctcaaaacccagtttttagggatgttattatggaaatgcgggcctaaacgggcctttagcaattcaaatattagcccatagaatgtacaacttttattttttatttttcttaatcataaacgacgcagttcttgtgtcgatcttcgctcatctcttctaccacgagcagactgtagccacggcgaccaaaaggggaacaaggatacgattacgacggaatactccgccggaaagttatttctcgtccttaacggtgccggagtagtgtagaacaggtcaatagttaatttccacgttttagtttggtgatttgagggattttaggctcttgattggttttggaaaatctgattcagggattgaacaatatg

SEQ ID NO: 17628 - DNA, 1398 bp, Unknown; identical to SEQ ID NO: 8135
  misc_feature (1)..( 1398): 2750-1469P.txt file - cDNA_ID_1810443; gDNA_ID_1621194; Annot_ID_57545

SEQ ID NO: 17629 - DNA, 1404 bp, Unknown; identical to SEQ ID NO: 8115
  misc_feature (1)..( 1404): 2750-1469P.txt file - cDNA_ID_1810443; gDNA_ID_1621194; Annot_ID_174681

SEQ ID NO: 17630 - DNA, 3000 bp, Unknown; identical to SEQ ID NO: 8116
  misc_feature (1)..( 3000): 2750-1469P.txt file - cDNA_ID_1810451; gDNA_ID_1621194; Annot_ID_57541

SEQ ID NO: 17631 - DNA, 3000 bp, Unknown; identical to SEQ ID NO: 8116
  misc_feature (1)..( 3000): 2750-1469P.txt file - cDNA_ID_1810451; gDNA_ID_1621194; Annot_ID_174677

SEQ ID NO: 17632 - DNA, 3003 bp, Unknown
  misc_feature (1)..( 3003): 2750-1469P.txt file - cDNA_ID_1810455; gDNA_ID_1621194; Annot_ID_57540
tgtgacaatgttttggaggattatgacttattaacagtcgatcgatttatcgaatttagtgttatatattaaaatattaattattcaaaaaaattggatcagttatgtttcaaaatagcgttagattacatggctctatgccaaagttgggattttatttttgtttgtagtttttttaagtggggaaaagataagaaggttagaaggaatatattcatttcggagaagaaatcccaaagcaccatcacaaaaagatgcttgaagttcaagcaactgtggcctctatttttttataagccgacttactttattgtcactaatttcatttctttctttctttaagctcttagtttgcttcaacaacaattagctaaaagttaaacattagctttacttggtttaactaaaaacaaaaactttggtttctttttttcaaagcaaaatacaatttagcttaaaatcattattgaaaacattaataaagaaagatgagaacttaaatgattttagggcggatgatttgctaatgctaatatgcatcatatcactatgaatcaattttgtagataatagtgatgatgattgtgaaaacacaaatatcgtgataatataagtaggaataatatatgtgtgtatctatactcaaaaagtggtaagaaaaaataaaaagtctagtaaactatgtaaatgtggctggccaagtttatacggttggcatctatcgcgggagttgtattttcattttttaatattgttggcgcaataagaatctatctttattcatcaaagaggagaagaatcgattccaattctcatgcaatttgaactttgatttaatatttaaattcaaaagttataaccattttcttattttatcttggtcagaattgtgtgcggtaattgattaatttaatttattgtacaaataattcgtttcacagccaagatttttaacatttctggcaaagaaaaacactgtttttttatttattccaagaaattaatatctgaaaaatgtgttaccatgtatagctgcacaatcgtcagtcctacaaaagccaaaaaaggttatagccccagcaagctttaaccaataaattaaaatggagaaaagaagaaaaacatatggtaaaaataaaaagaataaaagagctttaataagtagaagaagaggtccccaacgttaactctatctttacacattgatgcataattctccacatattaatagtccgtgtttataatatgtataactttaaaaaattgttccatattcttatgttaatttttttgttttaattcaatattcattgactggtattggtctacattttaacatgtacatgctttcccttaattaatacttaatatataacctctaataaatttctgattcaattcaaattttattcttagataatattctctcttttttgtgtgtgcatatcagcctcagccatattcattgacttattcttgttctatgtaaatatgctatgggacctcccactcatatatatttaggttgaccatttattttacatgcatgcaattgaatttaggggttaatctaaatcgttgcgtatatgaattatatatgattttagtttgtatattgaaaaatgcatcgtcgttctatacataagctagtttagtagctaatagggcaatattaacaaagttgattttctggtttgtagtgtccatacaagtaatttagttaattatctcgtttgttcacctttttgtttcttttttcttttgctagctagttaattgcggatgtaaactacatcttttactaatcgatgaatggaaaacgtttttgtcgtagacaaatattccaccgtacctaacggttttggattgcatgtatataataaatttgttccaaaaatatacggtctattaatttataacgaagctcatcattgcttagaattgtatattcacctcataattagccaaaaaggtttaccctaccataaatgataaaatccctagccttgtggaatttgtttcgttaagatatttgtatgtatgcctccaattacgatatatgacgatgtagacaaactataagtctagtatacgactctcctcgtgcggtcttaattgaatagaatacatagaactttaatatattcactttaaaagtttatattttcctataaagaaaatatttacaaatctttgattactatttactccaaatcaagcatgattaagaaaatagtatatagaacaattgtatgataaatttggatttaaaaattacttctaaattataaggtagtaaagaaaaagaaaccaaaaatataagaataatagatgtgcaatatctttgattcaggtgaattatattttaacttagatatctcaagtcattttaatgtttatatcaggaaataaagaaataaaaaccatcatgcaacaaatcatgcatatatattagatacatccgtaaccgctttttttcgtcttttttttttgtttttttcgtcgtcacatccataaccgttttgatatgagatctccgatgttcaaaattcaatttcccccaaagatatcaatttaatatctaatatatactattattttaagtttgcgcagtaatttaataatctgagacagacatgatttacttaatgtatacgtatagtggcttttacacacattttatattgaaagaaattcaaaggtattcaagctaagaggataaaaaacacaaatgaaaaagatagcgacagtatcttttcacaaaggaacgtctgtgtactagtctgaaactttagttctcttccttactaacgataaaacatatttaactaaaccataatttatttacaaacaaaacaaaaaagacgagagagagaaaaaaaagccgtcatctgatctcttcaaaaacgcatcgtattctctcacatttttgcatcacattcgtttcttgaatcccctctttcagagagagaaagagagtcagagagagagagagagagaatg

SEQ ID NO: 17633 - DNA, 3003 bp, Unknown; identical to SEQ ID NO: 17632
  misc_feature (1)..( 3003): 2750-1469P.txt file - cDNA_ID_1810455; gDNA_ID_1621194; Annot_ID_174676

SEQ ID NO: 17634 - DNA, 3003 bp, Unknown
  misc_feature (1)..( 3003): 2750-1469P.txt file - cDNA_ID_1810459; gDNA_ID_1621194; Annot_ID_57539
tattactgtaaacctccagcacttctgttccacgaaaggtacgaggggtctccgagttgcctgaaaccattaatacagaagatcatttcactgtacacgttccaaaatctgaaaagtgtaataatgtcttaacaaaatgaagcatgcatgaccctgagagtgacgtaccttggcttaactagatacaatacggcaaatgtaacagccaagaacaagcaaatactgcctacagtcagataagcaatcccgaggaaatcattccttccgccgagccagctagttgttgacagcactagcttcttctgcccattgaagctgtaagtgttgtagttgttctgcaacaagaccgttatggtatcacccgcgtgtaggtctgtctcaatcttcccatacagcttcctaaacgttggcaaagccgcggttcgcatccagactatgaggtcttcttgctcactcaactatccaacagacaactcttacacttgttaaaatcctatcagaagaaggaatctaaattgatcgatattcaaggattttttaccggtttagaaatattaagagttccaccgcctattggtgctcctttctgaaaatttttagggaagacatttttcccaaacttgttttctctgtcactcttccatgagatacctttcttattcacaagaagttgttggctatttcttgaaaagctataagtatcgttgaacaaactccaagcaacaagaccacatggcacaattggttctccacccacattatcctcaggtgcacaggtcttcacatcatgctcttcttttggacttcttagttgtgcatcgtttcgacttttcacatacctaatcatatacaatcaaccagaggagtaactgtattaatgcagggaaagtaacaggcaaaagcgataactattactaagcagataaggcaaagtaccgtctatggttttggtagaaattctcaagttggtagtatacatagacaggatgcttcatagcttttgtcacctgaaaaaaatgaaaggctttagaaagagccatacctagaagaacagctaatatacacaatcatagaaggaactaaattgccatagaagaagacatgtaccgttattgttctcttacagatcttatctccttcaccctgtatgtaagcgaccatgttgtttctagaagatgttggaatacagtctgtgtcatatcgatcaacaatctcgactaccttcaagtatgaatgaaacatatcctcaataaaaccacaaaaccgaagctggaaaataaaccattagaaaaggcagaaaaacaatagcatgatgcacatactccctgagaagcaaataagcagatcactccaaggggaatgaagacaaccccagcgacaagaaatgtcaagatcacctgcaaatggccatgaacaataagaaaacagcaaaaagagtaagagtcatccttttccactattgtaacattgaacttacccatcttggagtaagaattggcttgcacgctggaagctcttgctgagtaaacctagaatctggtaaagaaaattggttccttgtgaagttaagaacagagaatccaaagcaaccatacagtttgtttaatgggagaacaatgtttaaagttttcgaacaaaagatttcaaccaatgtcacatcaaaacccaacaactaaacgtgagtttcaactacacggtgtaggacaacttgaaaaaccaagctgatgaacctatacacctcttgtatatacgaatctacatcaaacccagagtatacaagaatgctattagaaatcaaagaaacatgcaaaaacacatggtgatcgaggtatagcaacaccatcaacagagaaatttttgtcaattcaatacgaattccaggaaagaaagaaaaaaagaagacgaaatttctaaggacgatccatgactatacaaaaagttcgaccaaatcagaagattagaaggatagatagagatagaaagatcacattttggtcgcttggaggtttttttgacaccggaaatctcagacgatccgcctcctccgacggtggaagatgccgcggtggaactcatcaccgaagaaattgattagaaatgaaatctcctctacaactatattccgaatcgaatggacggcatgagtcgttttgggaagaacagatcctacgcgaatgaggggaagaatgttaggttaggcttatgaaacatatctacttggggaagatgtatagatcttttagatgaagaagcaaaactctcgacaaggaaaaaagaaagacgactttgacaaatgctgttatcatgggagggaaaaataaaataataataagccaatttttatgttattttttaaagggcaatttgggtaaagaataaaaaacggaagttttcgaacaaacccggcaaatgcggttaaactgccacgtggattacacgtcattaataattaacccactcgaatacagtcaaataacccacctgtcatttttgacggatccaattttgaagatattttacttgtaaaaaatctcttgacaacatataatttcgttgcctagtagcttcttcacagcttctgatctcactagtgttcgtcatctttgttcgattgaagtttgggaagtggtgatggtaataggagcagcagcgcgtgtagccatcggcggttgtcgaaagctcatctcgtcacatacctccctcctcctcgtctcttctcagtgtcgccaggtaaatcgtctgtcttctcaatcgattcttctgtatttacatatttactcgtggattcgtccgcagtctctcacggagaaaaggatcgagtggtttcaaaatcagaacaatggttatatatctgaattcagtttttctagtatttctcggatcttgtggtctcatggaggaaaagtgaattgggtttcctccggatgtttttgttaaagaacaaatgtgaatacgttatgataatgatactctgttaattcaattgattatcagatgagtatg

SEQ ID NO: 17635 - DNA, 3000 bp, Unknown; identical to SEQ ID NO: 8129
  misc_feature (1)..( 3000): 2750-1469P.txt file - cDNA_ID_1810467; gDNA_ID_1621194; Annot_ID_57537

SEQ ID NO: 17636 - DNA, 3000 bp, Unknown; identical to SEQ ID NO: 8121
  misc_feature (1)..( 3000): 2750-1469P.txt file - cDNA_ID_1810479; gDNA_ID_1621194; Annot_ID_57533

SEQ ID NO: 17637 - DNA, 450 bp, Unknown; identical to SEQ ID NO: 8112
  misc_feature (1)..( 450): 2750-1469P.txt file - cDNA_ID_1810491; gDNA_ID_1621194; Annot_ID_57526

SEQ ID NO: 17638 - DNA, 450 bp, Unknown; identical to SEQ ID NO: 8112
  misc_feature (1)..( 450): 2750-1469P.txt file - cDNA_ID_1810491; gDNA_ID_1621194; Annot_ID_174661

SEQ ID NO: 17639 - DNA, 3000 bp, Unknown; identical to SEQ ID NO: 8141
  misc_feature (1)..( 3000): 2750-1469P.txt file - cDNA_ID_1810509; gDNA_ID_1621195; Annot_ID_57554

SEQ ID NO: 17640 - DNA, 488 bp, Unknown; identical to SEQ ID NO: 8136
  misc_feature (1)..( 488): 2750-1469P.txt file - cDNA_ID_1810524; gDNA_ID_1621195; Annot_ID_57547

SEQ ID NO: 17641 - DNA, 3003 bp, Unknown
  misc_feature (1)..( 3003): 2750-1469P.txt file - cDNA_ID_1810528; gDNA_ID_1621196; Annot_ID_57580
gactggttgaaacgcagtgcctgcatttgtgactgcatgagtttacggaatcagacagttgcggtttcaagcattataaacctttttgaacgactggtttaacggttaaaaattggtgcatttttggaaggtttatgactggttaacggatttacgtttatggtagaaaaattacgggtttatgtttttagcaagctaattacgggtttacgtttttggcagaaaaattacgggtttacattttttttgcggcaaaattacggctttacgttttttggcgggaaaattgaaggtttaggttttttggcggaaattacgggtttacgtttttggcggaaaaattacggatttctttttttggcgggaaaattacgggattacttttttggcaaaaaaattaagattttatgtttttggcatgaaaattacgagtttatgataatgttatcatcaatgatgatatctatcatgactatggtatgttgatatgatgatgaagaagatagtatgatgatgatggtgatggtaatatgatattatgagagggtaatgatgatgatgatattgtgttgataatgaataaattgatgggttgatgaagccatttgaattttttttgattatattcaatcggtttagagattttagtacaactaagatgtcatttttgttttttaaggtctaattaaatttatctcttttctggtatggttattcgattctccaataatataagtttcaattttcaagttttgaaaaacaaacaaacatagcttttagtttttttatacttcttcaacgtatgaatcaaatatgcatatggaacatcaaaatcaaatatgataactccatataacatattcttaagaatcttcaatgactttaacctcaccagaatcagcacctggtgatttttaactcttttcacttttgttttttaatgactcttctaaaaagatgttcgtaatacaaaaaaattagcttccaaaacttataaaagctatatagatcttactttaaaaaattaacaaatgcattgagctcttaatcactttctaatgaattcttttgttctacatatatcatgaatcatgacaaataacattcaatacctacatacaacttaacaaaattacattttttaataaaaaaagcccgcgatttggttcgggtttcgccctagtactaactagagaagaaagagattttcgaagaaaaaatatggaacatgtgaaaagtttagaaggtatgacacatattgcttaaacaaaatcataagaggatggaaagagacactgtaagaaaaaatgaaacaaataaaacgagtgcttgcaaaaagatagggagagtgatagctctttgtaaaaaaattgtgaagacagaaattcatatacatattgaaaagaatgtgagaaaatatgagttgttaaagtaaagtatagataagcttatgaatatacttctatataatatcttatttttagacgagctatactaactaatgcagcgaagataaacaaaaaagaatagtaaatttacggatttcaaaatgagaaagtcgtcgaagttattttccataaaacaatttatttcatacataaaaagacgtcgtgatcctaaatatctaaagctaaagagagagtcatgagccaaaaaaatgttcttttgataaatgttgtaaacctaaaagttgtattaaagttatttttagttttgtatttaaattgtaactattgtcatggtaattttaaaattcaaagagtttataatattaacaacaagtagacatataaaaacatatcttttaaaaaatttctataataattttattcacacaaaaaaatattaaaaagttttacaaatagacccatgcgtagcgtggattcataacctaggatttagaacgactaatcgggagttgccacataaataattaacatatttagtatctaattaattaacatttttgaaaacaaccaatcgggagctgccacatcaataattaacatatttagcatctaattaattaacatttttgaaaatagcaattactttatattttaaaatgtaaaaacaaaggaactaacaaatattaaatttaaacttataaaataggaagctatataattataattatgtaataataaactcaaacccttataggattttatacaactaatccaacatttttttaatataacttaaagaaacgtaacaaggacgtggtttgatggtggtgtttttaactgtatcaatttgaatcaagttctcgaagatatgctcgtggcaactaccatgagaattccactttttcggtcatgtgacaaccacacaaatttccgagtttcacgagttcaaaatcggtgtttcaactcgtaacttagccttgaacgcataaaagcgaactgaatgaattagagttgtaatgttgtatttatttttgtagattgttttaatccgcttcttgctaatctctgtatttctgtcaaaaatcaaaaataatataaaatctaattgtctaccaaaaaaaaaatcattcatagtccatgagtagaatcaaaacaagatagattcaaactttatcaagatagataaataagctaagaaatgaaatagttcctcaaaactaaatttagtgtcaccaagaggcaagatcaaacttttcaaataagggaaagaagagaattgcaacgtgattaattgatgaggtcatagtaaaagtcaaaaatctgtgtgactcaaaacgggtaaaaacaataattgggatgtagttgataactctaaaaaaaaagggacaaaaatgagatttgcataaagtagagatacaaaattgagaagaaaaaaaaatcctcttcactaaaaaaaaaaaaacttccgttatcgatctctatctctctcttcccccacaagggtggcgattcgaggagtttccatggtggaacagaaaccctagagcctttatgctgccactaattatcactcttcactattgaattggggatg

SEQ ID NO: 17642 - DNA, 3003 bp, Unknown
  misc_feature (1)..( 3003): 2750-1469P.txt file - cDNA_ID_1810543; gDNA_ID_1621196; Annot_ID_57576
attagtcacgtgtataggaaagtgcagacgggttagctaactatgcttttttttgtcattagagttttattctttggaggttgttcctattgattttgtttctgttgtaagcgatgatgtgcttaggttgggtctacgtgactaaggcaagtgtctatgtagtttttttttgaagttttaataaaatttagatagattttttcccggtgactagaagcttcatcgagataggagcgatactacgaataaggtatatggggcagagtgccctaccaaaaaaaaaacactaaaaaaataatgaagatatgtggagtttaatgtagttattttgaaaagaaatgtgattgaatcctaactatactcatctaaccaagcttataattcgtataattcgtataattcgtattgggctgcatgtttgagaaagactgaccatattttttagtatcataaagttcgatcagtaaaaataagaaatgatagcttagttagattctagtaatactatcatgttttaattgtttatatataacaattgtatcttacgtaatataattcatataacaattgcatgttgtaaaattataaaatatcttttcatttaaaagattcgactaaatacatatctcaaaaatgacatttttagtatttattaaataacaacaattgtttttaaaacacatgcaatttgaattgaatgaatgaaaataacacaacatcactagaatataaatcactactttagaaaatcatagtcaatgacatactttttaaacaatatttttgcaggaggagagagctggattaagatatgagataacttgcacaaaatgtgatggacatctaggtcatgtcttaaaaaatgaaggttttccaacaccaactgacgaacgccattgcgtcaacagcgttgctctcaagttctcttccgctatcacatctcagtgataaacggatccggtttagttctccggaatcaactctatctatctatgaacgttgattactaagagacctttctacttctgttagaatgagaacgttgtgttcttcaattcatcgcatttatgaactattataaaattgaatgttttgtgttttcattatttttagtaatgcttatgtacgtatcattgaaattgtttgtgtcatatattgtgccatttttctattgagtgttaatgtattatcgtatttaccaaaattatatatagttattgtctaagtctgcgaatcatttgccatttggatacacatgcatgtctaaacaaacgtacacatggggatgtgaccgaactatttttttgtttgtttgttcttttaatatcattgacgtttttaccttacttctcaattgttcttctttttccgtaatcgacaccgtagagtttcgacgatgacatgacgcggccaaattcaaagcaattttaatccattcagttcttgtctatgattagatgccttgagttccttcctgtcatcaaaacgaatttaactagatccattggattttcaatatgttggtggcggagatgtatttttttaatcgcaaacaaaagagataaagtttgtgaaattggtagagaatgtgttgatggagttgacagatatggtgatggagttgatggagaatgctttgatgaagaaatcacggtgttgatgaagtaatcgcggtaaaacaaagtgatggagacaggaaaaaaaatgacggaaacgatgatgaacggtgtttgagatagggtaaaattgtcaataaaattttaataagtatccaatcctgtaaacccaataagagagtgtcatttttcaaaatttttggccccaaatatatctgattgtataaaagtccctaccaatcacaccctatgttttccgttattgttttagtcatatataccatattcaaattttatgtaaattttatgtaaatatgttcttcaaattttttaaaaaatcctggctgacccggtccaagtatgtcagttagctaatagttgtgtttgttagtcggagaagtctatttagctatataccacctttcatgatactattactatcccctgttgttttttttactaatacgttattgggatgagatgccatctaaaaggggaacttctccaattctgttcgttgggaccactccagattttacaatcccggcttatgagttttgagaccactctcacttattttatctacattttgtaagagtgccgtgtttcatacttagttatttctctgataacaaacaaattggggttctgttcttaaaatatataaaagcccgtgaggcccaacaaacggaaagtttggcccgtgaaagaaagaaaaacaaaacttatttattgaaaaatgacacgtgcagaatcatttactaaaccagacaataaccggttaacggtttaatagttagcaacagaagaaccaaaggattgtcttcttccacaatcagaatctgtctgtgtggcttgtaacgcttcaatgtcagtgaagtctttagctatatccacaaaaataacataacaagattaaaaaaaagagagaatattttatctctctagacttgacaatttccctctctttctcactccctatacctgtatatgtatatagaatcgtatatatctggagaaatacacgaggtgttctcgtctctgacgacgtggtctattgtcttcctcagctttagtcaatttcttctttcggaaacttggttctgtgatattatccaaacttaaagtttgagtctttagggtttatgggtgacaacaaaagtacatgcctttaggctttagttttgtgggtttcatctcaaaatggcaattagtactatgttagggtccatctcttgttgcccctctcccaaggtatttccttccttgtgcttacttgtgtatctgtcgactgaaaaacctctcctttatgtatttaagtttatgtgcaaagccttaattggtgattgaatccttagttctgatttgatttcaggggtatgagatg

SEQ ID NO: 17643 - DNA, 3003 bp, Unknown
  misc_feature (1)..( 3003): 2750-1469P.txt file - cDNA_ID_1810547; gDNA_ID_1621196; Annot_ID_57575
tttcaaaggagaaggttacggtaatccaaccgatgaacgtcattgcgttaacagtgtttcgatcagttttaacccggcaaaatcttcctctataatctgaggatatgattgatcgatcatacaacatcttctaatcagattgtgttgttaaaattgtcatcatgtagtgaatatgcactttctgtggtggtcaatataatgcaacaaataataagactcattagatattggatggttactggtttctcttaatatgttatagaacatttaataacgatttaattatctaagggatcattactagtgtttcttaattataactctttagaactgaaaaaaaatattatagagatttcgttttgacagaaaaaaactcaaaccgatccattttactttccattttgagtgtgttgattttaaaaaatatgatacgtttttattactaatgaaaatagaagatattatttccaatagtggatctcatatgtgtatccatatcattattttcataattgcgtaaaatatctcgtttcatatatatttgtgtgagataatgggttgagattaggagtgggcattcgagtaagcgggtcgggtttgggtaaaatccaatcgggtacgggtttttcgggtagataaatttaggacccaatagggtaaatataaaatatcggttcgggtttaatcgggtttggctataaatttttgggccttattttgaaactgatagccggatttccgggtaaatacccagatttttcgggtaaatacccggattttcgggtaaaatttcgtgtttcaggtaaaatttagatttttgattaaaatattcgggtatttttgggttcgggtttggatcgggttcggattcggtttttcggatagaggaatttaggacccaataaggtaaatcttcgggttcggtttcggttccaattttttgggtcagtttcggttctggttgttggttccgattttttcccagcccctaattgagacgttggtttgtttgccaataatttgtcatgtggaaaagtactcgaatgtgtttttgattcactataaatggttgtcccgttttgagtttgataattcattagcatgtgactatatcatatatctatttattacactagaagcattattctctttttaaagcaatattctctgttcgaattaaactctagctatcttttacatacctactaatggatattttcatttgggatatcgaccaatcaaaaccacaaattttagctgatcaagatgggatctcaagtttggtaggtatggaaaaatacatacgtacacatccagagagcgaagaatttgtgatgaatttctaataaatatatgagttgttgagaaaacaatatttcaactaatcttatatttataatggtcccatgcatgatacaaacgtggtcgttatctcgtccatatgaccagtgaccacatatgtttcaatacgtgtttcatctcaatgcttcacaacctccatttgtattgttccgcacaacttaatgttatgtacaagttgaatatgcttattatgtagtaaaatgtaaaagacataaatcaattcattagtagtaaaacaatatattctcgttgtcatcagtcattactcatcatttggcaccaaaatgcggaagccaagccagctgtgaatggtaagtatattaatctctattcacatgcaacatgcactagtgtgtcagtaatttggtccatgacaatacacatgtgtgatctagatgtccttgcttcttcaaaggttacagcacaaccatatctagtatattactagaaagagaaaagaaattttgttatagcattcatctaaaatgatcagagaaaagaaattttgttatagcattcacctaaaatgatcagaacaaatctgaatgaaaattcagtatatatatatttagacgtttagattgtgcagacaaaatgtatttagtgctacaactgatgtgtaatgtatggactactttcataaaaagtgcagaataatatgcacggaacaatattattacaagttctaagattattcatatctacaaagattgatatttttaataataaataattcgagtttccaaatcgatttttaccatttttattttaaattgaaaaagcaaaacattcatgcaagaaaagttaaaaacaagttagtggaaccaacaaaaaaaaaacagtgttaatgaatgtcccaagtccgaacttttataatggtatcttttcccatgatttattcatgatttagacaataatagggatttacggattttgccattttttgctataatttttacgaatttgttattttgttaaaattttacggatatactatttttctatatattaaaaaatgttcacatttatgagtctttttttgcttaaatacacattttataagttataacaaataataaattctataaacaaatagaaccgattaatttaaatataataggtaaaacacatgttaaatcgtatttttatattataaatttttttttattcataaaactttagacaaaaattgcaaaatccataaatatcactaagaaaatggcaaaatccgtaattgattccaaaaatatgacaaacttttgaatcttttaaccaaaaaaagaaaacagaggtttttataacaagttcagtttacaattttcaacgtgtggtttctctattagaaccaaaagaataatatatatccaaacgtgcacaacgtgtcaatttttttgttacaaaatgtgaagaacaaaaaaaagtgtgaaaagctggttatgagttatggatctgcgcctataaatatacaaacatttctccatccactccatagccaaaccatactctccaaagtccaagctcacaatgaacacttcgtaagtctctctccctctctcaaaatgttctttttgtctgaaatgtaaacacaattttttgttgctctcgttgctcagcccaaaaatggaaatggaaatgaaaatg

SEQ ID NO: 17644 - DNA, 3000 bp, Unknown; identical to SEQ ID NO: 8151
  misc_feature (1)..( 3000): 2750-1469P.txt file - cDNA_ID_1810552; gDNA_ID_1621196; Annot_ID_57571

SEQ ID NO: 17645 - DNA, 3000 bp, Unknown; identical to SEQ ID NO: 8148
  misc_feature (1)..( 3000): 2750-1469P.txt file - cDNA_ID_1810562; gDNA_ID_2926132; Annot_ID_196992

SEQ ID NO: 17646 - DNA, 3000 bp, Unknown; identical to SEQ ID NO: 8148
  misc_feature (1)..( 3000): 2750-1469P.txt file - cDNA_ID_1810562; gDNA_ID_1621196; Annot_ID_57568

SEQ ID NO: 17647 - DNA, 3000 bp, Unknown; identical to SEQ ID NO: 8148
  misc_feature (1)..( 3000): 2750-1469P.txt file - cDNA_ID_1810562; gDNA_ID_2926132; Annot_ID_138791

SEQ ID NO: 17648 - DNA, 3000 bp, Unknown; identical to SEQ ID NO: 8148
  misc_feature (1)..( 3000): 2750-1469P.txt file - cDNA_ID_1810562; gDNA_ID_1621196; Annot_ID_174739

SEQ ID NO: 17649 - DNA, 3003 bp, Unknown
  misc_feature (1)..( 3003): 2750-1469P.txt file - cDNA_ID_1810633; gDNA_ID_1621198; Annot_ID_57614
ctcatctcaaaccaaagtagaaagggaaatctactttaacattttttctttaaacttgacccggagacccaaaacccgtctaacttcagagctggtgtgagtcttcaagtcatatgggtcctgaggtctctccccaaaagttaagtatcttatctactaatctctcactgttctctgagtcattccggaggaaattcgtatctactatacatttagtaccgaattgatgtatattcagtattggatagttaaacttgttccttaagaaaaaaagaaatcgagttcatggactgagatttgcaaacgaggtcttatcatatcttcttgtaaaatacccgggttctgttctcaaataatttcaggtatcaggtattacatgaaccgaaattgatatccgtgagtattttttattacccgaacatatatatacatatgaggacatatatactgataacttgagtttgtgaattgtttaatgattggattatggaacaagttaaaaacaaggtttatttcttgttttttattattgtaataaaggaaaacttgttataattttatggatagttttatatatgtttgggtatatctggacaaggttttggtaaataatattgaaacccaaaataattttggttatttattgggttcttcaacctatacccgaagagaacctatagcttaaataatacgtataatcgaaccagtcttaaacttctaaaccgaacccgaaagactcgatccaaacccgacccgaatacccaaatttcctcaccttagactaaaacaaatggactcctcccttatcaaaagaaaaagaaaaacaattgggctccttgactctaaaaaacacaatgggcttcgtgagataatataatgagtccattagtcatctataaattcagtgactagcgaaaaacatgagaaacatatcggaagcttcttcaccaacctggaaagagaccaccggtaacgtctccaacttatttccctcttctttccatttttttttcaatttacttcttcttcttcttctccagtttcttctatcggtttatttttcaattccatcttcattgtttcgcagacccatagataggctttgatttagggattttaatttcaatggctgcgatcgcgaatccacgcttgctgcttaattattcctgcgaatgacattttcttaagtttaacctttttattttctgttatgttgtttgctcgtttcgaatgaggtcactttttaactcgttcatggatttagcttctaaaaattgatctttttttgcagaaatatgaattaggcatatatatatatatggttttagaggtcaatatacattgtattattcgtttgcttcattcttacaaaagtagagctaaaaaaacctgagcttttaagtcaaagccttattcaaaaatgtttttgctttctaatttctaaagcttaagcattgatgttactgttttgtgatgttcaggtggactggaatcagttttggtagagagcgttgttaaagtttcgtccattaacaggctgaagagttcttcctcaatctgtgtaaccaccacttcgtgctcctcctctatctgtttctcattccagtctcgtctttcgatttctctagcacatgcttgtctcctctgctcacttgttccgcgttcaagctctgattctctctttccctgcaaccatccttttgcctcgcataccaattggttctcaaagtgttgagtttcgtggaatgagtttgtcctttgcatcaattcatctctgaaatagtccattatcagatgttcttcgtggatccaaatggcgtgtctttctttgactcggttccatagctgtgctgccttctcttcaacctcatcattgtattcatcttcactctctctatcaacagtatcacaattctcatcatcatcatacttggtatctgtctcttgtcctccttccatgcaagatgcttcatccattgagccccattcatccaaattgaaaggactaatgttggccaaagactcaaaccgctgaatcgtttgcatgagcttttgtttggttcctgcaaaatcatttacataacgtatgtttcagaacttcgaagtctgaaaaaatctaagaagagaacttgcttcgattgcaatgaaggaaatctatactcactttccacattgtcaaggcattgactgaaagaagagtctgatgtttcgtcatattcctcatgttgaatctcaaacactgagacagggctgttgtgctccttttcacactgtaagttctcctgaccatgatcattacatattaggccaaccaaatcatccaactagtaaagtgcatagggtaataatttcagtatgttaaatgttactcttataagactcattcattaagttgttagattcgtagtcataaaggaattaaagggtacatgctattatatgtaccaaggacaaagacagcttctgttttgtcttcatgtgaatttatattaacaaacagctgcacgtgcatttagagacagcatgggcgaccttacggttgaagcaaagtcaacccataagatctctattctcagatcacattgtcactttatttctttcttaattttgatttgattctgttttctctttatttatgcatgtagtagtcaaagtatgtgattaattaatgttataagtacgagtttctatttctcttaatatagtattcttacctcaggtcccacttcagtgtcggctagtattactgctgtgcaagaatcttcgccgacgcagtgtaagttgtttttaacactctgtttttcaccgcactcctcaacgttacttccccatgatgatggtaaaaactccgatgtaaaatccaagtcagaccaactgctgcaggatgtgccgctggtggtggaggatcctgtggttgttgtcgtgttcttggttgtgtactgatgaggttcaaaatgtgatatgtcctcatgcaggtccttagacgagtgccatcgcacgatg

SEQ ID NO: 17650 - DNA, 3000 bp, Unknown
  misc_feature (1)..( 3000): 2750-1469P.txt file - cDNA_ID_1810633; gDNA_ID_2926139; Annot_ID_138962
atctcaaaccaaagtagaaagggaaatctactttaacattttttctttaaacttgacccggagacccaaaacccgtctaacttcagagctggtgtgagtcttcaagtcatatgggtcctgaggtctctccccaaaagttaagtatcttatctactaatctctcactgttctctgagtcattccggaggaaattcgtatctactatacatttagtaccgaattgatgtatattcagtattggatagttaaacttgttccttaagaaaaaaagaaatcgagttcatggactgagatttgcaaacgaggtcttatcatatcttcttgtaaaatacccgggttctgttctcaaataatttcaggtatcaggtattacatgaaccgaaattgatatccgtgagtattttttattacccgaacatatatatacatatgaggacatatatactgataacttgagtttgtgaattgtttaatgattggattatggaacaagttaaaaacaaggtttatttcttgttttttattattgtaataaaggaaaacttgttataattttatggatagttttatatatgtttgggtatatctggacaaggttttggtaaataatattgaaacccaaaataattttggttatttattgggttcttcaacctatacccgaagagaacctatagcttaaataatacgtataatcgaaccagtcttaaacttctaaaccgaacccgaaagactcgatccaaacccgacccgaatacccaaatttcctcaccttagactaaaacaaatggactcctcccttatcaaaagaaaaagaaaaacaattgggctccttgactctaaaaaacacaatgggcttcgtgagataatataatgagtccattagtcatctataaattcagtgactagcgaaaaacatgagaaacatatcggaagcttcttcaccaacctggaaagagaccaccggtaacgtctccaacttatttccctcttctttccatttttttttcaatttacttcttcttcttcttctccagtttcttctatcggtttatttttcaattccatcttcattgtttcgcagacccatagataggctttgatttagggattttaatttcaatggctgcgatcgcgaatccacgcttgctgcttaattattcctgcgaatgacattttcttaagtttaacctttttattttctgttatgttgtttgctcgtttcgaatgaggtcactttttaactcgttcatggatttagcttctaaaaattgatctttttttgcagaaatatgaattaggcatatatatatatatggttttagaggtcaatatacattgtattattcgtttgcttcattcttacaaaagtagagctaaaaaaacctgagcttttaagtcaaagccttattcaaaaatgtttttgctttctaatttctaaagcttaagcattgatgttactgttttgtgatgttcaggtggactggaatcagttttggtagagagcgttgttaaagtttcgtccattaacaggctgaagagttcttcctcaatctgtgtaaccaccacttcgtgctcctcctctatctgtttctcattccagtctcgtctttcgatttctctagcacatgcttgtctcctctgctcacttgttccgcgttcaagctctgattctctctttccctgcaaccatccttttgcctcgcataccaattggttctcaaagtgttgagtttcgtggaatgagtttgtcctttgcatcaattcatctctgaaatagtccattatcagatgttcttcgtggatccaaatggcgtgtctttctttgactcggttccatagctgtgctgccttctcttcaacctcatcattgtattcatcttcactctctctatcaacagtatcacaattctcatcatcatcatacttggtatctgtctcttgtcctccttccatgcaagatgcttcatccattgagccccattcatccaaattgaaaggactaatgttggccaaagactcaaaccgctgaatcgtttgcatgagcttttgtttggttcctgcaaaatcatttacataacgtatgtttcagaacttcgaagtctgaaaaaatctaagaagagaacttgcttcgattgcaatgaaggaaatctatactcactttccacattgtcaaggcattgactgaaagaagagtctgatgtttcgtcatattcctcatgttgaatctcaaacactgagacagggctgttgtgctccttttcacactgtaagttctcctgaccatgatcattacatattaggccaaccaaatcatccaactagtaaagtgcatagggtaataatttcagtatgttaaatgttactcttataagactcattcattaagttgttagattcgtagtcataaaggaattaaagggtacatgctattatatgtaccaaggacaaagacagcttctgttttgtcttcatgtgaatttatattaacaaacagctgcacgtgcatttagagacagcatgggcgaccttacggttgaagcaaagtcaacccataagatctctattctcagatcacattgtcactttatttctttcttaattttgatttgattctgttttctctttatttatgcatgtagtagtcaaagtatgtgattaattaatgttataagtacgagtttctatttctcttaatatagtattcttacctcaggtcccacttcagtgtcggctagtattactgctgtgcaagaatcttcgccgacgcagtgtaagttgtttttaacactctgtttttcaccgcactcctcaacgttacttccccatgatgatggtaaaaactccgatgtaaaatccaagtcagaccaactgctgcaggatgtgccgctggtggtggaggatcctgtggttgttgtcgtgttcttggttgtgtactgatgaggttcaaaatgtgatatgtcctcatgcaggtccttagacgagtgccatcgcacgatg

SEQ ID NO: 17651 - DNA, 3003 bp, Unknown
  misc_feature (1)..( 3003): 2750-1469P.txt file - cDNA_ID_1810641; gDNA_ID_1621198; Annot_ID_57611
ggaacagtcctctcggcatcacctttgcctgatgaaaattttggaagctccttggtgtcttctaaggggggtaactctgcagttccatccagcagtataagtagcatgatgggaggtgttgttggggttggttcgacttggaagctctttaatgaggattcaacttcggtggaagaaggtgttgtcatatttgccacctatcaaactggactagtggtaaatattccagatatttgttcatagtcaatttactggttacgcttctggaaatgatccttttctgtttttgtcaggtaaagctcattccaaatttggaggtgtatgcacaacttcctaggccagaaggggttcgggaaggttccatgccatacactgcctggagacgctcaacaggtaattcttctcctggtataactgtgtactttacatgtactgttttacgtaggtaaaattttgcagaaaattattcgaaggaggcagaagatagggtttcttttcttgtcattgcctgggatcgtcgagttcaggttgccaagttggtaaaatcagacataaaggaatatgccaaatggtcacttgacagcccagctattggtgttgtttggctagatgaccaggtgtgtatactgatataagttttttctaagcaaatacatattcatgagttttcggcttttctctgcatattcagttgctggtgatcccaactgtgacgggccatttgtatctgttcacaagagatggtgtggtaattcaccagacaaacttttcagtggctggttcttcagggaatgacctgatttcctatcatacgtactttactaatgtctttggaaatcctgagaaagcttatcacaactctatgggtgtcagaggggcttcagtgtacattctcgggactgcacatcttgttatctccagacttttgccgtggaaggagcgggttgatgtgttaaggagaggaggtgactggatgggtgcatttaacatggcaatgtcactcttcaatggtcaagctcatggagttgttgacctccccaaaactgtggatgccataagggaagccatagcacccagtttagcagagttgctactttcctatgtagatgaagtattttcttatatttcaatagcattttccaatcagattgaaaacaatggagtaactcatgagccaagtagtggaatcaataatgtcaatttagagatagaagaacaatacaatcgtgttggtggtgttgccgttgagttctgtgttcatattaacaggatggatttgctctttgatgagatattttccagatttgttgctgtacaacaaagaggtatatttttcacatctagatgtattaccatcaacttccttttttttgtgctacattttattaaggaacaggggtcagtatcattccaactatataataattgtttaaaagatgttactacgataggatagtaactacttttctataggttgtctgattctgtatctttatttttttaaatccttagagagctttggtccaccgatcttgaaatatcttattttggtatctcctttgggttggtgtttttcttatgcatgccgatttctataatacatacacatacgtgttgtgctgtgtgtttgcatgtatgttctccattacttttagtttagttcttctgtaaatggtttagagtaattgtatagtttgctaaatgaaacagcataatactttcatatggataaattgcaatgctgagtataatattttgattccttgaggttagtaagtaagatataaacgttctttggaaactgctttccttttccacctcagtttggtactttgatctttgtttaaatctattgatgacaattaattccttgtgtctaatgagatataataatttctcttgatgactagatacatttttggagcttttggagccttatattttaagggatatgctcggatctcttcctccagaggtatcttttgtgaaattataagatttcctcaagagtgccgttgtattttattttatgatttttttgtttcatctcagatcatgcaagcgctggtagaacattatagtaggaaaggatggctacaaagaattgagcagtgtgttttgcacatggatatttcttccttggatttcaatcaggtcacgtttgtagacaatttcacgtgttctgttcggtccttttcttcaataagttgatgtgttgatttagtattatggttgaattttgatgttttcctcattgacacttaggtagtcagaatttgccgtgagcatgggctttatggggccttgctctatcttttcaacaaagggttggatgatttcaggtcacctctggaggaactcttgattgtcttacggaacagtgagaaacaaagggctacagccattgggtatgttatgttaagtcgttgtactttgttctggctgaataaaaccttacatgcaaaactgaactcgagagcctagaattcaaactgctcattcatttctacctaacatgcaactaatcctagagcgcacctatgcatatatctaattgcaatattattgttgtgtaagaaaattttgatttcctttatgacgcaatatagttgtctgaactaaggtatattttgcggccacataaatgatgagttctttttaactctgtttctttttcaggtaccggatgcttgtttatttaaagtactgctttcttggtttggcttttccaccaggtaggattctgttatggtttcactgcatgttatgatctgcaatcgaccttattgtatccagtgacctataactttatataggcattttcctctcacaaacttatttggagttttatctgcaggacatggaactctaaatcctacacgatggccatcacttaggagtgagctgattcagtttctactggagaaatcaaatgcccatgattctagtacatgtgtaacatctcgattgaattatttgaacctctaccatctgctagaaatg

SEQ ID NO: 17652 - DNA, 3000 bp, Unknown
  misc_feature (1)..( 3000): 2750-1469P.txt file - cDNA_ID_1810641; gDNA_ID_2926139; Annot_ID_138965
acagtcctctcggcatcacctttgcctgatgaaaattttggaagctccttggtgtcttctaaggggggtaactctgcagttccatccagcagtataagtagcatgatgggaggtgttgttggggttggttcgacttggaagctctttaatgaggattcaacttcggtggaagaaggtgttgtcatatttgccacctatcaaactggactagtggtaaatattccagatatttgttcatagtcaatttactggttacgcttctggaaatgatccttttctgtttttgtcaggtaaagctcattccaaatttggaggtgtatgcacaacttcctaggccagaaggggttcgggaaggttccatgccatacactgcctggagacgctcaacaggtaattcttctcctggtataactgtgtactttacatgtactgttttacgtaggtaaaattttgcagaaaattattcgaaggaggcagaagatagggtttcttttcttgtcattgcctgggatcgtcgagttcaggttgccaagttggtaaaatcagacataaaggaatatgccaaatggtcacttgacagcccagctattggtgttgtttggctagatgaccaggtgtgtatactgatataagttttttctaagcaaatacatattcatgagttttcggcttttctctgcatattcagttgctggtgatcccaactgtgacgggccatttgtatctgttcacaagagatggtgtggtaattcaccagacaaacttttcagtggctggttcttcagggaatgacctgatttcctatcatacgtactttactaatgtctttggaaatcctgagaaagcttatcacaactctatgggtgtcagaggggcttcagtgtacattctcgggactgcacatcttgttatctccagacttttgccgtggaaggagcgggttgatgtgttaaggagaggaggtgactggatgggtgcatttaacatggcaatgtcactcttcaatggtcaagctcatggagttgttgacctccccaaaactgtggatgccataagggaagccatagcacccagtttagcagagttgctactttcctatgtagatgaagtattttcttatatttcaatagcattttccaatcagattgaaaacaatggagtaactcatgagccaagtagtggaatcaataatgtcaatttagagatagaagaacaatacaatcgtgttggtggtgttgccgttgagttctgtgttcatattaacaggatggatttgctctttgatgagatattttccagatttgttgctgtacaacaaagaggtatatttttcacatctagatgtattaccatcaacttccttttttttgtgctacattttattaaggaacaggggtcagtatcattccaactatataataattgtttaaaagatgttactacgataggatagtaactacttttctataggttgtctgattctgtatctttatttttttaaatccttagagagctttggtccaccgatcttgaaatatcttattttggtatctcctttgggttggtgtttttcttatgcatgccgatttctataatacatacacatacgtgttgtgctgtgtgtttgcatgtatgttctccattacttttagtttagttcttctgtaaatggtttagagtaattgtatagtttgctaaatgaaacagcataatactttcatatggataaattgcaatgctgagtataatattttgattccttgaggttagtaagtaagatataaacgttctttggaaactgctttccttttccacctcagtttggtactttgatctttgtttaaatctattgatgacaattaattccttgtgtctaatgagatataataatttctcttgatgactagatacatttttggagcttttggagccttatattttaagggatatgctcggatctcttcctccagaggtatcttttgtgaaattataagatttcctcaagagtgccgttgtattttattttatgatttttttgtttcatctcagatcatgcaagcgctggtagaacattatagtaggaaaggatggctacaaagaattgagcagtgtgttttgcacatggatatttcttccttggatttcaatcaggtcacgtttgtagacaatttcacgtgttctgttcggtccttttcttcaataagttgatgtgttgatttagtattatggttgaattttgatgttttcctcattgacacttaggtagtcagaatttgccgtgagcatgggctttatggggccttgctctatcttttcaacaaagggttggatgatttcaggtcacctctggaggaactcttgattgtcttacggaacagtgagaaacaaagggctacagccattgggtatgttatgttaagtcgttgtactttgttctggctgaataaaaccttacatgcaaaactgaactcgagagcctagaattcaaactgctcattcatttctacctaacatgcaactaatcctagagcgcacctatgcatatatctaattgcaatattattgttgtgtaagaaaattttgatttcctttatgacgcaatatagttgtctgaactaaggtatattttgcggccacataaatgatgagttctttttaactctgtttctttttcaggtaccggatgcttgtttatttaaagtactgctttcttggtttggcttttccaccaggtaggattctgttatggtttcactgcatgttatgatctgcaatcgaccttattgtatccagtgacctataactttatataggcattttcctctcacaaacttatttggagttttatctgcaggacatggaactctaaatcctacacgatggccatcacttaggagtgagctgattcagtttctactggagaaatcaaatgcccatgattctagtacatgtgtaacatctcgattgaattatttgaacctctaccatctgctagaaatg

SEQ ID NO: 17653 - DNA, 3003 bp, Unknown
  misc_feature (1)..( 3003): 2750-1469P.txt file - cDNA_ID_1810645; gDNA_ID_1621198; Annot_ID_57610
aaatttcaatcatatacattcaattttactatacattttaactatttcttttatcataataaactgccttttaactctatacactccaacttattgatgatatttgaattttaaatagtaactcatatttttttcagtatttaatttagtatttctttaaaataaattttaatcttacaacttcgattttacaatacaatttaaatattattttttatcataatagaatacaatttaattcgattgtatacaattcaaatacaatccaaattttcaatacaaatacaatttaattctatacactccatcttattgttagttttcctttttaattaataaaattataagttaaatttttagatatagaaatataaattagtatatgtaaatatgtttatttattttttaaagaattttttttgacatatgtcaacatctcaatgatagacctgacacgtgtcatgatctcgtgagttagtaactttcaaaactgtactttatataataagatatatgcttatatgtttcatatatatatatatatatatttattagatcgacaataacattaaactatcattactagtttacttttttaaatatgattttaataagtatcatataaatgtacaaagtgtatacaatacatgtttttatatatatatatatatatatattttttttatatataagcataaatatatagacgaacaaacaatgtagacagacctaggcacctagctatgatctatgcatacggacgaaccctattatacgtacgcatgattattgaatataccttcaaatataaacttgtgagcgtaaggttattatgttttcaatactgacgaatgacgattgtgattcatgttttgaaaaattaataaagtttaaaccatcgaatgcgtaaaccaattattcatcttttaccttaggaaaaagctggatatcattatcatatatttattaagcatattaaaccagaccaatgatttaagtcgaaaatgacagctttcaagctttgcttattggccaataaataacaaactaaaaaaagaagaaattttttaaaacgaactggtgaagtctcgtgttatcacgtgcatggagccagtcagacagagacatcatcaggtgcatgatggaccacggtagtccatttcttccctacaaccatacacgtggcctttttacatttaacagtcaaacatctggtcaacaacactctcatctgggcttccttacatcaaaccctactttttttttgtttatcaaaggcccaattgtatataagtgaaaagtttccaatgggcctttcaaggattattcccagcccaatatttctggagattaggtttatttatcatcgccaccaaagaaatttgagccgaagcttcataatcgtagtctgaggtatttttctcgatcctcaaacatttccaacacctaaaggcttattcgttacagatttctcaccaatcttcggatttattgtgctcgtacgataagcatatattagtaaatttagtggctatttaggaaatttctcgtttgatttcttgttgttgttgagatttgaatctgttgtttatggtttttgtgattacttggttttgcagagacaatgtcgacagtcggagaacttgcttgcagctacgctgttatgatccttgaagacgagggcattgccatcactgtatccttaaatctcttgacattttctgaatctcatgtcctagctattgttgtcgctatatcttgttttggttggatccttttcattatcgagacaacatggtgtgagtgtttattttaggtttatggagctctcttttgatgaaatagtcagtaccaagattcatgtttgctttggcacactcaattgttgggcatgtgttaaatgacctatctgcaaagttgttggtttagggttaggaattaggattcttttttactggatttaagaaacgtgtttgttctattagttttgatatgtaggttcaatgtttgggttaggtatccttaaccctattattgatagtctgataagattgcgactttggtcaaagcggctggtgttgagattgagtcttactggccaatgttattcgccaagatggctgagaagagaaatgtcacagaccttatcatgaatgttggtgctggtggtggtggaggcggtgccccagtgtctgctgccgcacctgctgctgctggaggagctgctgctgctgcccctgctaaggaggagaagaaggtacaaatttaaagaaacaaaaacattatattgttatatcttttagctaggtttgcttattgatactctctatgttgtttaattgtttgtaggacgaacccgcagaagagagtgatggagatcttggtttcggcttgttcgattagttgtctcctttcattttacgtttcatatgttctattgctttagttgctttgagattttaagttttgtcatttcgacactactacagtttactcttatatcatgtactggagttagcaattggctcacgaccttctttgtagttcatgagagttatcttatgctcaaaatgcattggagcttattgaatttgacttttggattcagctgcgtcttctttcctaccaaatctcagtctatttataatttgatcttgaaatagaaaagaagaacaaaaaatcaggaaagatatgaacatctgttacaacttgataattcagtggatacgcaggtttcatgaaccatggtttctcagaagttttgtaagttttttactgattatactaatgttgtcaaatgtataaaaagtaaaaattgaaccttctgcataatccagaggctttcattttttttttcttttcttcttgtgatggactcgttttagctgaaattagaacgtcggttagtaccggcggagaatgttcggagtcgagtcagtcagagagttctgataataccaaacggctactttgaagttcacggctattaagaagtcgcacatg

SEQ ID NO: 17654 - DNA, 3000 bp, Unknown
  misc_feature (1)..( 3000): 2750-1469P.txt file - cDNA_ID_1810645; gDNA_ID_2926139; Annot_ID_138966
tttcaatcatatacattcaattttactatacattttaactatttcttttatcataataaactgccttttaactctatacactccaacttattgatgatatttgaattttaaatagtaactcatatttttttcagtatttaatttagtatttctttaaaataaattttaatcttacaacttcgattttacaatacaatttaaatattattttttatcataatagaatacaatttaattcgattgtatacaattcaaatacaatccaaattttcaatacaaatacaatttaattctatacactccatcttattgttagttttcctttttaattaataaaattataagttaaatttttagatatagaaatataaattagtatatgtaaatatgtttatttattttttaaagaattttttttgacatatgtcaacatctcaatgatagacctgacacgtgtcatgatctcgtgagttagtaactttcaaaactgtactttatataataagatatatgcttatatgtttcatatatatatatatatatatttattagatcgacaataacattaaactatcattactagtttacttttttaaatatgattttaataagtatcatataaatgtacaaagtgtatacaatacatgtttttatatatatatatatatatatattttttttatatataagcataaatatatagacgaacaaacaatgtagacagacctaggcacctagctatgatctatgcatacggacgaaccctattatacgtacgcatgattattgaatataccttcaaatataaacttgtgagcgtaaggttattatgttttcaatactgacgaatgacgattgtgattcatgttttgaaaaattaataaagtttaaaccatcgaatgcgtaaaccaattattcatcttttaccttaggaaaaagctggatatcattatcatatatttattaagcatattaaaccagaccaatgatttaagtcgaaaatgacagctttcaagctttgcttattggccaataaataacaaactaaaaaaagaagaaattttttaaaacgaactggtgaagtctcgtgttatcacgtgcatggagccagtcagacagagacatcatcaggtgcatgatggaccacggtagtccatttcttccctacaaccatacacgtggcctttttacatttaacagtcaaacatctggtcaacaacactctcatctgggcttccttacatcaaaccctactttttttttgtttatcaaaggcccaattgtatataagtgaaaagtttccaatgggcctttcaaggattattcccagcccaatatttctggagattaggtttatttatcatcgccaccaaagaaatttgagccgaagcttcataatcgtagtctgaggtatttttctcgatcctcaaacatttccaacacctaaaggcttattcgttacagatttctcaccaatcttcggatttattgtgctcgtacgataagcatatattagtaaatttagtggctatttaggaaatttctcgtttgatttcttgttgttgttgagatttgaatctgttgtttatggtttttgtgattacttggttttgcagagacaatgtcgacagtcggagaacttgcttgcagctacgctgttatgatccttgaagacgagggcattgccatcactgtatccttaaatctcttgacattttctgaatctcatgtcctagctattgttgtcgctatatcttgttttggttggatccttttcattatcgagacaacatggtgtgagtgtttattttaggtttatggagctctcttttgatgaaatagtcagtaccaagattcatgtttgctttggcacactcaattgttgggcatgtgttaaatgacctatctgcaaagttgttggtttagggttaggaattaggattcttttttactggatttaagaaacgtgtttgttctattagttttgatatgtaggttcaatgtttgggttaggtatccttaaccctattattgatagtctgataagattgcgactttggtcaaagcggctggtgttgagattgagtcttactggccaatgttattcgccaagatggctgagaagagaaatgtcacagaccttatcatgaatgttggtgctggtggtggtggaggcggtgccccagtgtctgctgccgcacctgctgctgctggaggagctgctgctgctgcccctgctaaggaggagaagaaggtacaaatttaaagaaacaaaaacattatattgttatatcttttagctaggtttgcttattgatactctctatgttgtttaattgtttgtaggacgaacccgcagaagagagtgatggagatcttggtttcggcttgttcgattagttgtctcctttcattttacgtttcatatgttctattgctttagttgctttgagattttaagttttgtcatttcgacactactacagtttactcttatatcatgtactggagttagcaattggctcacgaccttctttgtagttcatgagagttatcttatgctcaaaatgcattggagcttattgaatttgacttttggattcagctgcgtcttctttcctaccaaatctcagtctatttataatttgatcttgaaatagaaaagaagaacaaaaaatcaggaaagatatgaacatctgttacaacttgataattcagtggatacgcaggtttcatgaaccatggtttctcagaagttttgtaagttttttactgattatactaatgttgtcaaatgtataaaaagtaaaaattgaaccttctgcataatccagaggctttcattttttttttcttttcttcttgtgatggactcgttttagctgaaattagaacgtcggttagtaccggcggagaatgttcggagtcgagtcagtcagagagttctgataataccaaacggctactttgaagttcacggctattaagaagtcgcacatg

SEQ ID NO: 17655 - DNA, 3000 bp, Unknown
  misc_feature (1)..( 3000): 2750-1469P.txt file - cDNA_ID_1810649; gDNA_ID_2926139; Annot_ID_197367
cttaatgctcttcttgcctatataattcaaagttaaatccaaaacctgtttgattactaattaatcaaatgtagttaagggagaattttgctcaccaaatagcctctgaaaccagtttggattacaacagctgcgtaatcttctcttgcggtataagtacgtcttgtaagatttggtaactccttcgttgtcgaaggaggatgagtttccgatgcggcggagacggtggccggcggtgtagatgcgtcgtacctctgttctgtaacagaggataaaacggttgggttgatgatcgtcgttgtttctgtggatttctgcgccggagcgtcttttccgacgccggaggtcttcaccggagagtcatgattcgtagattttctaaataaccaacgtctcttctctttcttctgcagaaacagagcatatgaattatagtaatatacaaaacagagaaacaagaaacagagcatgtgaataaaaaaacaagaattaagaagcaagatctcgagactagagaaagtatacgaaccttgtcttcatcttcgtcgacttcattaccatgagcattgttgttgtgttctttcttggtgggagatcggaaagctcgtttcacggcagtgagccaagaagaagaagaaccgctcttcttacccattggaggttaggtaggatttaagattctcaacagagtcaagacatggtagtagtagtagttatgttcctgttttgggacatagaagagaggatgagagatttggtttagattcttgcgcagaaatgaggaagagagagaggagagtggtgggtggatcttgggaaacagaaatgtcaataaatttggaaggttgcttaagggagacttctgactctgaccacctctttaactgcgaccatgacagcgatgactcttcctcttcatttactttctccacttcatttattttgttatttttgtttaactcatttcactaaactagttatatcacattattattattatatcatgtacctacttgcatttgttgtacattcaattctagaagatttgttgctgttaaattgaaagatagagttttgttgttttgagagttaattttaaacaaatacaatataaactaattctatttcattatgcaaaacaattcttctttcccttggttcgattatgcaattatatttcatacattctaatttttgggttttcttaagatatgcatgaatattattctacttatatatatatatatatactagataaggcccgcctaagatataaatttattcaaatatgtattgataatatttaaaatttgaatggtaaatagtgatccacacttttctaatgttaaatttagtaatttttgaattaaataaaatttcaatcatatacattcaattttactatacattttaactatttcttttatcataataaactgccttttaactctatacactccaacttattgatgatatttgaattttaaatagtaactcatatttttttcagtatttaatttagtatttctttaaaataaattttaatcttacaacttcgattttacaatacaatttaaatattattttttatcataatagaatacaatttaattcgattgtatacaattcaaatacaatccaaattttcaatacaaatacaatttaattctatacactccatcttattgttagttttcctttttaattaataaaattataagttaaatttttagatatagaaatataaattagtatatgtaaatatgtttatttattttttaaagaattttttttgacatatgtcaacatctcaatgatagacctgacacgtgtcatgatctcgtgagttagtaactttcaaaactgtactttatataataagatatatgcttatatgtttcatatatatatatatatatatttattagatcgacaataacattaaactatcattactagtttacttttttaaatatgattttaataagtatcatataaatgtacaaagtgtatacaatacatgtttttatatatatatatatatatatattttttttatatataagcataaatatatagacgaacaaacaatgtagacagacctaggcacctagctatgatctatgcatacggacgaaccctattatacgtacgcatgattattgaatataccttcaaatataaacttgtgagcgtaaggttattatgttttcaatactgacgaatgacgattgtgattcatgttttgaaaaattaataaagtttaaaccatcgaatgcgtaaaccaattattcatcttttaccttaggaaaaagctggatatcattatcatatatttattaagcatattaaaccagaccaatgatttaagtcgaaaatgacagctttcaagctttgcttattggccaataaataacaaactaaaaaaagaagaaattttttaaaacgaactggtgaagtctcgtgttatcacgtgcatggagccagtcagacagagacatcatcaggtgcatgatggaccacggtagtccatttcttccctacaaccatacacgtggcctttttacatttaacagtcaaacatctggtcaacaacactctcatctgggcttccttacatcaaaccctactttttttttgtttatcaaaggcccaattgtatataagtgaaaagtttccaatgggcctttcaaggattattcccagcccaatatttctggagattaggtttatttatcatcgccaccaaagaaatttgagccgaagcttcataatcgtagtctgaggtatttttctcgatcctcaaacatttccaacacctaaaggcttattcgttacagatttctcaccaatcttcggatttattgtgctcgtacgataagcatatattagtaaatttagtggctatttaggaaatttctcgtttgatttcttgttgttgttgagatttgaatctgttgtttatggtttttgtgattacttggttttgcagagacaatg

SEQ ID NO: 17656 - DNA, 3003 bp, Unknown; identical to SEQ ID NO: 16283
  misc_feature (1)..( 3003): 2750-1469P.txt file - cDNA_ID_1810649; gDNA_ID_1621198; Annot_ID_57609

SEQ ID NO: 17657 - DNA, 3000 bp, Unknown; identical to SEQ ID NO: 17655
  misc_feature (1)..( 3000): 2750-1469P.txt file - cDNA_ID_1810649; gDNA_ID_2926139; Annot_ID_138967

SEQ ID NO: 17658 - DNA, 3000 bp, Unknown; identical to SEQ ID NO: 8160
  misc_feature (1)..( 3000): 2750-1469P.txt file - cDNA_ID_1810653; gDNA_ID_1621198; Annot_ID_57608

SEQ ID NO: 17659 - DNA, 3003 bp, Unknown
  misc_feature (1)..( 3003): 2750-1469P.txt file - cDNA_ID_1810653; gDNA_ID_2926139; Annot_ID_138968
tgtttttgtttctttaaatttgtaccttcttctcctccttagcaggggcagcagcagcagctcctccagcagcagcaggtgcggcagcagacactggggcaccgcctccaccaccaccagcaccaacattcatgataaggtctgtgacatttctcttctcagccatcttggcgaataacattggccagtaagactcaatctcaacaccagccgctttgaccaaagtcgcaatcttatcagactatcaataatagggttaaggatacctaacccaaacattgaacctacatatcaaaactaatagaacaaacacgtttcttaaatccagtaaaaaagaatcctaattcctaaccctaaaccaacaactttgcagataggtcatttaacacatgcccaacaattgagtgtgccaaagcaaacatgaatcttggtactgactatttcatcaaaagagagctccataaacctaaaataaacactcacaccatgttgtctcgataatgaaaaggatccaaccaaaacaagatatagcgacaacaatagctaggacatgagattcagaaaatgtcaagagatttaaggatacagtgatggcaatgccctcgtcttcaaggatcataacagcgtagctgcaagcaagttctccgactgtcgacattgtctctgcaaaaccaagtaatcacaaaaaccataaacaacagattcaaatctcaacaacaacaagaaatcaaacgagaaatttcctaaatagccactaaatttactaatatatgcttatcgtacgagcacaataaatccgaagattggtgagaaatctgtaacgaataagcctttaggtgttggaaatgtttgaggatcgagaaaaatacctcagactacgattatgaagcttcggctcaaatttctttggtggcgatgataaataaacctaatctccagaaatattgggctgggaataatccttgaaaggcccattggaaacttttcacttatatacaattgggcctttgataaacaaaaaaaaagtagggtttgatgtaaggaagcccagatgagagtgttgttgaccagatgtttgactgttaaatgtaaaaaggccacgtgtatggttgtagggaagaaatggactaccgtggtccatcatgcacctgatgatgtctctgtctgactggctccatgcacgtgataacacgagacttcaccagttcgttttaaaaaatttcttctttttttagtttgttatttattggccaataagcaaagcttgaaagctgtcattttcgacttaaatcattggtctggtttaatatgcttaataaatatatgataatgatatccagctttttcctaaggtaaaagatgaataattggtttacgcattcgatggtttaaactttattaatttttcaaaacatgaatcacaatcgtcattcgtcagtattgaaaacataataaccttacgctcacaagtttatatttgaaggtatattcaataatcatgcgtacgtataatagggttcgtccgtatgcatagatcatagctaggtgcctaggtctgtctacattgtttgttcgtctatatatttatgcttatatataaaaaaaatatatatatatatatatatataaaaacatgtattgtatacactttgtacatttatatgatacttattaaaatcatatttaaaaaagtaaactagtaatgatagtttaatgttattgtcgatctaataaatatatatatatatatatatgaaacatataagcatatatcttattatataaagtacagttttgaaagttactaactcacgagatcatgacacgtgtcaggtctatcattgagatgttgacatatgtcaaaaaaaattctttaaaaaataaataaacatatttacatatactaatttatatttctatatctaaaaatttaacttataattttattaattaaaaaggaaaactaacaataagatggagtgtatagaattaaattgtatttgtattgaaaatttggattgtatttgaattgtatacaatcgaattaaattgtattctattatgataaaaaataatatttaaattgtattgtaaaatcgaagttgtaagattaaaatttattttaaagaaatactaaattaaatactgaaaaaaatatgagttactatttaaaattcaaatatcatcaataagttggagtgtatagagttaaaaggcagtttattatgataaaagaaatagttaaaatgtatagtaaaattgaatgtatatgattgaaattttatttaattcaaaaattactaaatttaacattagaaaagtgtggatcactatttaccattcaaattttaaatattatcaatacatatttgaataaatttatatcttaggcgggccttatctagtatatatatatatatataagtagaataatattcatgcatatcttaagaaaacccaaaaattagaatgtatgaaatataattgcataatcgaaccaagggaaagaagaattgttttgcataatgaaatagaattagtttatattgtatttgtttaaaattaactctcaaaacaacaaaactctatctttcaatttaacagcaacaaatcttctagaattgaatgtacaacaaatgcaagtaggtacatgatataataataataatgtgatataactagtttagtgaaatgagttaaacaaaaataacaaaataaatgaagtggagaaagtaaatgaagaggaagagtcatcgctgtcatggtcgcagttaaagaggtggtcagagtcagaagtctcccttaagcaaccttccaaatttattgacatttctgtttcccaagatccacccaccactctcctctctctcttcctcatttctgcgcaagaatctaaaccaaatctctcatcctctcttctatgtcccaaaacaggaacataactactactactaccatgtcttgactctgttgagaatcttaaatcctacctaacctccaatg

SEQ ID NO: 17660 - DNA, 3000 bp, Unknown; identical to SEQ ID NO: 8168
  misc_feature (1)..( 3000): 2750-1469P.txt file - cDNA_ID_1810656; gDNA_ID_1621198; Annot_ID_57607

SEQ ID NO: 17661 - DNA, 3003 bp, Unknown
  misc_feature (1)..( 3003): 2750-1469P.txt file - cDNA_ID_1810656; gDNA_ID_2926139; Annot_ID_138969
aatcttacaagacgtacttataccgcaagagaagattacgcagctgttgtaatccaaactggtttcagaggctatttggtgagcaaaattctcccttaactacatttgattaattagtaatcaaacaggttttggatttaactttgaattatataggcaagaagagcattaagagcattgaaagggctagtgaagttacaagcactagtgagaggtcacaatgtgaggaagcaagcaaagatgactttaaggtgtatgcaagctctagttcgagtccaatctcgtgtgcttgaccaacggaaacgcttgtctcacgatggtagtcgcaaatctgccttcagcgacactcaaagtgtgctcgaatctcgttatcttcaagaaatatcagacagaagatccatggtgagtgatctctataagtttcagaacaccattgttgctctgtttcaacgaccatttttgctctgtttcagcaatcagctatataaagctaacattttgaaatgccttttttgttgttgtgtagtcaagagaaggaagtagcattgcggaagattgggatgatcgaccacacacgattgaggaagtgaaagcaatgttgcaacaaagacgagacaatgcgttgagacgtgagagtaacaatagtatatcacaagctttctctcaccaggtaatagatatgaattcatattaatcgtttgtttgttttcggtaatttgattcgtttcggtgtttgatttcggtgaaaggttcggagaacaagaggtagttattctacaggagacgagtatgaagaagagagaccgaaatggttagacagatggatggcttctaaaccgtgggataaacgagcttcaacggatcaaagagtaccaccggtttacaaaaccgtggagatcgatacttctcaaccgtatttaacccgcggtaactcgagaaccggtgcaagtccaagccgtagccaaaggcctagttcaccatcaaggaccagccaccattaccaacaacacaatttctcatcagctacaccatctccggctaaatctagaccgatacaaattcgatccgctagtccgcggatccaaagagatgatcggtcagcgtacaactacacatcaaacacacctagcttgagatctaactatagtttcacagcaagaagtggttatagtgtttgtaccactactactactgctacaaatgctgcattgccaaactacatggcgattacggaatctgctaaggctagaatccggtctcagagtgcaccaaggcaacggccttcaacacccgagaaagaacgtatcagttcagctagaaaacggctttcgtttccagttccaccgctgccgcagcaaatggatggtcagagtttaaggagtccaagtttcaagagtataggtggctcacaattgggtgcattggaacaacaatcaaattactcttcttgttgtactgagtctcttggtggtggtggagagatatcacctgcttctactagcgattataggcgatggttaagatgattccataatccaaccaaatcaaccggtcatgatttttttcctcccttttttttttttgttatatataaataaaaacaatttgacaaaaagaaccataactttttcagtttttattgatgatctttgagattggtgtgtaattttgtttgtgtttatgtttgtgtgtgtgaatttgtagcttataattggaagtgtttactaactaatctctatataaatatgtatgctcatatttttatctataaatgttgcaattaggatgtgaacaatagtttatcaatctgtcatggtatctttgttaattatatggaatctttttagtataaaataacgaaaattttcactggccttatttgtttttacatgcaaagtgaagttgttaagaaaaccataaaaaaaagctgcaactttgcaacttgagatccacgagcaaggaacattacccatgtgacatgattcctacatgatcagtcttgtcttctacgttatacactactactctatatccacctaaatataaattaaatgcttctgaaatggaataattttaaaacagcacgtagttttcatatcaccaaagaaaacggcagggctggcaaaatcacgaattttttaaacaggtataataaagaactagaaaacactaggcccaataaaaacagtgggcttaaaaagcgttttgatttagggttaatgtgtgcgtaacatgtgatcatagcccacgagtgggtaaggagtgtcttcatcttcttctaccggagatcgagaaatagccgacgaagttttgttttttgagtaaaacagtattcgtcggacaaccgaagcgaaatccctaatttcccacaacacgaaataccaatttccccaattcgaaaacaaacacggtctggtatgccgagaaaattctccatttctacttttcttatacatttgttttggttgtttcatataaatacttctcatcttcttcgattttgttaccctcccccaaacaatataaaaaaaaaaggataaaccctagtttctttctcagactgtttcaagttcagatttttatttctgagcttaactggtgagtaatttgctttctggagagatgtgtgagttacgatctctaatttcattggttgcttcggttatggcttgattcttctctctgttatcaatttggatctggaatcatatatatacatacacaaaaactctgctctttttcaaagttttgatttttatctcatttgacgcttgtttcgtgatagcaatgaactacaattcttctgtatctctgccactaaaagaacctgaatttagtttgaaccatcctttcttctccacatttttttaaacgaaaaagagcagttctcatatcacccattataagcttttttttttggtgtatggtcctatagcatttttttaacagtgattacctgagcttcgtggttaaaaaagagtatggttattggatgaccagatg

SEQ ID NO: 17662 - DNA, 3003 bp, Unknown
  misc_feature (1)..( 3003): 2750-1469P.txt file - cDNA_ID_1810664; gDNA_ID_1621198; Annot_ID_57603
taaataaatctcggtcttcatttcatcttatcttaaggtgtggcttgttgttgttgttgttgttgttgttgttgttgttgttgttgttgttgttcatatatatatatatatatatatatatgtctcatgatgattaattgtacgcttatgcccgatcataaaaatagaaaatcatcatcttgtaataatattaaaataatatgtatgttgaacaattaatatttagttatttactatactcaatctcttctatgagttgacttgtcaattgaaattttataattttattaatgatttggagaagaaagtaattttacatttttccatttttattttaaaaatcatttttattttaaaaatcactttagttcaggttttttgttgctaaaatgtaaatattcataagaataaaaatgtttaggtttacagttatatattttagacttatagacttggtcttatggcaaaaaaaaaggattaaaacatggaaggaaaaacaatcagtttgtcgactcaacgtatgctatgaagcaaacaatgttagagaaaaagataaagtgatacaagattttgaagttcctccaaagtgagttacaaaagatgaaatttggcaatgaaaatttataaaaacttcaaaagtggaagcctttcactggaggccaatggactgattctatcggctttgccaaactattctacaacaggttaatcatttggagaagaaagtaatttagtggttatttcacatatataccaccattcatcaatataacttctatgttacgtttccgttcataaagatatgtgaaaacgaagttcctgtaaatgaatgattaagttaagaaatttattcgctaaatctataaattcatctgatcaacattgttgtctacgcaattgttgttcattaaatctttacggtcacaaaaataacaacctcatgatatgttagaaaaactttaatcatacacttgcaaaaaaaagtgaagcaaaatctaccataaatatgcaattgtgcagtggtcttctcctcttaattttgtttgaagtacgtatattcgaaactttatttcgattataatttttcgtacgattctttataagtaaagcaaaataatgatggattgaagaatcttgaaaatggaaagaaatggacgagaggcttttgaccatttgtatggccagaataacaacactcactaccaaatacaataacgtgattttgtttaatagattagatgcggtaggaatatattattcttcgtgaactaaaaccatgttttataacgacaaaaaaaaacccatgttttataagtttatgggccaaaattgggcttttgtattataaacatgtttacggaagtattcagctaagtatatataaaaaaaaacaattacactaatttatttaaattttattattacctacttacaattagtaaaatttaaaattaacaaaaaaaaaacttttacttacttttagttattgttttaagaaaaaacatcattaattaccctacttttttttttaatactaggaggttctaagccaaaacatcttaattattatattgtttatatgtctaataatatccataaatgtattaaaaaaacttaaaacataaactaaagggtaatagatcataatattattgaatggagtaagaaaatgtataaattataattcaaaaagagaactataatctgcttttctacccaaatgaagtaaaataagacatcaatttgcatttcaatggtcagttttaaaggtaaaattaaagacgttaaacacgtgtaatgtaaaagagatcactcatgagtcatgaccaaccatattcttagtttatataagtaattcacaccccttaaaaagaaatatagtctataatcaatcatacttagcatgaaaacgatgatcaagtttctgctgttaatactggtgatctctcctatgtcgatatgcgccgagaaggacatgatgataaatgaatgccacaatgcagacgtcccagccatatgcatgcaatgtcttgaatccgacccaaactccattcacgccgaccatataggcatagctggcatcgtcataaactgtcttgaatcccacctccatatcatcaccaagcaagttttcacttacaaattataaccaatatacagaaatatcctctaatatatcaattttttcatttgtgtagtaacataacgaatttatcgtcaaagaaagataaaggtgaagtgaaaacagctctggagatttgcaaaaaagacttgtcgacgaatgcatctacaatactgtcggaagccaaaacaagtttgaaaaccggtgattatgataaaaccaacaaatcgataaagcttgcgcttggctttcctctgagatgtatgttcaatctcaaacgtgtcaagttcacgtctccccaactatttagtcaaatcaatatctatgctcaactctctgacgctgctatgaggatcattgatcgcttctaataagtaataactccttattgttttctatataactcaacttcgatcaatgcttaccccaatttgaataaatcatttcctttatgaaatttataaagtcacatatatccatttgttgtagctctcatgttttttttttcttttcaaatttgtcaaaataagttttcgtttgaaccatcattcaatataaatctaaatgatatattgtcttttttttttttttttttttggcaaagaatgatatattgtctatttcatcaaagttggaccactatacgataaattgttgttcttataacgttaaagtaggaaaacagttcagttttcacgtgactaacttactactattggaatatttatcataaactttaattcacgaaaatcattaatgaaaatttgatattactactataatatcgtcttctctattaatttagaatcttattcatccttttccacttgtcttctctaaccctctaaattctctttggtcgggatcactggaaagaaatg

SEQ ID NO: 17663 - DNA, 3000 bp, Unknown
  misc_feature (1)..( 3000): 2750-1469P.txt file - cDNA_ID_1810664; gDNA_ID_2926139; Annot_ID_138973
ataaatctcggtcttcatttcatcttatcttaaggtgtggcttgttgttgttgttgttgttgttgttgttgttgttgttgttgttgttgttcatatatatatatatatatatatatatgtctcatgatgattaattgtacgcttatgcccgatcataaaaatagaaaatcatcatcttgtaataatattaaaataatatgtatgttgaacaattaatatttagttatttactatactcaatctcttctatgagttgacttgtcaattgaaattttataattttattaatgatttggagaagaaagtaattttacatttttccatttttattttaaaaatcatttttattttaaaaatcactttagttcaggttttttgttgctaaaatgtaaatattcataagaataaaaatgtttaggtttacagttatatattttagacttatagacttggtcttatggcaaaaaaaaaggattaaaacatggaaggaaaaacaatcagtttgtcgactcaacgtatgctatgaagcaaacaatgttagagaaaaagataaagtgatacaagattttgaagttcctccaaagtgagttacaaaagatgaaatttggcaatgaaaatttataaaaacttcaaaagtggaagcctttcactggaggccaatggactgattctatcggctttgccaaactattctacaacaggttaatcatttggagaagaaagtaatttagtggttatttcacatatataccaccattcatcaatataacttctatgttacgtttccgttcataaagatatgtgaaaacgaagttcctgtaaatgaatgattaagttaagaaatttattcgctaaatctataaattcatctgatcaacattgttgtctacgcaattgttgttcattaaatctttacggtcacaaaaataacaacctcatgatatgttagaaaaactttaatcatacacttgcaaaaaaaagtgaagcaaaatctaccataaatatgcaattgtgcagtggtcttctcctcttaattttgtttgaagtacgtatattcgaaactttatttcgattataatttttcgtacgattctttataagtaaagcaaaataatgatggattgaagaatcttgaaaatggaaagaaatggacgagaggcttttgaccatttgtatggccagaataacaacactcactaccaaatacaataacgtgattttgtttaatagattagatgcggtaggaatatattattcttcgtgaactaaaaccatgttttataacgacaaaaaaaaacccatgttttataagtttatgggccaaaattgggcttttgtattataaacatgtttacggaagtattcagctaagtatatataaaaaaaaacaattacactaatttatttaaattttattattacctacttacaattagtaaaatttaaaattaacaaaaaaaaaacttttacttacttttagttattgttttaagaaaaaacatcattaattaccctacttttttttttaatactaggaggttctaagccaaaacatcttaattattatattgtttatatgtctaataatatccataaatgtattaaaaaaacttaaaacataaactaaagggtaatagatcataatattattgaatggagtaagaaaatgtataaattataattcaaaaagagaactataatctgcttttctacccaaatgaagtaaaataagacatcaatttgcatttcaatggtcagttttaaaggtaaaattaaagacgttaaacacgtgtaatgtaaaagagatcactcatgagtcatgaccaaccatattcttagtttatataagtaattcacaccccttaaaaagaaatatagtctataatcaatcatacttagcatgaaaacgatgatcaagtttctgctgttaatactggtgatctctcctatgtcgatatgcgccgagaaggacatgatgataaatgaatgccacaatgcagacgtcccagccatatgcatgcaatgtcttgaatccgacccaaactccattcacgccgaccatataggcatagctggcatcgtcataaactgtcttgaatcccacctccatatcatcaccaagcaagttttcacttacaaattataaccaatatacagaaatatcctctaatatatcaattttttcatttgtgtagtaacataacgaatttatcgtcaaagaaagataaaggtgaagtgaaaacagctctggagatttgcaaaaaagacttgtcgacgaatgcatctacaatactgtcggaagccaaaacaagtttgaaaaccggtgattatgataaaaccaacaaatcgataaagcttgcgcttggctttcctctgagatgtatgttcaatctcaaacgtgtcaagttcacgtctccccaactatttagtcaaatcaatatctatgctcaactctctgacgctgctatgaggatcattgatcgcttctaataagtaataactccttattgttttctatataactcaacttcgatcaatgcttaccccaatttgaataaatcatttcctttatgaaatttataaagtcacatatatccatttgttgtagctctcatgttttttttttcttttcaaatttgtcaaaataagttttcgtttgaaccatcattcaatataaatctaaatgatatattgtcttttttttttttttttttttggcaaagaatgatatattgtctatttcatcaaagttggaccactatacgataaattgttgttcttataacgttaaagtaggaaaacagttcagttttcacgtgactaacttactactattggaatatttatcataaactttaattcacgaaaatcattaatgaaaatttgatattactactataatatcgtcttctctattaatttagaatcttattcatccttttccacttgtcttctctaaccctctaaattctctttggtcgggatcactggaaagaaatg

SEQ ID NO: 17664 - DNA, 3000 bp, Unknown
  misc_feature (1)..( 3000): 2750-1469P.txt file - cDNA_ID_1810672; gDNA_ID_2926139; Annot_ID_197382
ctaaaagcaagtgatagaaccaaatcttgattggaatctacaatgtatctagagaatccttatgtcgccatggcaagcaagaaagagatcaaggaaaaataagatcgtgactaaacattggccaatgttctgtactttttggtgaatattatagaatatgtgttcacctggaaatgctggtgtcacaagctttcctttttctcttgagaggtttaaggccaaggttcagagctaaatcctcaacaggaaccttgatcacatcgtttctaacaccgatatcagtagcatacctactcatacaatacatcccagcagtgacagttgctacaccaacaggatttggaatcaacaatgtgagaggtgacgagagtagtgcagctagaggagcacctatgatagaactggcttgaccacttctcccaaccccgttcttatccagaatgagcaatcctgtcttgcagtagagagcaaaatcttcgcagttattctggaagacattgtagttaccaaatccgttttggagaaggtgcattgctctatggatgactgtttgaagcgggtcagatggagcagttgtgcacgtgccaccgcggaatctggtgaggaaaatcgatgagctgactccataatcaaaacggtagagagaacctttcttgagaaagcagtctaggcaagaaagtactactccactctttggtcgtttatatccacagtcaggatatgtaggacaaggagcttctgaagaatcattaacctctgaaactgaagaagacgaagaagaagaagaagaagcgagtgtaggagatatcaagctgtgctcaggtttgaaatgaaccactttgcaaccaccaacaaatacgcctacaaatgtggaaaatttagaagaaaacaaaatgctttcttcagttgaaatgtcaacaaaagcaatcaaaatctatttgctaccaccattgactatagaaggacaagtcatcatcagtacgattgaatccagagaaaacaaaagatgagactttttgaagatccgtttcaataaagtcaaaaactttggcatgagggaaaaagacctaataacaaaacagagtttttgacacaataacccaataagaaaccaaatgacggtttgtttcttcatctctgcaacggaaagaggtaacataaaccctaaaatttacacaaagaagatccaaattgaggaaaaactatggatgattcatgccaaaagctcattgatgatgaaatcaaaaggaagaaatcgaaggtaccgtggtgagaataagcgaagacggctcgataagtgtagatgtgatcaccaggtttaagctcgtctctctcgactttgttcgtgagtacacccattgcttcgtcttcctcaaaataaaagctttccctttggcttgtggaaattgcagtgtacaagtagattcttacgtcagcggcagagatatgattgggcgatcaaaccggagactgttgaaccaatgccgttacagaatcttttgacggcgttaactgttagatgacgacaatcgctgtggagggtaatatggtcaatatacgaaaaggcttttgtgaacacgacgccgtttttaaagtgtccctggaatcttattcttcctttcttggtgtattggactcatattgggcttaaagaaaacgctctacggcctaaatatcgaaaagcgtattatttatctatcaaccaattgttattttgctcattgccaactaatgaacaatgcttagaattaatcaaattttctaatctgaacgaaggaagatataagtaggagttttatacaatcgataattgtatacttaattattattataagctatattggttaatgagtttctttggagtgagtatataataagaaaaatatatatagagccgagcgtagtggaggtagatcaggcaataatggaagaaacttcgaggaacttcgctttttgttgtaaccacaaaagcgaatataacaattaatacggtttgagtaggcttgcagattttcagacagcactcctactgacagatgtttgaaaattaaaatatttattgcgattattataacaacactgtagtaaggaacttttgggttatttcattggtttattaaagtctttaatcgttgactttttaatttcattattatctgtaaactcgtattttaagtgattttaataataataatttgaaagtaaaatggaatatcccccgatatcaagcgagccgtacgggaaagggaaagtcaaacatgtaataacagttttaaatgaagggtactacagtcttttcaaggggttaataacgttccgttttctttatggacagccaatcagatgggaccacgtatatcactattaccaaaccttcgcttttctggaaagtggaaagcaaaaccacagagagaagagaagaagaacaaagcaaaatatattcaaaatttaagcaataaaggcaaaaattaaaagacaacgagtttcaaacacgaaaccacgacttgtccaaatcaagatttgtcctttttcctttttagtggtagaacgcgaatcaaatttgggaataaaattttacttcttactttttcaaaaattcttgggtcttcttcagctttgtctccaagcaaacttttagtcaaatcatttttttctttcttgatggactttctttcatgtttgatatttcaatgacgaaagctctaactggtttttcttggaatttaggtaagaatttatactctgtttctctctctgtttaactcagttcttgttttgggtttctgggtttgtattttttttagatctttgattatttattatgttctatgttgtaaaagatatcaaaccgtcaataaaaactgtaactttatttgttgtttaaaaattgatatttcattgtttgattgaaatttttctacaggaatttgataaacggtttctcacatacacaagaagaaaataaccgttttgagttaaagtaaagcttttgaaccaatg

SEQ ID NO: 17665 - DNA, 3003 bp, Unknown
  misc_feature (1)..( 3003): 2750-1469P.txt file - cDNA_ID_1810672; gDNA_ID_1621198; Annot_ID_57600
aggctaaaagcaagtgatagaaccaaatcttgattggaatctacaatgtatctagagaatccttatgtcgccatggcaagcaagaaagagatcaaggaaaaataagatcgtgactaaacattggccaatgttctgtactttttggtgaatattatagaatatgtgttcacctggaaatgctggtgtcacaagctttcctttttctcttgagaggtttaaggccaaggttcagagctaaatcctcaacaggaaccttgatcacatcgtttctaacaccgatatcagtagcatacctactcatacaatacatcccagcagtgacagttgctacaccaacaggatttggaatcaacaatgtgagaggtgacgagagtagtgcagctagaggagcacctatgatagaactggcttgaccacttctcccaaccccgttcttatccagaatgagcaatcctgtcttgcagtagagagcaaaatcttcgcagttattctggaagacattgtagttaccaaatccgttttggagaaggtgcattgctctatggatgactgtttgaagcgggtcagatggagcagttgtgcacgtgccaccgcggaatctggtgaggaaaatcgatgagctgactccataatcaaaacggtagagagaacctttcttgagaaagcagtctaggcaagaaagtactactccactctttggtcgtttatatccacagtcaggatatgtaggacaaggagcttctgaagaatcattaacctctgaaactgaagaagacgaagaagaagaagaagaagcgagtgtaggagatatcaagctgtgctcaggtttgaaatgaaccactttgcaaccaccaacaaatacgcctacaaatgtggaaaatttagaagaaaacaaaatgctttcttcagttgaaatgtcaacaaaagcaatcaaaatctatttgctaccaccattgactatagaaggacaagtcatcatcagtacgattgaatccagagaaaacaaaagatgagactttttgaagatccgtttcaataaagtcaaaaactttggcatgagggaaaaagacctaataacaaaacagagtttttgacacaataacccaataagaaaccaaatgacggtttgtttcttcatctctgcaacggaaagaggtaacataaaccctaaaatttacacaaagaagatccaaattgaggaaaaactatggatgattcatgccaaaagctcattgatgatgaaatcaaaaggaagaaatcgaaggtaccgtggtgagaataagcgaagacggctcgataagtgtagatgtgatcaccaggtttaagctcgtctctctcgactttgttcgtgagtacacccattgcttcgtcttcctcaaaataaaagctttccctttggcttgtggaaattgcagtgtacaagtagattcttacgtcagcggcagagatatgattgggcgatcaaaccggagactgttgaaccaatgccgttacagaatcttttgacggcgttaactgttagatgacgacaatcgctgtggagggtaatatggtcaatatacgaaaaggcttttgtgaacacgacgccgtttttaaagtgtccctggaatcttattcttcctttcttggtgtattggactcatattgggcttaaagaaaacgctctacggcctaaatatcgaaaagcgtattatttatctatcaaccaattgttattttgctcattgccaactaatgaacaatgcttagaattaatcaaattttctaatctgaacgaaggaagatataagtaggagttttatacaatcgataattgtatacttaattattattataagctatattggttaatgagtttctttggagtgagtatataataagaaaaatatatatagagccgagcgtagtggaggtagatcaggcaataatggaagaaacttcgaggaacttcgctttttgttgtaaccacaaaagcgaatataacaattaatacggtttgagtaggcttgcagattttcagacagcactcctactgacagatgtttgaaaattaaaatatttattgcgattattataacaacactgtagtaaggaacttttgggttatttcattggtttattaaagtctttaatcgttgactttttaatttcattattatctgtaaactcgtattttaagtgattttaataataataatttgaaagtaaaatggaatatcccccgatatcaagcgagccgtacgggaaagggaaagtcaaacatgtaataacagttttaaatgaagggtactacagtcttttcaaggggttaataacgttccgttttctttatggacagccaatcagatgggaccacgtatatcactattaccaaaccttcgcttttctggaaagtggaaagcaaaaccacagagagaagagaagaagaacaaagcaaaatatattcaaaatttaagcaataaaggcaaaaattaaaagacaacgagtttcaaacacgaaaccacgacttgtccaaatcaagatttgtcctttttcctttttagtggtagaacgcgaatcaaatttgggaataaaattttacttcttactttttcaaaaattcttgggtcttcttcagctttgtctccaagcaaacttttagtcaaatcatttttttctttcttgatggactttctttcatgtttgatatttcaatgacgaaagctctaactggtttttcttggaatttaggtaagaatttatactctgtttctctctctgtttaactcagttcttgttttgggtttctgggtttgtattttttttagatctttgattatttattatgttctatgttgtaaaagatatcaaaccgtcaataaaaactgtaactttatttgttgtttaaaaattgatatttcattgtttgattgaaatttttctacaggaatttgataaacggtttctcacatacacaagaagaaaataaccgttttgagttaaagtaaagcttttgaaccaatg

SEQ ID NO: 17666 - DNA, 3000 bp, Unknown; identical to SEQ ID NO: 17664
  misc_feature (1)..( 3000): 2750-1469P.txt file - cDNA_ID_1810672; gDNA_ID_2926139; Annot_ID_138976

SEQ ID NO: 17667 - DNA, 3003 bp, Unknown; identical to SEQ ID NO: 17665
  misc_feature (1)..( 3003): 2750-1469P.txt file - cDNA_ID_1810672; gDNA_ID_1621198; Annot_ID_174776

SEQ ID NO: 17668 - DNA, 3003 bp, Unknown
  misc_feature (1)..( 3003): 2750-1469P.txt file - cDNA_ID_1810684; gDNA_ID_1621198; Annot_ID_57596
ttttctctattagtggagtttcgtgagtgagtgatcttgtgccatcgggattttgatcgttcctacttaaatttgagccggtatcgatctaaaatttcaagtaaacctagatttgaaaatcggatgctttaatctggatcactcaaatgtcgttgatgtagacatattatcacaacttgacgtttataaatagccagaatgaaataagaagatcgcttgaactttaagaactaatcgggggtgataattgagcagctaggatccattgtccttaaaacgttgtttatttagttgaatatgtaacggctatggagatctataatccggttttacatttcacatactctagattagtttcatataacggctatggaaatctttaaccatctatctaccagtatgcataagctaatttaaccttttaccaaaaaaaaagtatgcataagctattagatcatagcgtagtgttcattttgcagtagtcttgtccttgaaccgtactacatgagtccaccatatgattttttttttctcggctatggagttctagttcctttagtctattcttaatttgcagaatatctaggaagagttgctaattaattcccatgtttttggtattcaacagaaacattgttcaacagagatattaggaacaatcattcacaaaatgagaaggtaatttccgtatcaacagttactggatgaatctttatcttttctacttccactgaatagctttttctcccaattcagtgtactctctgattaaaatcgtgagtcattttgaactatatcattctcctttccagattttaatttattctaaaaacggtagaaactcagaatatgtagatcttcttttttttgtacaccaaatagataccttaaagtcagagtatgttttgcgcatatacatagattgtgagtgcttcgctaaagaatcagccgagacatttgctgatctgggaataaaactacaagagaagctagaaagcctattaatgcagataaatatgtcactcagaatatgtagataaatagtttaatttgctgacctttttggttctatgatttgaaattattctctgagacatattcttgattgatcaagttctttttcaccttttatgtccctctttttcccctataattcaaatcagattcttcttttatgatattacatctagttctttgttttttgaaattgataagtggagggataacaacgagactggacatggaagaaagttccaaaataaagtagctcatagtctgaggataataatctttaaatgtttctttggaaccttcattttcatttctttattacttttgtttcttgtctgtgctcgtttcaaatcgagtccattgcattacaaaactctctttcgggcctttgtgctctgccttaattttcttttgttatttactcttttctttgtcagaacaacaacaatatctaggcaaataaaagaggtttttaaattctataatcgttatcatagtttcattatttctatatgtttagacagaaatgttgtcttgattgaatcaaggttcctttcttagaaaaaaaagaaatgcatgtcggctttcatcttacttttaattggaataagtaaactaaaatctttattcatcacatgcatttgcatgtatatatatatgtatacgttatccattgcttttgctaggttcatgttcttttttttgtgcaataatggcttaatttgttaatccagcttgcagattgcaatttgactgcaaagtttccccacttccataactatatgtatgtgatatcaaatcaattcattatgacgagcgaactcttgacaactatctttgtcagtactctgctttatttggtcgtttttattttgcatgaaaaaggtcaaaaaaagctttactcatttggatattgattagtattacacaaagtcttagtttggatatattttctcaaatgtttccactgctttcaacattcatttgctttggggataagtcaaataccttgacaattaactaattccctaactaaatatctcacctttgtttattagtgcttttttggtgaattaagtgtttttaatttatcccgaccccattgtgatcttgttctgtcacatttaattacgtatatttagtagttttattactaccattttgatagacatatattcatgcatgttaagtaccaaacaatttgttgacagtttaggtatggcgtgtttggaggatttgaaaagttgatggagctccaagagaagatccaagtggctcatgtttcttcaggttactttgctttcatgttctattaacataaataatctctttggttggttccttatttttttcttctttatcggaaagttacatattacgttgtttcttagccacgcctgatttgaattaaaggctcactgaccaaaacatccaagcccaacttttgctaaagcatataagcatatacctatgtcagtttccggcgacttttcttttttgctcttttttgaaccaaaacaaatttctagctaatgtagaaatttatactttttaagaaaattactggacttgtaacaccattagtaataagataagatgagacatttgttttgtttatatgaaaatatagtcagtaataactgttttttatgttctcttttcaacttatttttaattctttttggctttcaactttgcttctttttgataaaagacacatatattgttcctaatctttattgtctttaattttgaaaaatgccacaattaaattttgaattaaaacttcttttaattgcccctttaatgttctccctgactcccaaatctacacgaaacactaggaatagagaaaaaacaaccctcgggtaaagacagagcataaaacacttgtagtgtagatataaaagacacacctcagagaagagaagagcagagagagagagagagagagagagagaaagaaagatccaacttccacaaagaaccatg

SEQ ID NO: 17669 - DNA, 3000 bp, Unknown; identical to SEQ ID NO: 8184
  misc_feature (1)..( 3000): 2750-1469P.txt file - cDNA_ID_1810708; gDNA_ID_1621199; Annot_ID_57629

SEQ ID NO: 17670 - DNA, 3000 bp, Unknown; identical to SEQ ID NO: 8183
  misc_feature (1)..( 3000): 2750-1469P.txt file - cDNA_ID_1810720; gDNA_ID_1621199; Annot_ID_57626

SEQ ID NO: 17671 - DNA, 3000 bp, Unknown; identical to SEQ ID NO: 8177
  misc_feature (1)..( 3000): 2750-1469P.txt file - cDNA_ID_1810732; gDNA_ID_1621199; Annot_ID_57623

SEQ ID NO: 17672 - DNA, 3000 bp, Unknown; identical to SEQ ID NO: 8177
  misc_feature (1)..( 3000): 2750-1469P.txt file - cDNA_ID_1810732; gDNA_ID_1621199; Annot_ID_174827

SEQ ID NO: 17673 - DNA, 3000 bp, Unknown; identical to SEQ ID NO: 8176
  misc_feature (1)..( 3000): 2750-1469P.txt file - cDNA_ID_1810740; gDNA_ID_1621199; Annot_ID_57621

SEQ ID NO: 17674 - DNA, 3000 bp, Unknown; identical to SEQ ID NO: 8175
  misc_feature (1)..( 3000): 2750-1469P.txt file - cDNA_ID_1810748; gDNA_ID_1621199; Annot_ID_57619

SEQ ID NO: 17675 - DNA, 3000 bp, Unknown; identical to SEQ ID NO: 8181
  misc_feature (1)..( 3000): 2750-1469P.txt file - cDNA_ID_1810748; gDNA_ID_1621199; Annot_ID_174816

SEQ ID NO: 17676 - DNA, 3003 bp, Unknown
  misc_feature (1)..( 3003): 2750-1469P.txt file - cDNA_ID_1810748; gDNA_ID_1620804; Annot_ID_168753
agatcagactataccgagacaacaacattagtaagttttggcatgttggtaaatattattgctctcaagtcttaagaaaatataatcaagttaaaaaagaaagattaagggggtgttattggttagtggattttaatagagttaaactctaacccaaatctaatgttattcattcattgattttaaatccattatttaaatcaagtgttattagttcttatacttacaatatcttcattaaaagactttaaaattaagtgttattggttttcatatttctaatgtttatattactagagtcttaattctaatgttattggttctcatattcacaatgattagttcaagtttcatgttattcatgtttgatagattttcacaaatacttttatttgaaaagatttgaatgaatctcaaactgatttcatgtgtaaattatagcaatcaaaatattgccttgtatcttgagattttcacaatcatacagtctcatgagaatattacatattgccttgttcctttgccaaaaactttctttttccttccacatctaggttcacgttacatctcggactttcttctctccttcttctttcttcttccctttcacggtaaagtctatctcttttcatcattatagtagtcatggctcgtgaatttgcttgagaacaaagtcacttttatcacttttgatcatactattatatatatttttattgtaggttttataatggaacgaaatctttgtgaggaagatgattcagatgtagatattatgttattgatggtggttggatccgttgatgcttatgaaagtcaaatcccacgtccgatgcgacgacaaatcacaaaaaagggacacgcttatatacaaaaggctttgaaagatgatcctattcattttcgtcaactatatcgtatgaatcctgaggtttttgcggaattatgtcatcttctccaaatgaaaacaggtttgaaaggtacaccacatgtatgtgtcgaggagatggttgctacctttttgataacagtgggccaaaattcaagatattgtcacacaatggacactttcaagagatcaaaattttcaacaagtattaatttccacaaggttctcagagctttaaacatgcttgcaccaacattgatggccaaggttacaaatacagtgccctcaaaaataagcaaaaccacaagattttatccttacttcaaggtacatatctttttgtgtgaataatatttcttgaagtcttatataaacagtttttaatttatgttaggactgtgttggagctattgatggcacacacataaatgcaatggtacaaggtcctgaaaaggctagttatcgtaatcgaaaaggagtcatttcacaaaacgtattagctgcttgtaactttgatcttgagttcatatatgttctaagtggatgggaaggttcggctcacgattcaaaagttctacaagatgctttaacaagaagaactaatagattgcaagttccagaaggtaatagattacaagttctaaaaggtgatttatcatatgataatttatttctaatagtgtgcttccatgtttcaggaaaatattatttagcagattgtgggtttccaaaccgacgtaatttcttagctccactacgaagtactcgttatcatctacaagattttcgtggtgaaggacgtgacccaacaaatcagaatgaattgtttaaccttcgccatgcatctttaagaaacgttatcgagagaatttttggtatatttaaatctaggttcttgatttttaaatctgcaccaccgttttcttttaagacccaagcagagatagttctttcatgtgctgccttacataactttcttcgacaaaaatgtcggtcagatgaattttcaagtgacgaagaagatgaaacagatgttgacaatgcaaatcagaattctgaagaaaatggtggtgaagaaaatgttgaaacccaagagcaagaaagagagcatgcaagacattggcgagcgaccatagctgcagatatgtggagagatgctactaatattggtagccaaagatagtaattcactttttataaagttcatgtatttgtctttctttggtgttgatggagacacttttcccgtgtttgagctgaaagatttatttttgaaccctttacactttcttttattattattatgaacgagttcttgtcgtgaaatgatatatgacatgcttccgggctaatctcatcgacataattagaaactgagaagttggccatgggaaaatggtacaagacatacaaatacagaaatgacaatgatgtcagcatgacacttgaccataacgttttaaattatgttctactcatatcggtggtggaataattataccttgacctaagaagtatgggtttatatgtattcttttgtaaacgtttaatactattaattatgaacgagttattctacctctatcatctatgttacagctaagcttttggagttatactgtaaaacattgttcattattcaaatcatatcaattaaaataaaaagtacaggatcatatcaattagaatattactttgatcatcataatattctagttgctactaaagaatagaatcatattacttagaatatatattaccatgatcatcataataatatcacaatctttttgttatattaacgtatatctttacgatcgcactatctctataaatgtcacgtacatctctcttctcattctctaagcatacaagctcattcgactgcaaagaaaaaggttcacttgttcttacttttttcttttgttcttatttacagaatcatatgttggaagtgtgatattgattaacttttgaatagttaacttttgtttcccgtctcactatttccttgttttttgcattgacgtatggttattttttattaaaatattgcaactttttcatgttttaacgtatatttgtttttccaatttgtcataggtatcactatg

SEQ ID NO: 17677 - DNA, 3000 bp, Unknown; identical to SEQ ID NO: 8174
  misc_feature (1)..( 3000): 2750-1469P.txt file - cDNA_ID_1810752; gDNA_ID_1621199; Annot_ID_57618

SEQ ID NO: 17678 - DNA, 3003 bp, Unknown
  misc_feature (1)..( 3003): 2750-1469P.txt file - cDNA_ID_1810760; gDNA_ID_1621200; Annot_ID_57638
attagttaggtgaaaacatgtttgagaaatcggcggggattgtgttttcatggtcataaaacatgaccataaacactgaaagagattatgattatgctgagggagtgtgagaaatcggcagggattgtcatcatatagtactagactactagtactttgtataacgttctcaggaacatgtttcggtcagaattccgatggtgggatctagtcgatgacgtaataaacaacactttcatgcccgcctaagaggcagctgtcgcagactaagcaggtttcaacatgtgaggggccaaggcgctggctagtggtcaaaagacggaacactgagaatatctgtatcattccatatgatccaagcgcctagctttgctcaagtgtcaagactattgattactgaatactaaattcaaagccatttttcttttaatgggcagagagacaccaaatttgctaatgagggaaatcaaacataacaaggggttattgtgagagagaacagaggatcttatacaagttgaaaatccgcaaccaaataatcataatctactctcggtaaatggaatgtcaatccgcactgaccatttgctctctcttgctcctctaccttgttacaggatgcctcctcctgcgttccaaagttgaatgtgtgtatgttatatcatctcctttgtacttatcatctcactcatatctaatattcgttacctctttggtcggatcccatcttcttcgtagtccatcactccacttggttccccaaacatctccttattccctctgatgtcaacatccccctgcccacaacgtaagtaagactatatcgaccaccacccttcccaatcatatttcagacacaaaaaaccaaacgaaccttgtttcatttcatttaacaatcagacaataaccaagtactaccattccaaacaattcatgtcctctaatgactttaacacttcactaacagccgttgtgattgcgttccttgtttgtttttaattaaagaaaacttcataatatatgtttacatccaacatgtaagatttcttgttccacgaaagaacggttaaaaaagcccgccacagttggctgatcgattcgtttgttattaagaaacataactttttaatctatgataggactggacttggaaagctcaaagacctagaaagatttttttatcaagtctctcccatccccgcttacatagacctaagctattaataagaagaaacccactacaattctctgaagaaatataagacagaatagctgactggactctaactcatggtcacaagacagtaaccaagaaagaatgtaaccaatattagttacataatatacttagtagggaaaagtgaagccaataggactccaagcgcgactgaccttcatggacagagacttcttcacttcttccaccccttcttctgcttccttacgatgttttttgtccatctcactcatattgtccgcccatttgatcttgtcttgaattgaaatgagcagattctctgacgtgttcaacctagacatcaatttgggccaacacataaaagagtaggacgtcattagccatgtattctaacatcacgtacaagttcttataattagatatagaaggcaaaaaatcctggatctaagggaagaagaaaactaccagttggacaatgtgtgtaacatattccctagttgacctggccttagatccctaccagctgcaaacggaacctgcatggttgcaagagatatatgatgtttagaagggggggctcgtacgtttagaaacaaagcacaatggttaaaataggaaaaggaggcccaaaccaaaacacacctcaaaacatctttttaactgatccagttttcccctaactataccctgcaaagtgtaaaagaaaaaaaatgagcaccatgcgttgtcacagttagttgtcaaatagagattagaagactgctaaagagtactcaccgcatacatgcattcattgataagaaagtcctcgagttcgcgaacattggaaacatctaactcgaccattagtgtatcatagggcaatacctataacaagcagagtgagagagacattcagttaggcaaacagcaggggaaaaagataatggaacagagtagatagcaggagcaaatcatgaacctaagacaaatataccttgttagactcagcaagggtgaggacagtgagctgcttaagcttaagaatttggtcaggggacaagtgcggaagacgggtggcattgcctagtgtttcgatgaaagcaagtcaagaggagagaatatgacaaaagggaaaacgaattgaaatagcatatgacaaaggggtcatacatttgtagtctccccaggtgccatgggcaaacaagcgtagtagatccaggtacacagaatctgtggttccttcaagctgcacaattacgattaatcagctactagtatctatcaagttgttatgatcagcgaagaacaaaagcatgtaaaaccctagatcgtgaaaagcataaagtagtagtacctgggcaacattgggtagagccaaaatctcggagaaggcgaagagagaaggatgcgatgtggcttcgatgatgagcgggcccagagcctcggatttgcaagtagaagctcgcttcacgagctgatcaatgatctcggcttgcttctgctcgatatccatcttccaaacaaatcgatttccggtggtttagggttttctttcttaccacactaataacgaataaaatcccaaacttcttctctctgctccttccttcttccgtttttatattactgttttttttatgtgaccgaccgaattcttctagaatcttgtttaataattgggctcaaatttcgtagtttctgggccaaggcctactaagagaaatattagaaaccgcgtctggtgagcccaaacaatcccggggaagagagagactattgaatattcttcttccttcattttggctgagagagcgacgacgatg

SEQ ID NO: 17679 - DNA, 3003 bp, Unknown
  misc_feature (1)..( 3003): 2750-1469P.txt file - cDNA_ID_1810764; gDNA_ID_1621200; Annot_ID_57637
cttttttaatttgctctctccgtagtctaattatacataatttaatcacacagtctcgaaagagtagtatgattatagtaagtcttctaatacctctcgtttaggtggaactaacacatgacatctttgagaagcttgtaccttcgtgtggccgtcttaggcgacgtaactccgcctccatctccagcaacgcccttggctacttgatcgtgacggttattgttatgcttgatccggtggccgggcgaatattccgatctgtttgagaagtcattttcatatttaaccgaagaagaaggcttctttgaagaagaaccgccatgtctagcaacgttgctcagcttccggtcgtcgctgcggcaccagtcgcaaatctcggtaggctccgcaaactggccgtagtagttgctacaataactatatatatatatacacacatatatgatcaattaagaaacccattaatagccgtgaatggtcactctgatatacatatgcatgaatgatgaaggaggactacttacgagtgttggaagcggcagcggcagtgaccgcagctgaagagcttgtcggagaaaccgacatcaccgcacatgcaacacactctctccatgatatatcttcacaatctttattatttatatatatcgacccttgtatatatatgttaggccgtgatgtttaaagtaattatacaactatgcgtgttagtaaaaatgtacaggtagactagagagtttgcttgccgtcgttttcacttttcggttttagagagaaagccaaccttaaaatggggagtttttcggaaatgactgttttctccttccttttgtgtttttcccctgtcttgtcattttctagttttttcactcttcgtgcacatatggtggatggatccttctccatgcctacggaaagcgcaatgcagtgacttgtggtcttttctttctttcaaattataggctttcaaataaaataaatgttgtatatcacgtatcatcaaattcattagaactcgatcgaccatcagtttttttaactttataacgatgttgacgtgacgaaacgcatgctgctgtgcgagtgagagagtgttaagcgatgtgaacaacagaacaaacagtttgcgacaataattaacaacaccaattttttcatccaacttagtagtagtgctgctttttctcccttttcacataaagcggaaaaaatatattgggattatctcttggtggtgatgtatagatcgcacactaacatgtaagttagtgggagttcaggcttgaagatctagttctttagcgagtcttcgttggtccggcggcttattatcaacgtacgtgtacatgatgagctctagctatagtagggtccaacttgtcgccaagactgattaattcgtcatatactagttaattactctaaacgtatagctaaagaagaacattatatatagaatattttgttaactatgatttgtttatggtgttagacatataagtttgtttaatgtaacttcaaattatgttgatggatagagatggatttaatgaggagggttaggttatatacaatttggtacccatttattgtttgctttcccaatatttattgcggtttgcatgttttataaaaactggttaatatatttttcgggagattaaatataaggaaactttgatgcgactcgacgactttgagtgtaaaattgattaaacgcaccagtcacatgatatggaggcaatcggaggggaaacaaaaccgacggcgatgtgaagttcccggtggtttcgctaacttggaacctaaacggtcggagagggatccacgtggcagaattcaggagatatttttggagtttggttggccatgttaagcacatgccctgtcttcttctccctatctctcatcctttgcgttgcttcctcttttcactgatactatattttttatttccacctatcagtcatttaccatgtacattagtacgcaacgcacaattcggtgccaaattagagtttcagggtctcacctctctctaatctgtttgtataaactttgaatggagggagacttagaccatgtacatgggtgatatttttagagtatcatcagtttaaaaattatttttatattaaccaaacaattagaatgagcttgattagtatcattccaatgatttttttgatattactatcatttacgtggcatctcctgattggtcgcatttgtcaaaaataagaaaaaaatatttatctattaaacaaatattataaataatactaaaattttttaatgatagtttgttagtatcacctataaccatgctcttaataattaggatataaaacatgtgaatgagagaagtggaccctagtgatctttgtttgtagtggcctcaagattttactttagtcccaaattcggaggaaattatttttgttaattaatcatttattctttcttttgttctacctcattccaacttacaaattcagtatccaattcataagttgaaccaaaaggaaagacatcattcaacccaagattagaccaactgtctttcgtgacacacttgcaattaatatgattcttaaaaaatgttaatgattttgtttggaaccaaaagacaataagttagcagtcaaaaaagcagtaaatgtaattagaaagaagagacatggtaatataatagatattatggatggtgtgacgaataattgatctaataatcatttcagacaagtggacaaccctacctcctgagatgatctttttagcattctatgtatgtactggttaaaaaaaggtttcagaatcaaaatgatgatgatcgtatatttgaaaagaagccaatgatctctactttgaaagaagagaagatgaaaagaagccaattatgaagatgaagaaagggcataacagaagattgagtgttatcctttgttgaggagtgcccaacacaaattaaagaatgcttcttttcctttgttggatataatg

SEQ ID NO: 17680 - DNA, 3000 bp, Unknown; identical to SEQ ID NO: 8186
  misc_feature (1)..( 3000): 2750-1469P.txt file - cDNA_ID_1810768; gDNA_ID_1621200; Annot_ID_57636

SEQ ID NO: 17681 - DNA, 3000 bp, Unknown; identical to SEQ ID NO: 8186
  misc_feature (1)..( 3000): 2750-1469P.txt file - cDNA_ID_1810768; gDNA_ID_1621200; Annot_ID_174855

SEQ ID NO: 17682 - DNA, 3000 bp, Unknown; identical to SEQ ID NO: 8185
  misc_feature (1)..( 3000): 2750-1469P.txt file - cDNA_ID_1810780; gDNA_ID_1621200; Annot_ID_57633

SEQ ID NO: 17683 - DNA, 3003 bp, Unknown
  misc_feature (1)..( 3003): 2750-1469P.txt file - cDNA_ID_1810788; gDNA_ID_1621200; Annot_ID_57639
aaattgtacgcctacctctttctctcttctttaattagggctcttcttttttttttgttgttgttgtggatctttgagcctagataatatttttaaaggtcttgtgtcaaaaagggatatatgaaagacgactatgttcatctctttgtgaaaagacctgttcgaagatctcccatcattaatcgaggttacttttcccgttgggctgccttccgaaagcttatgtctcagtttcttctaagcgggacaagttctaagaaacagatactgtctctcggagctggctttgatactacctattttcagttgctggtgcgtcttctttttcttctcctttttgttagcttttaccaaattcaccattcttcggcttattccagggatctctcgcttcttctcttctcattttgtaggatgaggggaatgggcccaatctctatgtggaacttgattttaaggaggtactactggatgagcgtgctgacaaaagtatccatcatgtgttttgagtctaatgcctaaatggatttgcttcttacgttaggtgactagcaagaaggctgctgttatacaaaactccagccaactcagggacaaactaggagccaatgcatctatttctattggtaagagccttttttccccccatgtattattatgtagaatgatccttttcattatgatgcatttcagcttgtgcactcatatttttcttcattccgcttctactagctactaactcaaccacccccttttactttgtaccgttagcgtctagtttcagttgcttactcttaactcgttgggctgtttatctctacagacgaaggacaagttctcagtgatcattacaagttacttccagttgacctgcgcgatataccaaaattaagagatgttatatcctttgcagatatggatctaaggtatccatgaataatttttatttattttacacactgttatcttgaaccttcaaccctcttcttctacccgggtttaagatatatggtaacagatacttactggtgatagacctacttgatccctaatatcattatcagtctgccgacgtttattattgcagaatgtgttttgatttatctggaccccgattcaagccgtgccatcgtcaattggtcgtcaaaaacgttttcaactgcagtatttttcttatatgagcaggttagctcaactgtgattttccttgtctgcataatattgcagatacgaatcttattgcttatgtgtctaacccgttgggtttctgtttgcagatccatccagatgatgcatttgggcatcaaatgattagaaatttggaggtaagaacgtgtactctactactctagttacagcgacatcttcattagtaaagcttttttgagatttttgtcaaaatatggatactagtatgacactaaaatattctagtattgccacatgggttcatgttgtactgatcaattaccttcatttaaacttgttctgaaagcttaacggtgtttctgttcttcagagtcggggatgtgcactcttaagcattgatgcatcaccaactttacttgcaaaggagagattgtttcttgataatggatggcaggttcgttttgcagttagaatattatgattaaagcagggctaactttcatgtataatttctgatataaggactctcatttctttaccctcttctttattctggtgtttcagagagctgttgcctgggacatgctaaaagtgtatggtagttttgttgatactcaagaaaaacgcaggtcagtactgtacgttttgttaaaactgtgtaagggcgttatgttattcatacctagtatctggctgaactctgtcaagaaatatctaaaaaatgctgttgcccgtgacttttgagctttccaatgttttttagatgaacctcttacagtcttactatatatatcctgttttttgttttttcttctctctcactctctctctcactatcctgttttggctctcttgtttcttcaattcatgagctttcattagaaagcctacttctcttggaatatatcttaaatgagaatgtcgtgtttctaggatcgagcgattggagttgtttgacgaatttgaagagtggcacatgatgcaggcaagtctgtctatacctcattaactagatgttgcacctctatgtatgtatgggaaagcataaaaagaccaaaagatgattggtgttgaatatcaacggtatccattatatatttttgatgatgcatgcgtcagatcttgttctagtgtgtaggtagttgagcattatttaaccgtttatattcaacaggaacattactgtgtcacatatgctgtcaatgatgcaatggtacgtacatgagtctctacaagtcattgtactttttagattctggaatgtttttttgattaaaaaaatgcagggaatatttggtgatttcggtttcacaagagaagggggcggtgaaagaatgagctcatcagcgtcatcaccttgaaaaggaggagggtttgtattgcattgaatccccggaacttgcaactggtacgttagttaatacagttggaggaaaacccctggtggtgggtagaatctgatagtgcttggtttacctaatttgtaaggaatgatgattgattgcacaaagttagaaaggcctttctctgggtgctgagcagaaaacgaaggaaacacgaacttgtctgcgttatctgtgcttttgatttagtttaggctcatggtcgagatatgtgggccgggcctccccttgttttatttttggttgtattttctaataattgtgcaaaacaaagaaacctcacctcggtcaagaaacgctctgaaatctgaactctgaaggttgtttttcttcttctttcggtggtgaaaaaattatctttatgaaaagacaaaaaagtttttgaaaaaaggaaatttttttcaaaaaaacagactgagagagagagagagagagtgtgttgttggccatg

SEQ ID NO: 17684 - DNA, 3003 bp, Unknown; identical to SEQ ID NO: 17683
  misc_feature (1)..( 3003): 2750-1469P.txt file - cDNA_ID_1810788; gDNA_ID_1621200; Annot_ID_174862

SEQ ID NO: 17685 - DNA, 3003 bp, Unknown
  misc_feature (1)..( 3003): 2750-1469P.txt file - cDNA_ID_1810814; gDNA_ID_1621200; Annot_ID_57645
tgggatcctctccatcgtttccatcatgggatacattacttacattgacttcatgaacaacatgggacattgcaacttcgagcttttccctaagcgtctcttccacctcttccctcccctcaagttcctctgttacaccccctcgtacgtcgtttgtaaaaacactactatttatttggatttgaatatatgcatgcatttataacatggcatcaaatatgttgaaggtttcactcgctccaccacacgcagttccggaccaactactctctgttcatgccaatatacgacttcatctacgggacgactgataatttgaccgactcactatacgagaggtcgttggagatagaggaagaatcacccgacgtcatccacctcactcacctcaccacacacaactccatctaccaaatgcgccttggtttcccgtccctctcctcttgccccttgtggtctcgacccccatggtacctcacatgcttcatgtggcccttcactctcctctgctcatttgccctcacttcagctatccctttgcgcacctttgtctttgagcgaaaccgtctccgtgacctcaccgttcactctcacctccttcccaagttttcctttcacgtaagcattttacacgcatgcatatgcactttccctctctctcgctctcttgacacaaacgggtttacttattatgttgtacttcacaccactattttccaaactttcacacacaaaaaaaacattgattctcacttaacttgtacgtactacgtaggaaggacataaccttttatacaaaaagaaaattaaaacaacctaaaaatgaacaatgaacattttcttgtgggtataccttttgtaagttgcatctaaagtttattaataattttgcctcataaacatgcggcggtagtataaatcacagcgccaccatgagtccatcaacactatcatagaggaagctatccttgaagcagatgaaaagggtgtgaaagtaatgagtcttggcctgatgaacaatgtaagtttatttacttcaaatccccctaaatatatatgaatcactattggataagtactgtaactaattacacacgctggcaaaagaaaaaagtaactaatcaacacacaattaattaatgagagggaggaactaaacgggtctggagaaatgtacgtgcaaaagtatccgaagttgaagataagactagtggacgggagcagcatggcagctacggtggttatcaacaatattccaaaggaagccacggaaattgtctttagaggaaatctcacaaaggtggcttcggctgttgtctttgctctgtgccaaaagggcgtcaaggtttgtgaatatatgagggaattggaatatatatactcagcttctcatatcaaacaaaaaataatgtagtaatgtgtatatataggtggtcgtgttacgcgaggaggaacacagcaaactcatcaaatctggggttgacaagaatctggtactgtctacaagcaatagttattactccccaaaggtgtggttggtgggggatggaatagagaacgaagagcagatgaaagcaaaagaaggaaccctctttgttcccttttctcactttccgcccaacaaactccgcaaggactgtttctaccagtccactccagctatgcgtgttcccaagtctgcccaaaacatcgactcctgtgaggtacatctttgaattcttatagatatatctgtaacttttatattatataagctgatagatgtgttcatctataatgaatgaatggttgttatatatatatagaactggctggggaggagggtgatgagtgcatggaaaataggaggtatagtgcatgcacttgagggttgggaggagcatgactgcggcaacacttgcaacgtcctccgtctccacgccatatgggaagctgctcttcgccatgatttccaacctctcccaccatctcctctatgagcttttttcatattcatacatctatgtcccctttcttgattatatctacttcccttccatcattgtttgctgtttactatgtttttctatcgacaatatataagtacccttgttacccttggtgccacgtgcttcatatatgttagaaagggcaaaaaaattcgtcgtatgatatgcttagttaaattttataaaactcaataaaaatcttcagaaacagtgctatgatcattacatcttaactaagtgatatatatctgcgtgcctatttaacaaaataaacaaaaaaacaaaacaaaatatatttgggtgcatcatcaaatcaaagtagttgcaaaaactggacgaggtttttacttaaatggtccttaccccgcatggtccacttgctacctaattaaggattggtagggtgcgtatacgtatataaattgtggcggtgggagatggagttactaaaaacgaaacgtacaagtattattcatagctctcgtataaggggttagtccttagatctagatattttcacttttctttcatttatgtcggagcaacagacactagctggcgcttcaacgtgcatgatcttgattggctagtaaattccaagcatcaatacctaacacatgcccaacttggttcattagtattctttcattggtaaaatacccttacctttcaataatatccagaaataaatatatgaagccatccatcaaccggtgcatttcctcaaggcatggatatgatatcagaacatcgatgaaggtgggagggggtaattagctgagtgtcataaatgaggatccatgtggagatcatcgaatggtagtagtacatgtttggtcttagctggccccaccacaaggaattggactggtgggaagataggggtggttacgtcattccacatatctaccaattaaggagtttaatataaaccttgctatataatgtaccttggctcacaagagttgaagagacacagtgacgacacaaacatattacattcgacggtataatg

SEQ ID NO: 17686 - DNA, 3003 bp, Unknown
  misc_feature (1)..( 3003): 2750-1469P.txt file - cDNA_ID_1810818; gDNA_ID_1621200; Annot_ID_57643
tctctcgaagaagacggcagcaatcgtgtgctccatctcccaggtttatggctacggcacggtggactacgagagaaggccgattgtccagtggaatgccatctacaagaagatttcgctgatggagaagccagagcttggcgctgcttccgtcttgaatcagtgggagaaagccggccgcaagcttaccaagtgggagctctgtcgggtcgtcaaggagcttcgcaagtacaagcgtgccaaccaagctctcgaggtccgtgtcctccttgtatttgccctcgctttattttgtatctttaacactacttacttgatcgcgtatcgttttcataggtgtacgactggatgaacaacagaggcgaaaggtttcggttgtctgcaagtgatgctgcaatccagctcgacttaatcggcaaagtgcgtggcattccagacgccgaagagttcttcctccagctccctgagaattttaaggaccggagagtttatggttccctcctcaatgcctatgtgagggccaagtcgagagaaaaggctgaagccctgctcaacaccatgagggacaaaggttacgccctgcacccgcttcccttcaacgtcatgatgactctctacatgaacctcagggagtatgacaaagtcgacgctatggtcttcgagatgaagcagaaagatatacgtctcgacatttactcctacaacatctggctctcctcttgcggctccttaggatcagttgagaaaatggaactagtgtatcagcagatgaaatcggatgtttccatttatcccaactggaccacgtttagcacaatggccacaatgtacataaagatgggtgaaactgagaaagccgaagatgcactgaggaaggttgaagcaaggattactggtcgtaatcgcattccgtatcactacctcttgagtttgtatggcagccttggtaacaagaaagagctgtaccgagtctggcacgtctacaaatctgttgtcccgagcattcccaatttgggttaccatgccttggtctcgtcgctggtgaggatgggagacattgaaggggccgagaaggtatatgaggaatggcttccagtcaagtcttcttatgaccccaggataccaaatcttctgatgaatgcgtatgtcaaaaacgaccaactagagacagctgaggggttgttcgaccacatggttgaaatgggaggaaaaccaagttcaagtacgtgggagattctagctgttggtcataccagaaagaggtgtatttcagaggctttgacttgtcttagaaatgctttttcggctgaagggtccagcaattggaggcccaaggtgttgatgctgtctggtttcttcaagctctgtgaagaggaatcggatgttaccagtaaagaggccgttttggaattgttaaggcagtcgggggatcttgaagacaaatcttacctagctcttattgatgtggacgaaaacagaacagtaaacaacagtgaaatcgatgcccatgagaccgatgcgcttctaacacagctacaagatgatttgtaatctgatagtcctagatctttgctttaaaaaacgaatcttgtaaccggagtcaactgaggaaatgcgaaatatgtataatgtacacaagagactgcctagtgaaacatgaatgtaagagctgtgtccctttttgtgacagctatttggaattagtgttgcttagggaactggattagcctttgttctcttgtttgattgttgttacttgttaagactaatattggagaggttaggttgtgctcttttattttgggccggacggataaaaggcccgatattgaatatataagtctgagagtctcaaaggcccatctccattaagatatcttcgcggaatcggttgtgagagagagagacggtgatcgggaaatgtcgacgaaaggcgcggcggcggcgtaccctagcgcggctcggatatctgattctccatgttatcttcagtactctgcttctctcaaatgtgagtcatgctcctgatctcaccctttgtgattgtttcttcgaggataggatttgacatgttatcttcagtactgtcaagttccataacgaattagcattgattagatctcatctatttcattatgcttcctcaaggtgattagattagtgggttgaatcccatgtcagtgattcgatttaggtcccatcaattgataacgtcgggtttgattcctgattgtttatgtgtttccgttttcattagttatgcctcttagcttgaccccttgatttcttatcaggtcttgaagaatttggatcagacaagagtaaatgccaggatcattttgatgtgtacaaggaatgcaagaagaaagaggttgttgttgtgaatgaatatttaggcttttggcgtttccaacttctttgctgctttacctatgtgttattttgtttctcagagggaagctcgactggaacgcaataagacacggtcgttgttctcgtgaatgcagatcctcgaataccaatgatgtctcagaacatcacctagctagtagtatcctgttgtttcatttgcaatggctgtgtttgtatgatctatctaagtaaacaagtggaaagtgtttgttaatgttactttttactccccattggtgaatcatggtgtatacctgttaaactttgagagcaagtggttatttatttagttagagagttagagcttctccaccaccatattgaataagaagatctttctctcattcttttactttactctggcgtctgaaacagatccagggattccagtagtgaattgggcttaaaaactgttatatgggctttcgaaagtaaaaggttcggtgagctgccaaagaaaagtcagatgcctttaatcgcatttgacgacgattctttacgtgcgccattgactgcatcgtcgtcttcctcacgcgatttggtaatccgattcgtcttcatctgattccctcccttccgagaataataatg

SEQ ID NO: 17687 - DNA, 3000 bp, Unknown; identical to SEQ ID NO: 8189
  misc_feature (1)..( 3000): 2750-1469P.txt file - cDNA_ID_1810822; gDNA_ID_1621200; Annot_ID_57640

SEQ ID NO: 17688 - DNA, 3000 bp, Unknown; identical to SEQ ID NO: 8189
  misc_feature (1)..( 3000): 2750-1469P.txt file - cDNA_ID_1810822; gDNA_ID_1621200; Annot_ID_174864

SEQ ID NO: 17689 - DNA, 3003 bp, Unknown
  misc_feature (1)..( 3003): 2750-1469P.txt file - cDNA_ID_1810839; gDNA_ID_1621201; Annot_ID_57676
tgatgtgtgtcattgttctatagtgccacgaccgggggaattctagatcgagctatagaagctgaggacaggaagcatggagatttcttgagactggtatagttctgaatatagttcactgtttaacaagtctaaggctagctcttatcttcattctcattactcacttgttttttataggaccatgttgaagggtacctagagttgtcaggcaagacgaaaacttacttttctacagcattttcgatgtgggatgcagatttctatgtcaaagtagatgatgatgttcatgtcaatataggtaagttctaaaatcaacgaattgaattggttttctttatgtcattttgcataccttatactggcaatactaatgggttcaatgtttcactgaaatgtctgcagcaactcttggggaaactcttgttagacaccggaaaaaaccacgggtctatattggttgcatgaaatctggccctgtcctctctcaaaagtaaagcatcttccagtttcctccttcatatcaattttgtattcttgttaagtcatctttgttttatggagcagaggggtgaggtaccatgagccagagtactggaagtttggtgaaaatgggaacaaatacttccgtcatgctactggacagttatacgccatttcaagggacttggcttcttatatatcaatcaatcagtaagatgaagatgagattacattgtatcatagctcatttgttaactcatgtaactcttcgttcttatacatgttaaatgtttcaggcatgttcttcacaagtatgcgaacgaagatgtttcgctaggagcttggtttatcgggattgatgttaaacacattgatgatagaagattatgctgcggaactcctcctggtaagtcttaagctcttttcatctcctgcttgctgtgataccttttaagatgcttcaaaaatcaatgtacatattttgattacttagacagaaaaaacgtcaacatctttggtgttggggacctaactacaataatatctgctttaaagcaaaaggcttaaaaatgaagagaccttaacctatctaaagagatgactcgtccctatcaaaatctctactgatacaaagtcttaccaagaacctaaatgatttaagtttgacaataacatcaaatctttcaacctgaaacatactgaaaatatgttaaaagattcagttttggtatttgcagattgcgaatggaaagcacaagctggaaacatctgtgtagcatcattcgactggagctgcagcggaatctgcagatccgcagatcgcatcaaagaggttcatagacgttgcggtgaaggtgaaaaggctctttggagtgccacgttttgacatataaacagaggaatggtaaaaacataacggttttgctcagcccccaaaaacagctcaaagatcagaggaaggtcgtccagatatacaattccaagagatatccacttttgtattcataggtacatagaatagaagaggcaggaaggattagagataagtgtgaaaacctctggcaagaatcgcaattgcgtattgtgattgtggcgtttccattttggtataaggaaactgaacactacagtgaacacccctgctgctttgttcgttttgggtggcttgaaaatgaagcaacttgtggatttttacatcaaatacaaaacactatgccctgattcttttggatccataaaactattgcatagacagaaatcggatactgtgtaataacctctctggaaatcattaggcgcagtaaactgtaaaacttaacaatgtctctaaaattactttgaaaagtataaaacttgggaaagtaggataaagttagagacttttatttgttggtcttggtcacatgtcaaaacagacactttggttctattggtttgggtttcggtcgtctgaggcccgaaagctgcttcttactcgaaagtcgaaacccttgtgagagaacttggtgatgccgaagatggtaactccgacgagtactggaaccagtttattgagccattcgcagaatctgagggtcaagtggtctcttctctctcattgctttatcttaattaaggtctggttctcttttactttatcgattcctctccatgtgtgtctaccaaagttttgattttttgttgttgttggtgtctgaatccgagtgtgaagtagtcgtacaccctaatcgaaatttccaggatcaaacttagtgaaattcacttgttgatctacgtattgaaaattacgttcagagaggtcgaatcaacggattttttagttgtaattaagctttaactgatcaaaattaaacaacttgaagaagaatgtggacaaaaaaaaagaagagaaattgataagaaaaagtttagtattaattttagactaattaatcttcttggagtgttttgtttctctgttgtttaacgaatgtgttcactgttttgcatttggatctacatttgctacttagttttagtatcaacgggatcttatcgatgaattagtatactcatgctcgacacatgtagagatgatagtactggttttggtgaattaacttattttcttgaagaagaatatacagagaggcatttgccatatagagaacccaaaatggaagtaatttcggttaatccttaggagctagccgtgtgtccctttgtatcttcccaccacaaattagataggaacactcgttttggttagaaatctctttcataaataaattctatcccgctaagattctctcttgttctttagaaacaaaaataagatataatattactaccaggaattgcatggacaagattttttccagattaaaagatattttaccagttttacttgtagactttccaggtattgagtaatgtaatacacgtatctacatgaagatgaggatataaatatccatttatgagaaaagaaaaaaagggacaaacaaaagttggcaagtttaactaagtgaaaagtctatg

SEQ ID NO: 17690 - DNA, 3003 bp, Unknown; identical to SEQ ID NO: 17689
  misc_feature (1)..( 3003): 2750-1469P.txt file - cDNA_ID_1810839; gDNA_ID_1621201; Annot_ID_174926

SEQ ID NO: 17691 - DNA, 3000 bp, Unknown; identical to SEQ ID NO: 8235
  misc_feature (1)..( 3000): 2750-1469P.txt file - cDNA_ID_1810843; gDNA_ID_1621201; Annot_ID_57672

SEQ ID NO: 17692 - DNA, 3003 bp, Unknown
  misc_feature (1)..( 3003): 2750-1469P.txt file - cDNA_ID_1810854; gDNA_ID_1621201; Annot_ID_57667
taagcactgatccatcacaaccctacatgtacatgtatatatatccgtcattaattagtttcgtagttattcagaatgttccactatataaagaaaaaaagaaaaaaaaagagggaaaagaagagtttactcggacaaaacagtcatggaaatgcattctaatgagagcagcagcaagagaaggagcattagaaacgtggtttgaaacaaaatcttgaacaatcttttcagcattaggacaagaattggcatagaaattcatctgcaattgagcttggatcggtccaacaattcccacaagaaagaaagagactgaaagagctatagctatcaagcaattcatctttaaatttgttggtttaatttttgagactctctctgtttgggaggattatgttgtgtgatgtattgagacgttaacataggtttatatagaagagtttgcatgtttggtagtagaagtgggtccatctaagctaactaacatgtgctctttttctactttatttttctggctcataatcagcgccacaataaaaatttgagaaatttttattcataattacaaaatggttttttaatactcttactaatgaagagataatgttacacttcaatgaggcaatttggaagagtttttttataaaaaaaagttaattaaagtttacgtctttccacttatatttattttcctgtaatttgtaaaactaatttgtaatttgtatgttctaaaacacgtagcgaatttgttttctaatatatattaaccaaaatatcaaaaatatactctgatactaaaaatatcaaaagtattagatatggtaaaagatggtgaatgtttggtccataaatcaagctatagtaagttagtaacatagaaagtcttgattttaatgaccgttatgatgtcataatcaacgatttttgtttttttatataccaaaacgcaatagattgtgttgagcgttatgatgtcataatcatcgatacaaaaagtcaagccaacagtagattttagtgagttagtaacatagaaagattagctgaatgtaattaaaagtatcgagtgttctgatgtcataatcaacaactgtaattttttttataacataattgagattatatggaatcttattttggattcatttattttagtcgcgatcgagtactagaatattggtaatcttgaatactctaaatttttggatgatcaatcacctcaagacataacgtactttgatttttcactgaagaacaactcgtttttgccgacatcttcccatccaaaaaaaaaaaaaaaactcgtttcgagagtgatattttttttaattccaaaactacaatacgtactcgacctaatccgcagtagtacaactaaaagaaccgcaaaagaacaactgctaatgagcaagagagtattccaagattattaaccttgttttatattcttaagatcttcttttttttttaagttctttaatgtataatagaagtatataggattaactgcgacttggtagatagactaatttcagatgctaagatataccatatggtaatgatcctagtaaaattacttttgttaaacatatatgtacgaacagtaggacacgtatagtcatgttttctgatagacgattagtgttgccgttatatcattatccgaattaatcttgtaatgcatgtttttaagtgaaataaaatttcaaattacaacgtagtttaataatataagtcataaccgatacaatagtcactagaacataaaactaatatatatgtccaactttacaacgtatactctttttttggaatttttgttttgtcctaaattggtgtttcttatatcttgatgcctaatctttgttttgtaacatgcgcaatgatattaaaacattatattatactaggggaggagaacaaattaaaatttcacacaactactctatagaactgaattattcataaacggacgagagcatttcaactgctcgaaatattttcctatcatcaggagtggcgtttcgtcagattaccacgccaatttatttctttaagtctgtcaaacgttggcatcttctaataaactgatatatatatatgtggattctaaacaaacaaaaaaaaaacttgagaggatatttttagattttcatcctggaaaaataagtgaggctagagaagattttgatgaaagaaatctttaaattttaaactcttttggaaatatcttgaaaaaggattttccctgtaatttataagcggaaacaattcggaccggggccaaaacatgttagaaatatgtggatttgcagatttctgttcgggtcggccggttctgcctagttgtctagttgactaaggttttgtggacgggttcgttatttttctagcgactaagtaaacatgccctcttccatgacctggcgtctagaagaatagtcacggaacgtgtgttccacactcgttatagaccgtattcaactattcaatttttcccaaagaaattacttaagaatttaattagcaagttgggtcttagtaactgaaaacagatacatatttctaatgttattttatgagttgtcgtttgaacaatgtccactaaatgataacgtgcaagacattcgtgaatgtctaatgtgaaaaattccgttttataaggcgaaatgaccattattttatcttataaacaatagtcaattgtgtttcataggaaatttaatatattcaattgaaacaccagcagagatcaagaagatagtggaaggccatgcaatgtcctcctcgagctcctcttgtatttcaaccctcattaagaaacagaggaaaaatgcaaatgggattatctaaatcttgtttggcatttctccatggactatttcaaagccgctgggtgatctataaaaggcctgagaatgtctccttcatcttcatctccaaagctcgttctcaccttacttggcaaacactcaacgaagaaaggagagagagacggtaatg

SEQ ID NO: 17693 - DNA, 3000 bp, Unknown; identical to SEQ ID NO: 8214
  misc_feature (1)..( 3000): 2750-1469P.txt file - cDNA_ID_1810854; gDNA_ID_1621201; Annot_ID_57668

SEQ ID NO: 17694 - DNA, 3003 bp, Unknown; identical to SEQ ID NO: 17692
  misc_feature (1)..( 3003): 2750-1469P.txt file - cDNA_ID_1810854; gDNA_ID_1621201; Annot_ID_174913

SEQ ID NO: 17695 - DNA, 3000 bp, Unknown; identical to SEQ ID NO: 8214
  misc_feature (1)..( 3000): 2750-1469P.txt file - cDNA_ID_1810854; gDNA_ID_1621201; Annot_ID_174915

SEQ ID NO: 17696 - DNA, 3003 bp, Unknown
  misc_feature (1)..( 3003): 2750-1469P.txt file - cDNA_ID_1810866; gDNA_ID_1621201; Annot_ID_57662
atcatggctcatatctctcttcttgttggagcaggggttatgtcacttttagctaaatgggcttaaatgggcctaccattatgcaatatggaattcaaaatgactctactacaaccaattcactaatagatgacacgttatatgattcacttatagtttatagtctttgtttttttttgacacaaacttatagtttatagtcttgtttcatacaaattatatacccttctcgtttcttgacaattattggtttcaaaattttgttttttgtttcattttatcgttttatgtttttagtgtaaacttgtaaacaaaattcaagttttagtttcctatagttaaagagaaaaatttaaagtgtattaataaaatgtatggtcaaatatataaatcccttattggagtgaattttattttcaagatgacggttacactgccaagtgccaacgaaatgttagtagttcgattcttctaagtaggtgaacagaaagttggaaaaatgttccggtgtgaactttactgatactgataaaaaaaaaaaaaaaaaaaatctttactgataaagatctcaaaaaaaaataaaaaaaattgaacgttgactgtttgttgacaaagtaaacgttggccgtatctagatatcaaaattataagatatcatacgtgtttagatgaaatttgacaaatagatggagattagtatcttactgacttttacagttactgaaaaagaaaagagtgaaataggatagtttttagagtatctttttaaaaaatatttttacattctagagatcctaacattactaattagctatgatttttttaatcactttggacaaattcagaaaaaaaccattatccttttcttttgtcatccgaaaataatccattatccttgttaatcgcaatggataatgtaagaaaagaaaagaaaacataatatttgttgcaaaaaatagaattaaatacgttttgtgactgacaaaatactgttagaaaagcttaacagactgtggataaaacacaacttaaccaaaactgaaacgttttatctattacaaacaaaggaaataaaaataaaaatcatatggaaaagaatcgaaaatcaagcaaataaaatccatttgcattaaatgaaatcgaaattaagcaaattataaataatatgtaaaatccagtcagaaatataattaaaaaataaaaagagtaattaattaaaatgtttttcatctccggcagaacgagaggaatcatcttcttcttcttcaaccgcgattgattctcacgcgcgcatgaagacgacgatctctccaagtgttaaccgccgcgcgccgctttttccggagcggagaaggatcgacggaacccaacggtggcggccgtctctttctgccatttccgaagacggatccaccaccgtattcgccggagaaactcatcgctcttttggtaaatttgtagccagagaaacgacgtcgttttcccgcagatatacgacactgaagagcgcctggtataattcatgatttttctattttccaattcattttatttgctgatgttttgtagatgatgatgacattatcataaaatatttgtttgatagtatatatgagaaatatgaattttggttgaatgcgcgcaggagaaacgcaatcacataccatatagcatcgccagggtttgctccttctccgttcatgtattaaaaggtatagtgtgtattcttcttcaccttctgtaacgtcaaaaggtttttacgtagaaccctaatttaaacgaattaatttcttgtaattgtttcgggagccttaattgttatatttaaaaaaaaaactgttttatatttagcggacccatatgtaaatagtgctttttttttgaacaattcatgatttttcatatggttttaagttttaacgttagagaagtttatgtagtgttatgtagaggctatgttgttgaacttttctacagtttcgatcttatctacaaattatattgatccaagttaatcttaccccaaaaagatagttcaaagatgttggtggacatttcatcacgatagatgtcttattttgtgtgtttggattttgggggttgtttcatgtgaaattctcctctctgcatacaaatatcatcacataatggttaggaaagggctcaaaaagccaaagaaataacttgtctgaaaattatcaagcattatctgatttaaaatgcttgaggctctaaatccttcaagtgttgttttgcttgcctgatcctccgtgtcagtttatttttaagttccacatgtttgatactgaagctaataatttatcgctgttagggtaacatgtgtaaatgatacattatcatcatagatattatgattctatatattacaaatgatgattattctgataaatatgtgtattgttagaagtagaatatttcacaaattttgaattgctaaattgattttagatattattatgaattcataacgtttgtgtatttattttgtatttttcatttttgtattgatttatatatataatttttaaaagactacactaataataataactttgttaacaagagtgaaaatttattttggattgattgttttttgtaattttatcttctataactactgtgaaatagatatctataggtatttaaatagattttggtgaaagatattattgttttgttactttaattatatctacttatttctattggacaagtgtgacgatttgattagtattagatccatgtaaacatgtataagaatcttataacttataaattaccccacatgtcataatactgtaaaacaacaattaaaataggtttgtttagataatatttctatttaaacttaaaaaaaaaacctttcacacaagattctcaatttaacaaggaatctgatcgcttcttcttgattaaccctttttctttaacctcttaaaacaagaaaacaagaagacaaaacttgttttataatagagaatg

SEQ ID NO: 17697 - DNA, 3003 bp, Unknown; identical to SEQ ID NO: 17696
  misc_feature (1)..( 3003): 2750-1469P.txt file - cDNA_ID_1810866; gDNA_ID_1621201; Annot_ID_174908

SEQ ID NO: 17698 - DNA, 3003 bp, Unknown
  misc_feature (1)..( 3003): 2750-1469P.txt file - cDNA_ID_1810868; gDNA_ID_1621201; Annot_ID_57661
catatgttcaaaaacttaatgagactcaagttgctctattaattaacacgtcttttattgatggagatcaatggttacagttttctgacctttaaaggaaatatatcaaccaaaactcgttggaatatactctttttatatatcttgaatcggaacattatgattggagaaagtgcaatttttaccaatgatttaaactgaatcattgcaggttaaagttcaaaatggttaaaaaattatttatatatatatgatacataacctccaaattataaagattacaatcgaattgaaaagtctctaggaacaaattagaaataggtacattaattgttgacgacaacgacgactatccaattgtgactacattaattttactaaaccgataaaatagatccgggttcggactttaccggttcggttcaatatatcaacatacgacatgcgatcacaacggagagcaccgccgccggagtattcgcctccgatatacgatctgttccacttagattcacactcgatctctcgaacagacgaagaaatcgtctatctctcttctcaacagatttcctaatttttgtctctatggattttgtttccgtaaagaagatacatctttttgtgtaaattgtcttgtagaaagaaacattgattcagtagagaaataggataaatcaatctctgtacttaaaacaaaagtatcatatatcattcgtcacaaccacacaaagttgttgaaactcagtttcaaagtttgaacgattaattatgcagtcttcaactgctgacttttgagaagattattgatttgtctcaggaatacaaaattgtcaaagtgattcattataaatggccccattcattaatcatccgacggctttcacgttatatagggtttggcactcatatatcgatgggctatatgctacttgtctcgtctaacttggaagaagaaaaaaaaagttttatcttctaatgaaccaatggatatcaaaacttggattttgaatacatgcaaacattacttgagtaaagtatcaaaaacttcattaccgaagcttatgatatagtaattgaattcgtactattgccataataataataaaaaattcatgtactaccacaattcaaagtagagacaaattactatattaaactctgaaggtatttgtgtgccgttgacacaaataaaattatcttagtatgtttttattttgaggcacaaattaatgatcaaatcgttaaaagatgaattctgggaagtatatactgagtggatattttcatttttgttggtagataatatccctcaaatcaaatcagcagtatttcttttcttgtaaaaggttttcagcatattagatgagatccacaaaaacaaatatctacacatcataaagcaataattctttgccaaaaaacaaaaaagcaataattaatttcgctaaaaaaagcaataattaaagaagttagaaattcctgagttttggggaaaacaaaactcgtgatttttaaagctcttccaggttggacgagatatatagtactgtagtctcttgtgattttttgtgctatatttttgtgtattgcgtcgcatatgtatgaccatgccgcatggtatgcagcaactacaaaacattcaattttaatttgtacgaagtccgaatgcagtaaacatatgtactatgtagtaatgtcacacgattctgaaataaaacatatcatggtcaataatcaagatgacatcgatgccattttagatgattttagctctggtttattaagacttgcatcttttcaaaaaaagcaaaatatctatgcgtagacctaaaggtaacaggatagagatttagatagaattattaaataatacgtaagacatacatgttaaagtccaaatcgaggaaagggaaattgggaaaatagagtcataatatcgacataatcagacgtttgagtcggttgacttcacatgtgcttaagtaaagagagaagggaaattgtgttttagatagttccgtacaatttatgtcgacattctctcgacatatagttaagctctttattttagtgtttgttaagatataatcgtattttttaaagtattcacgagaaaaacagtttcatagttacacgtagcatgtatgaacgtagtagaggatctttctcacttttaaaaatctattccctaaagattcgatttttcttttatttcatcccctcaaagtagctctcaactatctataatttaatttttaacaaaaaaaaataaaaaattagtagctccaagactaactatttgtagttttgtaccatggctaaaatttttaaaacaacatgttcgatggccgcatacgcatttcccttttcttatcaatttaaaattaattattgtttagattcttcgcgaatttgattacacagatcacatgggccatttgatcatcatgaccaaaatgattgcgaataatcgattattatttgtttatgttcgaatgaggatagacaaaaaattctgctcagtttttgacaacctcgagtaagttattttagaatcattttcttgaatcacatctattacaaattatttatgaaatatacaactaacgttcattcgtttttatttaaaatttaaatgttttaatttatttcgagggacaaaaacaaatacgggcctagtgatttttcatgtattttcttctttgaattatggagtcaaacttgtttgagttctacagagaaaaaaaagcaaattaaaataaatattgaatgtcatattaaagtatataatataacaaaaaattaaagaaataagtcttctcttagaacagcacctgttaaaatataactatataactgtgtaacacacactttgagataaatacatcgatcactcccaatctccccccgtattttgtcctttattcttccattcttcgcgtcgtcatcatttatcattatcatcgagaagagattcaaattcaaaccctaatcgataagatg

SEQ ID NO: 17699 - DNA, 3003 bp, Unknown; identical to SEQ ID NO: 17698
  misc_feature (1)..( 3003): 2750-1469P.txt file - cDNA_ID_1810868; gDNA_ID_1621201; Annot_ID_174906

SEQ ID NO: 17700 - DNA, 3000 bp, Unknown; identical to SEQ ID NO: 8220
  misc_feature (1)..( 3000): 2750-1469P.txt file - cDNA_ID_1810875; gDNA_ID_1621201; Annot_ID_57659

SEQ ID NO: 17701 - DNA, 3003 bp, Unknown
  misc_feature (1)..( 3003): 2750-1469P.txt file - cDNA_ID_1810881; gDNA_ID_1621201; Annot_ID_57656
attgatatcagaagatactggaggcgaagcaatcaagtacttctctttcattaagcggagtttcgctgtgagctcaggcaatgcagaagcaaaaccgggcacaaagctcagaatatatatcagctcattctctacccagtcaagaagctgattattacagacgcatatgatgaaaaccgtctgcaaaagataaaatgttgacaatgagatgaaacccaaagaatgagaacgaaagtgactcaaaacaaatagggtattacagaaacgctcacaaaacctgtatatgtgtcttgatgattgcctttccaatcaaggttgcaaggaaaaactcccaaaacggtttctcgaattgtccacacatgattccagcaaggtcgaataatgggttaggaacctgaatgtaaggcagaacgtaattgtaataagcacatcataagtttcccggaaccttaaacacacacaaaaagtctatgcaagaagcattggattgttcagacgactcatctaaaacataccgaagcaagaatcaggattgtgaagaagttgagatattgtgaatgcgacaataaccagcttttgatctgatttacgcgtttagcaatgaatccgttatcgtcaccagaacatgtctccaattctttcattttgccaccggaaagacttgctgtataaagtcagagcattaataatcaatcttgatgcaaaaactgtttcatctcctgttcatgtactagatttaaactcgacacctctaaaaccatttaattcattcccacttagtcacttagatatagctcaaacatcaagaagcttctaaaactgggcctcaaagtagatatcttaacactaaccatacacattgagttgtcaataaaaaaggtcggcagagtgaattttcacctgctctggagataaagtaaggaggaagttctcccaacgctgttcctagaccccataggatggcttctatctgaacctgtggtagtatactgctaagaggaactccagaagaaaaaactggggagccaaactcgtggcatggtttatcaagccatgaagggcttctcttcaactgaattgtatcatatatagcactctttaaatcgactcgcccgcactgcattacttttatggtaaataaagcaatatggggacccaaataaagaacaaatgtatgcaaaccagatcctggaatcataaataaaagagaaaagagaactatgttagtaacatctcagcaataagataaaccggaaataagaaactgacacagaatgtcctggagggagtaaaacatattcttaccaagaccaattgatgatgcaacacctaagaatatccaccatagtccaaacctggtgtactcagacagttcttcaacatgctgcacgaggagaaaattagaaaattttaccgttttcttcatctaagaaaacaaaagaagctgataaactaagaatgaaacaaatatattgatcatcactcatgtctttcgatatatgctcttatccccaatttcaatagcagtagaaaagccgtagctgtaggatttctcatccagaagctttcggagatttcttataccaagcaaagaaacatcactagctaaacctacagacagcaacagtctgaatctgtttaccttgacgtgaggcccatctagggtcacaagaagagctgcaaatgcaacaaaaatgctacaaaaaagtataagccagccaacatttgcaagaaggtaagaggaccatcttctaacatagagaaaaacagcaacaacaaataatctcaaggttttgaatggttgtgaggtcaatgtcagtttttcaagatcctgttgatgcttttcacgcaaacctgcaaaacccttagacctattagtcgccaatgtaagaagtgctatatcgttaacattaacactcaagtcactttaatttcagattctaagaaattaagggtcggctcatgattcaaccaaagaccgaaaatttctggtctaatcataacaactggataatcatccaagggaatcgcacacagatgtatatttctaaacaatgtatgcatcgattacagaattttcaatgccgcaactataaaccctaaagtttcaaattttaggaacaaaaacagaaaaagaagggcacctgagatcgcaggagttttagaagaagctcgatttccataacccatatctctttcgcatgctacgaatcaataaacccctaatctgaatatgaattttcaggtgcaacttctcgtcgagtctctactgaagaaactggtctctgattctacaagatgtgtccgtcagacaggaaattagatgaagaagagcattgggtctgaagattttggatggattgagaaaggatccatcaatctcgatctcctatgtttaaggtatgcgaccaaaatcaggttcccgttttgttggatgtgatatggcgcattctattggttcttctcttcggtttaccggttatttataaaccggttccaaaagaaccacgtgtcatttcataacgtgacaaggaatcaaaggctataggagatgttagtttttttgttttttgttttgttagtctttatcaacttcgtaacgacccaagcttggcccattgtgatctacaaatattcattttgatctacaaatttttttaaacgggctttctaaagctaccgtggcggtggctcgttcgtcatccgtcatcttaagcgttccctgaagatacgtgacaaaaattctaggagagtgcaaccgtatacgtgaactaatgggctattttgaaggcccagtgtgatccacaatctttaaaacagaccggataaatttatgttccttccttgttattgcggtcaactttttttgtttttttttgtttggtgaaatcaataacgtctttggctttaaacctttgtgactttgtgtacaaattccggagtgtctctctcccaaatcagcatcgcagattcgatttctcatcctaagagagctgaaaaatg

SEQ ID NO: 17702 - DNA, 3000 bp, Unknown; identical to SEQ ID NO: 8224
  misc_feature (1)..( 3000): 2750-1469P.txt file - cDNA_ID_1810885; gDNA_ID_1621201; Annot_ID_57655

SEQ ID NO: 17703 - DNA, 3003 bp, Unknown
  misc_feature (1)..( 3003): 2750-1469P.txt file - cDNA_ID_1810897; gDNA_ID_1621202; Annot_ID_57724
acgggaagcggtttgttggcccaataacgtctctgattttgcaactacgcaaagaactgtacttacagccttatgaagaaatcaattggatgaaagtccgccatctttgtgcaaaggtaagaatgttaggatgtatcgacatttctctttatgattttctttcatggaaaagaacacggatacattcctctactttaccttaggaagatacatattatccccgtccactggttcaagagttggtatgggacagtctttacatctttgcggagcctttccttgcacgttggccatttaacaagcttcttagggaaaaggctcttcaattggcaatgaaacacatacactatgaagatgaaaatagtcgttatatcaccattgggtgtgttgaaaaggtaaaaacaccttaccttaagacacaaagtattgagcatctggagttaacttcagtctctttctgcaggtactatgcatgctagcttgttgggttgaagacccgaatggggattatttcaagaagcacctctctagaatctccgattacttgtggatggctgaagatgggatgaaaatgcaggtatgtccatggagattggaaatccaatttgttacgtttactaaccttgagttggtaagaaatcgaattttttttgattatgcagagctttggaagtcaactatgggatacagggtttgcgatgcaagctttacttgcaagcaatctctccagtgaaatctctgatgtactcaggagaggacatgagttcataaagaattcacaggttcgatatctctgcagcatatactgtagcacaaggaactatttcttttgaaaaatggaacattagcttaaaattgataaacaattgaaggttggagagaacccttcaggtgattacaaaagcatgtaccgtcatatttcaaaaggagcatggactttttctgaccgagatcacggatggcaagtttcagactgcacagctcatggcttaaaggtaaccagccgttaaaactaaacacattgacatgttcttcagtggcatgagtactacatccttgctgttttctggtctcatagtgctgcctgctgttctcgatgttggcgccggatattgttggcccaaaacaagaccccgagagactacatgattctgttaatatcttgctctctttacaggtgagcattatcagacatagaatagaaccaacatcatcaaagaaacacccattttcaggtcgtgacagtttcacttgtttgcagagcaaaaacggaggtatgactgcctgggagcctgctggtgctcccaagtggttggaagtaagaaccaaaccccataattattttcaaacaaccaaaagatactttttaaaacatttgcggtcatgtaaccttcttcatgtatttgtctcagttgctcaatcccacagaaatgttttccgacattgtgattgagcatgagtacagtgaatgtacatcgtctgcaatccaagcattgagtcttttcaagcaactctaccctgatcacaggacaacagagatcaccgctttcatcaagaaagctgcggaatacctagaaaacatgcaaacacgtgatggttcatggtacactagcgattacgatttatctgaaattgttcacggaaatccaaactaacaagaaatgaaccattgttctttgaatctacaggtatgggaactggggcatttgcttcacgtacggtacatggtttgctcttgcaggcttagcagctgcgggtaagacttttaacgactgtgaggcaatacgcaaaggcgttcagtttcttcttgcagctcagaaagacaacggaggctggggagaaagctacctctcttgctccaaaaaggtacacacttgcacattttgatgaaatcaacttgatgtaggatcattcagtcactacaatcctcttgatctatgcagatatacatagcacaagtaggggagatatcaaacgtggtgcaaactgcttgggctttaatgggtctcattcactctggacaggttttaatcattcaatattgatcgacgaaaatacaattaattaatgaatcagtactatatatgaccagtgctttacacaacaggcagagagagatccgattcctcttcaccgtgctgcgaaacttatcatcaattcacaactggagagtggagattttcctcaacaggtacgtttcctacaccaaaatggctactatcatcttaaaacttccaaattctgtaatagctttactgatagaagtggaaaaaacaaagctaaaagctaattgtagtttgtttaattactttttcagcaagcaaccggagtgtttttgaagaattgcacattacactacgctgcatatagaaacattcatccgttgtgggcactcgcagaatatcgcgcgcgagtttcgttgccatgacgacacttttcataaacttttctttatatcagagaacatgtgaatttattaacctatcatcagtctattacaagaattcgtgtatgcgatatgtcaatgtttttagtcaatgttttctttttgtgtaccgtccattggaaggcatgtttcacatggtgaagatacagagatgcgtgatcgtctaaatttagactaggccatttgttacacttttttttttatgtttcttccaatttttcaacatgttgaacaaaagagtcaaaaccacacaaatgtgttattgtttctttatcttttttttgtgttatagaatctgaaattagattatcagccaaaaataaaacccttaaacaacaaccattagaaaaagaggaaattctccaacccattaatcttgcatctctacttcatttgcttcctccataaagaatctttgatcaatcaaactctattttttttttgtcaaatcaaagtgaagttttctcttttgcatcataaagactcaagagagggaagagatacttttcttccttttgttcaataataataatatatatatagagaagaagagaatg

SEQ ID NO: 17704 - DNA, 3000 bp, Unknown; identical to SEQ ID NO: 8272
  misc_feature (1)..( 3000): 2750-1469P.txt file - cDNA_ID_1810905; gDNA_ID_1621202; Annot_ID_57722

SEQ ID NO: 17705 - DNA, 3000 bp, Unknown; identical to SEQ ID NO: 8255
  misc_feature (1)..( 3000): 2750-1469P.txt file - cDNA_ID_1810909; gDNA_ID_1621202; Annot_ID_57721

SEQ ID NO: 17706 - DNA, 3000 bp, Unknown; identical to SEQ ID NO: 8256
  misc_feature (1)..( 3000): 2750-1469P.txt file - cDNA_ID_1810909; gDNA_ID_1621202; Annot_ID_174986

SEQ ID NO: 17707 - DNA, 3003 bp, Unknown
  misc_feature (1)..( 3003): 2750-1469P.txt file - cDNA_ID_1810916; gDNA_ID_1621202; Annot_ID_57719
ttgtcatccagaaattcagaagacgccaaaatctgataaactacgagagtggtcagttcatttacctttttgggatgaacttcgtaaactttcatatgaaaaagtcatttacatcatccaactgcccacgttgttattcgcaggtacttagcaatgttgagaaaagcttcaaaggagggcattgttgcagaaactatcaatctatatgaccattttttcatgcaaactggtgaatgtagagctaaggttacagcagctaggctcccgtattttgacggtgactactggccaggtgcagcagaggatcttatataccaaatgagtcaagaagaagatggaagaaagggaaataagaaaggaatgctcaagaaaaccattactaaaagggctctaaaagcttctggtcagactgatctatctgggaatgcttccaaggatctgcttctaatgcatagagtaatattttctttctatgaatattgcttcctttttgtatatatttttttctcatttgttttgtttttcttgttaatcatattcacctgttttaccgattcccagctcggtgagaccattcacccgatgaaggaggactttatcatggtccacttgcagccttcttgcactcattgctgcatactgatggtatctggtaatcgttgggtctgcagccagtgcaaacacttccagatttgtgacaagtaagaattctttcgaggtctttttgctctttgattttataatcccttctttgttgtattgcacataagattatgtagaagtcccgagagatacatttattggatgggctatgtgtccttgttactgattaagttcctctgaatctaaaatgtcattcttctttttaggtgttacgaggctgagcagagacgtgaagacagggaaaggcatcctgttaattttaaggataagcatgcgttgtatccagtgagttgcattttcttgttgaggatagtgttctttagctttgtctatgatcagttttgtgaatattggtggtattgatatcgcaggttgagattatggatattcctgcagatacaagagacaaagatgaaatactcgaaagcgagtttttcgacactagacaagcatttctgagtctttgtcaagggaaccattatcagtatgatacattgaggcgggcaaaacattcgtccatgatggtcctttatcatctacataacccaaccgctcctgcctttgtcacgacctgcaatgcgtgtcatcttgacattgaaactggtcaaggctggcgctgtgaagtatgtccagactacgatgtgtgcaatgcctgtttcagtagagatggtggagttaatcatcctcacaagttgacgaatcatccatctttagctgatcaaaatgctcaaaacaaagaagcgaggcaattgcgagtcttgcaggtatacactatactgttcctttctaaaactgatggtgcttctctcttggtcctgaaatttgtatgcaaatagtaacattttttttttgttctcttcttttggttttgcagcttaggaaaatgctcgatcttctggtacatgcatcacaatgtcgttcggcacattgtcaatatccgaattgccggaaagtgaaagggctattccgacatggtatcaactgcaaagtacgtgcttcgggaggttgtgttctatgcaaaaaaatgtggtatctcctgcaactccatgctcgggcctgcaaggaatcagagtgccatgtacctcgttgcaggtaaacaaacctcatgaaattacatcaaccttacatttaagacgtgaaacatatttggtccatttgattttgtgttgatgatcattgtgaacatctctgtctctctgttcagggacctaaaggagcatctgagaagattacagcagcaatcagattcacggcgcagagcagctgtaatggaaatgatgagacaaagagctgcagaagtcgctgggggctcaggttaaaaaaaacttgtatatttagaaagatcaattcaaagttgcaaaaactttcatccttctctcgaaggtaacaccttttggaagaagaagaagaagagccagttagagagagacagattgtgaaattagcttagattggtatttaacagtcacgggtcagggattaacatgcgagctttaaaccaaggatgccactttccagaagaagaagaaagagagcaatgccagccttcttcacagatgacaagagtgttgagagattcaggtttgatggggtttggttggctgatcttctgattctatctatacatacacacacgcgcacacacacacttgcccacttctatttttggtaatttattgtatttttgtaaaattgacatttctgattcgggaatggcaagagtgtaacatatacagtacgttaacgtgtttttttttttttttgttttttttttgtgtaagcaaagtaagataagagagaatagagagtctttagattctctaccactctttttttttggtaatttgtattgatgaaatttgtattcacactttgaatcaataataatttagttctttgattagatttgtaaacgtgcatgttttatttgcagttagtgtgttactgtgattgagaagaaggtttagagagacgaatcttaatgccacgtaagcaggagattctgataagtatctaactgggcgtttggtggagtttgagaagtatctaaattccaagccaccagaaacggacacgtgtctaaacaaggatagagtgtagaacgagaaccacttagcttaagcaagacagagagtctgatgagaaaactgcacaagaaaatcagcaagagtaatgataatacactgtccttcgtcatctctctatcgcgcgaaattgttatacaacagaggtagtagtaaatctcatcagtgtcagtgtcagagtcgcttggtgactcgatctgcggctgttcgtatatccacggcgacgatcggggctatagccgcggcggttatgatg

SEQ ID NO: 17708 - DNA, 3003 bp, Unknown
  misc_feature (1)..( 3003): 2750-1469P.txt file - cDNA_ID_1810920; gDNA_ID_1621202; Annot_ID_57718
aggaacctaaatcggaatttgggtgctccatcaatggcttcgattttggctcgcaggtcactgaatactctccgtgctcgacatctcgtatgaatcttgttcgctcttgttatttcttcattttgtgtcctttagttagagttatttgaatgcctagaaatgggaatgtctcctggagttttgggagcttaagatgattctattcactctctgtgttttgttttgtgtcgacgagattctggattttatctagctgatcgatgaaatcatgtagggagatttgaatttgatcatggttcatcttaagggctttcgttttacttatggtttccttattctttttcgcatttaatttttgtgacgaaagccttttcgcaagtcaatttttttttgtttttttttgcgagctttaatcctttcattagcttgatatggtgtgtatgttctgaatacctctctgattacttctcgacattgataggttttgtcagggcaagctttacagggatctcatctgtctagactgcagtcccgtggtatatcttatggcagcaacaaaggtatattttctgctcttgtttggttttctttggtaaatcaggtttaattgtgaatctaccccttttccaacttgtattacgagattctgattcatatatgacttatggtttgcgtatgtaatattcagatgatgaagaagcagagcaactttctaaggaaatctccaaggactggaatactggtaatccatatgatctagacaattttactttttttctcctttcttcttttcttgtacgtctatcttccttggtgttttcctccccgagtattagtgattcctgatattctcaaatttgtagtctttgaacggagcataaacaccctgttcctcacagaaatggtccgcggtttgtcgctgaccctcaagtacttctttgatccaaaagttactgtgagtgatatcttttctagtcttccaaacttagattgaaagaaatctgtgttactgaagctctttcgtgtatgcagatcaattatccatttgagaagggtcctctgagccctcgcttccgtggtgaacatgctcttcgaagatatcctaccggggaagaacgctgcattgcctgcaaactctgtgaagctgtgagttttgagatcgatatgaatccttcatttaatttaacgttctctttgttctgatatggtactctgagtctatcaaattcatcttagtaattaggaaagctatttgagtatgagtaatatttactgtttagtctctagagttctgatgaaatggtcatattagctgacaatgatctatttagtgtgtataaaagttcaccacggattgtaattcttgtgagggatacttgtccttttcatcaggtatgtccagctcaagcaatcacaatagaggcagaagagagggaagatggaagccgcagaaccactaggtcatcatccctttagttctcatttatcaaccatctgctttctttattaccctttcatgatgatttgagctgtatcgtacaggtacgatatcgacatgacaaaatgcatctactgtggtttctgccaagaagcttgccccgttgatgcaatcgttgaaggacctaactttgaattcgcaaccgagacacacgaggtctgtttttcacattttctagaccctaataattttcgaggcatgcttattgaaatttttgttatattctctatgataggaacttctctatgacaaagagaagcttcttgagaatggagatcgatgggagacagagattgctgagaatctgaggtcggagagtctctaccgctgaaccattctacaacagtctctgcttcattcaacttgtttttcccggggaaacattttcgttgcttctgtttgaaaataaagacgagatcatatgcgtgtgaaaactcttttgtaatccagattttgtgctgtgtaattgaattgtttgtaaccaacctgactttgattttcggttcatgagttccggttattaggtgttttcggttcggagaaagagcatttaatttggtcaaagactgaaaacagataagtcttaagctacaagggtatatctgtacattaagaaatatttgatcggacggacaagatcatgtcttttttttttttacggcggacggacaggatcatatgcttatagtttatcctaatctgtccgatctaaacataatgcttgtcgattttttcatttatttgccttttggttgcgccaattatcgtattcagacagcaaaattaatattttaatgtgtattttttgttgagttactattttagaaaaacaacgaatccctagaaaggaaagaaaaaaaaaaacaaaatccccaaatcgagcgagtccaaagaaaaatcccaaattcgacgaacctacaagcccagaacatcccccgatttgggaaaacctgaattcattcgcttttgatttgccatcttctttctgggatttgtctactgcttgatcctaatttctgacctcgcttttggtttgagttcacacgtgccgcatcggctgttcaccggctttgtttcattgtgcagactccaatcatcgtacaatctgtagcaaccggttggtctccgtcaaatttctccactttgttgccaaattttactcctttttgtatcaattcaaagattgggggtgaatttttagggtttatcattttgttcatttttggtaactattttggggtttaattacttctttagttgatactatgattgatactatctcccaattaatatgagatcaaattgtgacaatttcagttctctgattacaccaagtttttttagcaggacattctctaaggtgctaaatcaggagatgaaatttggatactgtgacttctggaggagaggaaagttatgcagtgtttgttactgttaattaccagaagaactaggacaaggcgacggagactgaagaggtagctatgaatgttcaggctcacatg

SEQ ID NO: 17709 - DNA, 3000 bp, Unknown
  misc_feature (1)..( 3000): 2750-1469P.txt file - cDNA_ID_1810956; gDNA_ID_1621202; Annot_ID_57707
acctctcaaacctaactccttttatcttattcttatgcatctacctatcttccctagatagtttccaatataaatcacacctaactattgtcatttatatccgataattgagatcccatttatgatttgagtaactcgatgggaacttcttcaagtttgaaaacgatattacatgaatacatccaatgtaaaagttgtcacgaaatgttccaaagtcataatgaatgtatggactgagtaattttacggtctcggattttgaaagaagagttcatcaatgtacatgtttttagatcacaactcttaattactttcgatattagttagttattttttttaccttccgattaagatgttagatccaaagatgtatccgttaggtcacgagcttctcatgtatggaccaaagtacatgtgatatgtatgcactagtaagccccaacaattaatgaaacacatgtctttaatgggacgctttacacatccagtgaagcctcttttgaattgttgtaagatctaggtgtgtgatatgatgttggaacaaaagcataattaaagtcactattatcaaaaactttgatacacgaataattatgtatatgaaccgaaagataaatcaatatatagttcaaaatgcatgaaaccttttctttacaacaaattaaattatagtggttcctttaaggaaagatgaagtttctaggtaaggcaccctttaagattcttacaatggttgtagtagtttcttcttttcttttgaaatgttgatatcacatgaataacaccaacaccaactttaagttgaatcaaataagaagagaagaaaaagaaagaaagtgagaaccaaagttattcaaagagaaaagaaaaggataccatacaacaaagtcaaggtgcaatgtcacttgctcttcaatcaaagacgaaaccacaattcaagatttcattttttttttaatggtaagacaaagacatcatatatttttaatagtacatatgatcaaatgtaacaggcacctattacttaatgtctcgttaatgtgttgaaataaacctccttaatgttggtcgtctcgtataatatataacaaattcgaatggagatcaatattgaaatttgaaagaaaccaaacacgtatttaagttgtgcatcatggccactcttttactttacaaagtctactttttttttaattggactttgtaacacaaattaagatggtggaaacttaaaagcttttagaggacaaaggcataatgttttcactttttattgtgtaggaaagaaaatataacaaagcaccaaaaatatgtaaagaagaaggaaaaaaatagagtaaaagagacataaattaaagtaggaattaattcttgtgtgttactttctatcttatatcatcttcaataagaacatgtctccatctttctttcttcacctcttggttctcttaattttatacatctcaggatggatacttcaacttttagtttattttgtttagattcaattcgaggataatggagccaatccaatttatccagtttataagaacaaaactttatctttatcttttattttccatagtattgttctttatttatttatgaaaattgagtataatttgaaaaacaattgaattttatcaggaaataataaaattatcaacattgtttatttactgaaataaatggtttctactaaatttgttagaaatagtttatctttttttggttattagaagaaaaaaaaaaggtccaagaaagggtcaaacagaagtagccaggatgtttcaccacgtggcaccacatggcgccaaactcgtacgaaatagtagtaaaaacagtgttacaaaaaaaggaaaaaagtaagattttacccattttaacggtccgtacaaaagacagtatgtgggtcccaaggaaaagtgttcgccacgctggaatgcttacatggcaatgcgtaggactcttccggaactttttacacgtgtcatattctcattgcatatatcgtcaaaacaaaattaacttctatctttttacggtgatgaatgtcctaaactacccctgtaatggcggtaaattcacagtctaactgttctaacaccatttaattggtacggtgaagttaaaagaaaaaaaccgaatccgagcgttactcctaatagtatgaccagattacaaaagaagcgattcaataacttttccgccaatttcgatacaagttaccacttcaaaattttgtaataataactgaaaatatttgtgtgtttcaaaatcaccacaataaccgatactacaatcaaacaaggattgcaattcaaagcattaggcaacaaaattaccaaaaaaaagtgaattcatatatttatgattgactttgagaaagtgtgtaaagcaaatgagaaaatttaccaaaaagataaatataggcaaaaaatcaaagatatatcaaaccataagaaacatggtaagttaattaaaaaatttccagtatgtaaataaaaatagatttacctttgaacaaattaaagatatgaaaattccaaaaaatgggtaattaatactatttgtttgtccctaaaaataaaatctctcttcacgttagtcgcatcgatgtgtataaataggaaacaaccatttggttgaggttcgtttcgatttggtcttccctcaccaaataaaaaagaaaagagaaaaaaaaagcaaagccatccttcacgcacatcaaagcaccaaaaacaaaaaccgaaacgcatgcatttctaattttctatcttctttttaacttcctcttctcccaccattttcatcatcttcttctctctaaacctctccttcaatggccgtcgatgctcaccatctctttctttctcctcctcaactcttctccaacaggtatctaacgctctctctgtacaatctttggagttttctttgtgattttatcaacgtaactgaatcttttcttatttgtatttttgcagagaattaacgatg

SEQ ID NO: 17710 - DNA, 3003 bp, Unknown
  misc_feature (1)..( 3003): 2750-1469P.txt file - cDNA_ID_1810966; gDNA_ID_1621202; Annot_ID_57704
aaaaacgaacatttaatcgtataatatttaatactagtagtaatcaattgaattttttttaaaaaatactattatataacgtgccgcatttaattttgccccatagactttaaaacaatttctacatttcggcccttaaatattggctccgtctatataactctctctgcgtttacacatccccccattactctctctatctctcgatgattcttgatatggctgctgacgtcagctctctcgtacggttactaagcggttacaaagatgatcgagcggtggttaaagattctgccggagccaaatcctcggcggcgctgatgactcgtgaccttcttggaaacggcagaggaggaggaggcgatcggtctttagagcttgacctcgaccttcaagtccccaccggttatgaaaaacgcctcgacttgaaggttcgtgttgaattgatggatcctctttagtctttcctttagtggttttggctgattagatcgtatcattgttgttttttttaacagtcagggaaagtgtatttgcaacgatgcaattcaacgagctcgtcgtcaataacaaacgcagaccaaaccaatcaaacagtaccaacgtttcaggatttgaattttcctcctccgactttgaacaattctcctttgttgaacctcttcgacgatacaacgccggaactgaagctacttccgtcgtctcgttcttctcgtccgaacactagtaatttacagagtgtatgcacactggacaaggtgaaatcagctctagagagggcagagagagatcctgctatgttcaagaaacgtcaatcaccggatgatacggtttacgatcattataggacggaggctgtagcgtcaccggtggttgccggatgtcctggttgtttatcgtacgtgttggtgatgatgaataacccgaaatgtccgaggtgtgataccattgttcctttgcctacaaatcctatgaagaagaagcctaagattgatctcaacatatcaatctgaatgttttggagtttatattggaacatttttgtaaatgatagataacaattcagggggtttattttgtaaaacttaagaaagaagaaaaaattgatggtaaggaaggaagattagaaggatgttaatggtgttttttgtaaatgcgttagttgaacaacaacaagaattttatttagaaacatagtaattcacggaataaatgagtcaattaaatgacgacaattaatgttacaattatcttattttctacttttgaataaactcgtagtccatggttggttggaaggtagtttgaattcattgtatatgtccatctaaatgcactgtctttttatgaaaagaaaaaaactattattaatagtgttatttgtcaattttgttatatattttaaaaaactccttgataatgtttggcttgaaattgtatccaaatgcctctcttatctgagtggttatgatttcctgaaattgatgactactaattactaaatgaaatgaggaagttgtgtttgcatgcatgcatgatatcttcaacaaacatgtttctcaacccaattaaagataaattttcaatctctgtgtttggacaaaaattgattataagaaaaaggcaaaaataaatgtgacaactgtttaatttttttgaaggacattcaatgttgtaatttatgtgaggtttaactttttaaggtcattcaaagttatgctgacctaacttcaaatgcttaggtcaacagagcacacatattcacatactatacgaataactgcaagtctgcaactaacgtaataaatcgcggctattaaaatccgatatgcatgtagacatgtagtagtaaacttatcttattagtatttttttaaaatgtcaacgaggtaaggaaatgtagaaatgcaaatactcacgacgagcatatattacatggacgtaatttctccgatattatactacgaccgacgagtagatgagttagatttattacgatagaatttatactaacggtggacctgaaataataatatttcgtaggtagtatagtttttgcattaaacagttttgtatgtgtgtggcattaatacattactccggatgggatacgtatcgtatagattgtatggtttgatattcatctttatccataacaaaaaaaatctagctagtgtatatttttcgtacgttacaagtttcgaaaattaggtttacgtctataattatatgacaaacatattttaaatatctaagtctcatcttcaatggaaactagtcctaaactcctaagttgatgtacgattttttttctcgttaggtggatttcagattataggaaaatgatatagaaaaagaaataagaaaaaaagaagagaaatggagaaactcatcctaatagaaacgaattcaattaatgggatcgtgacctctaataaattgtaattaatgctcctgctacatttatgaactttggtcatttcctttacgaaaacaatgtaaattccacgtgtcaacttatttgccatctctccattaattgattttggcatatttgtttcatctcgtgcttttcaggaaaaccaccaaaacaaaataagacgagaaaaacgatatcgtatgaaaatgtgatttctcatagttacatgtaattataagtcatacgtatatccgaaaatgtgaacaattcattatttgtccatgtttttcattattgaagcacgtacgacaacgtttgaccagcacattttttggcccaatatgaatccccatagagagattcttttttggcccaattaaacagcggtataaataaatgggcctagcccatgttgtttttatttttatactattttattatttccaccctcttcacaaaaaccctaaaccctaatttgaagttgttcgattcgatatccttgtgtgtgtgtgcagacagttttcattttccaattccattactgcctcttctttgttgctggttctgagtcagtggtgataatg

SEQ ID NO: 17711 - DNA, 3003 bp, Unknown
  misc_feature (1)..( 3003): 2750-1469P.txt file - cDNA_ID_1810979; gDNA_ID_1621202; Annot_ID_57699
aatcatatacagagaggcgaaactgagcaattcacataaaacttcactacctaatttatgattacaaaactcataagtccaatttcaaactttgataagaaaagcatcgattgacatagacctcatcaacaattaagcaattctctatagtctattcaacatttcaaaagctcgaaaacccagtagaaccactgtcaaatcatagaaacaatccaaacgctcgaaatcaatccagacactctcaaacccagaagctaacgagtggtcaaacgaatggctaattgagaacagatcgcgaatcagatatcgacttacactgagaaaggtggctggattaaagatcttttgcggaagagaaggagtaatcagtcggtgactagcagccaagaaagttctggagaaaagggtcgaggccatatccacctcaaatattctctcgataaaatgcaacagagatgatgggttgagttagaaagacgccaaaactatttgctgtcagattgattctcttcaagtactaaacccaaaaaggttgcaactttgcaaacgtttttatcaataaagaggattttgtcactgccgccacgaacgggtctggaagagagacacgtctagggcgtctttggcgtttcgtttcaccaaacgtgcttcttcgcgttttgtgttttgatatttttctattccggtttaactaatctgatctaaaccaaaacatgaaccgattcaaaagtatccattgataaagctggaaaattctacacaatgttacatctttaatgaacatatccaaagaaacaaaagatgaaaaagagattcaaaaggggaatcctttacggatgtatttcttggatttctcagctaaacgtttcatgtttttggatttctcgtaaaactccatcagctcggttgcaatatcttgtggatgacacattacataaaccttcaagaaccgtttctcgctcatccttaccgctctgaaaatgctcacttcttttatcaatggctttagacgcatttccaagactctcttaacgagatccgcacgaggttttagacgagactcgaggttgaggagaagcaaacaagggtgcttaaccacggaatgagctggaagtttcatcgaggctatgacgaaagtcatgtttctctgaactttctcaacagagagagagagaaggattgggcattttccatacaggtgccaaatctcttcttccgagaacccaaacttttccaagtttctaactttctcttcgattgtctccatcctcgagaccccgatgatgactgcaacatatttaaacatcttggattctctggtgactccagttttctcaatgtattcaaacttctcattgttaaagtttgttcttggaatcaacgtgggtcgcgatatcaacattgcgacaagatcctgttggctaaagcccaaccctttgtagtattctatcgcgggtttgatcttgtcatcgaggtcatacaacatgagtgacggattccggataatgactctgcgcaacacctcttttgaccccaaaatctccatgaagtagttgatcctttcatcaaggacaagacggcaactaaagaacctaggacgacagttaagaatcttcacaaggtctgaagacgtgattcccagtggcttaagaaggcttaacttaaactctaactgagcaacattggctctctgcaaagcaggcctacgagtaaaaagcttggatatttcatcatcatcacaaccccatcttcgtaaaacttgtaaaggactactagtaatatctctcactttctctttttcaccaacttctccaacataatcaaatttttttctcctagacgatagatcagaatcctcaatgcattcttcagattcattcaggcataacgtcgaacacctggtggtaaaggtagcagaaatgagatttctacaaccagcctttctgaccaagctcgaactagtaaacaataatctgataacagctaagaaatttctcttcccggtcgaatgcatttcaagggcgtaatcgagagtttaacaaactggagaaataaaggagcaaattttctctaagaatcaacaatggctctgcctcaacgacacaatcagcgacatttacacgcgtatttcagatgcttcttccatccaattttccgaaatagctagaaaaaatggaacaattaccagtacacgaagcttgtgatgaacgagcgaagaaacaaactccgaccaacggaggagagtttgtcagagaagaaggaggcgatggagagagacacagccaattcggaccaggtttgagtccgagtcgggcgtggaagcgagagagagtaggggactaggggtagtaaataaataatgtggttcaaactgaaaagagatataaaatattggactattatgtaagatacagtaactgtgaagttgttaaaacgccgccgttttggtttttttgtttctctcgttttctggcgtcagactctcaccctttgtgcaagaaaccttgagagcttaaaaattcttcacttgggtctcttctctctctcttctcttgcgaccattccgttcgatccatatatcaaaggtatgttgctttgattgaatgggtttcttttgttgaatttaaattgataactttaaatatattgaatttggggtttaagaaaagttttcaattttcgtctctgagtttgagctaagagctgatctttgagtttgagtttgtgtttgatttgattcactcacaattcttaattagggttggtatatcttgtctttttcatcgttttccttacacattgcccatggcgatgagactcttccgggtttttaagctttgtcagatttgaacgcttcagtctacttacttgctcagacgtggtttcttttcatttaagtttgaacattgttgatgaagaacagatttagcttccacgtttctaaatttccagagatgacactatttcgcattttttgcagcttgatttagttggttttcaatg

SEQ ID NO: 17712 - DNA, 3003 bp, Unknown
  misc_feature (1)..( 3003): 2750-1469P.txt file - cDNA_ID_1810992; gDNA_ID_1621202; Annot_ID_57692
aggtcccaaattgaagcaatgaatatccaaatgtccactttgaagaatgacctggagactgaacatgagaaatggcgtgttgctcagagaaattatgaaagacaggttggttaaagctctctatttcaagaaacattttgaccatcatgcatattcacgttgacgttggtttttattatatgatgctagaaactgactagattttattacccatcctgttgatccatttcatgaaactgttgttttctgaatactctattttactgcacctttgtcatatatccgaggatatcttcaaatattttctgaattgtgttttacattacattaaatcattgttaggtttttcataacttaaggtcttactgccatcagctaattctgttcttctctctttccatagatattacaactatcactctttttgtttcctacttctttttggagtgcaggttattctgctgtctgaaactattcaggagcttacgaaaacatcacaagccttagcagcccttcaagaggaggcatctgaactacgtaaattggctgatgcacggggaattgaaaatgtaacttctacttgtacacaactttttgtgattcaattcttcctacaattatagttgattcgtgaaacatcaatttctattttcttggtgtttatcagtctgagcttaatgccaagtggagtgaagagaaattgatgctagagcagcaaaagaatctggctgagaaaaagtatcatgaacttaatgaacaggtggccactgctctctgatctcttacgttgtagcttttatttgagcagccttattatttagtgtgttcaggatagtctttgacgatagtctttttccaattctttatgggtcaataatgcttaatcctccatgtgaatttgtgtagactttaattcatggtcatgttacaagtactcacgtatcttaattgatctctacatcagaacaaattactccatagcagacttgaagctaagcatcttaactcggctgagaagaacagccgttctggcacaatatcatctggaagcactgactcggatcaccttgaagattcgggtttgcaaagagtagttcattatctacgcagaaccaaggaaatagtaagagaacttcctttgcaggattgcttttcctttctttatgccccttctttgtactgtggggttatctaagtcatgtgcatcctttttgacaggctgaaacagagatctcactaatgagacaggagaaacttcggttgcagtcgcaagtgagttgttgtctcctctcttatgcctaatttgctacgacatcccttttaagcgacaacctttctcaatacacacatgcaaagcgaaaacctcctctattattcagagttgtggctgcggtatgatttttttttttgcaatttgtttgtctagcttgagagtgcattgaagatggcagaatctgcccggggttcacttactgctgagcgcgccagtacgagagcctcattattgaccgacgatggaatcaaatctcttcagcttcaggtaaagttgggtgattcgatatctgataacatatgaactaatgatctaattagtctttgtattggttgggttgaaacaattttcatttgctgactttaaattctccttgcaggttagtgagatgaacttgctccgtgaaagcaacatgcaactcagggaggaaaacaaacacaattttgagaagtgtcaggtttgtatggaacctttctttatgtctctcaaatgaccaaaccacattacaccacctgattttgttagctgtcttagagaaagctgataaaaaatttaaaacatcaggaaatgcgtgaggtagctcaaaaggctaggatggaatctgaaaatttcgaaaatctattaaagacaaagcaaacagagttggacttgtgtatgaaagagatggaaaagctaaggatggagacagatcttcacaaaaagagggttgatgaggtacgtcatatatgtatgggctcatacttacaattactttttgttactggttcatacttacaattacttgatgctttgtgaagttgcgggagacatacagaaacattgatattgctgactacaaccgcctcaaagatgaagtgcggcaattagaggtatgcttataaagataatatgacgttgtctaaatttctgcaatagtgggtgttttccaagggtgtgcatggatatgatatccctaccctttcactatatttgttgtcgtgaaattagttacaatgttaatggagatgataccatgtctgctgaaggtggttagttcttgctccttgatccctactggttaaagaacataaggtgctttatctatttgatattgggatggtcaatgaaccatgtgtgggatgccctttgagagagcctctttgtctcctagtttgggactactccctatcttgtaacctactctttaaatttcctccatctcgctggaacaccccaactatatgttgatttccacagttgcattattgatcattaatcgcatatagaattctagtgtacggtaattctcaattttgctgatgagaatttttggtgaagtcttagtgatatttgttaatattgtgtcattttggtttcgataatttgttgaatttgaattctgggcgtcccactggtctttagccctgcttttcctctaagttcttatatcaattgtgacgccatgatatggtttttaggagaaactgaaagcaaaagatgctcatgctgaagattgtaagaaagttctgttagagaagcagaataagatatctcttttggagaaggagctaactaactgcaaaaaagatctgagtgagagggagaagaggctagatgatgctcagcaagcacaggtagaatgagaattgagaactatctcgctgagttcattttagcttttacatgttgaagaagtactatcctatgtagatatattcatctgtctctgttacttattgtaggctactatg

SEQ ID NO: 17713 - DNA, 3003 bp, Unknown
  misc_feature (1)..( 3003): 2750-1469P.txt file - cDNA_ID_1810996; gDNA_ID_1621202; Annot_ID_57691
gtaaagaggtttgcaggctgttacatgctttgctcataaaattgaatcatagtctcagtggcactctagcttttcgaatgggtgacagagatgtattcttgtagctgtagtgccaggaaggaagaacttcttacatctgcttgaggattcagaggtatgacagattgctaaatcattctattctcttctttgttgtccacttttctagggtatcaaatttgttgtttggaactcaccttattggctgaattgcttgttccaggaagctactaaaagagcccaagaaaaagcttttgaacgcatccggattctcgaagaagattttgcgaaggctaggtatatttatcatcctcttgtcttttgtctttcatttcttactgggcaagtgattatttttgtgcaaaaagttttgtttgataaactagggtacctctgggtatgtaacacattttctagttggatagtcaagttgagagctaggacccagactatactagcgaaggaaataaagtgtggaaagcgtagtatctagtgtgaaacgtgtttgcagatgcaggtggattgctgaaaatactaatctgagcttatgtgtttgcaatcccagtgtcgatgtcctatagaagttataatcgtacgtcttgatacatagagaaacaacatgaaaaactggattgtatcttatgcagcatatccatgaaacgtaaactgtagttattgatttttgtcattgtttcctgtaaatttattttactgaacattataaactgcgttgttttcatctttcccctttggatttttaggagtgaagtaattgcaataaggtctgaacgggataagttggcgatggaggcaaattttgctagggaaaaattagagggcatcatgaaagaatctgaacgcaaggtgatttttatcacaaattcatatcatcagaagcttgtggtttcttcaaaattttcaccttatctctgtttatcttagagagaagaaatgaatagcgttttggcaagaaacatagagttctcacagctaatcattgaccaccagaggaaattgcgcgagagctccgagtctctgcacgcagcggaagagatctccagaaaattatctatggaggtagtataccatcacccgttaagtttatgattttttttgctttaatactaacagtcatctataggtctcagttctaaaacaagaaaaagagctgttatcaaatgctgaaaaaagagcgtctgatgaagtctctgctctatctcaaagagtttaccgtcttcaggttggaaacatgagaggagtgcaatttgatcttaagctgtgcgtactctttttttttttgctgacctgttgttctgcaggctaccttggatactgtacaaagtacagaggaagttcgtgaggtaagaaaacgacctttgatattagtttactaattctattctgcaataccgattaaaaatgttataactttatcaaaatactcaggaaacaagagctgccgagagaaggaaacaagaggagcatattaagcaacttcaggtctatataatatttgataagtctttcaaaattattatgtaagaagagtagaagttaaccgatgtgttggatgggttgtcacagagagaatgggctgaagccaaaaaagaattgcaagaagaaaggagcaatgcacgggattttacttcggaccggaatcaaactttgaacaatgctgtaatgcaggtagaagaaatgggaaaagaattggctaatgccttgaaggctgtctcagtggcagagtccagggcttctgtcgctgaggtactgtttcaagtctattttacctttcttaataacttagaccatgaatacatgaaccaattccatactgcatcgaggtggtgcgcatcaccagcatctttcagtgtttactctgtccgtctcctaggttgcataccctaattgctttcccaggtcgacattaaattcccattttctggtgctacttttgcgaagtgagtctttgcatgtggtttggcaattggttttacgacttgtgaataggcccaaaccaatttctggaaaatcactacatcgtcaatccactagatttttcagctgtttgccgtccattcacatattggcatatgatcatttttgcctgtttactattattgactattactttacatgtgtaaaattaggctagactttctgatttggagaagaagatacgatcttcagatcctaaggtaaatgttttgatttttctaatcattgaattgtggtgtttacttctaacagcaaagtcctggatggaatttgctattgcgagtttgtaacgattttcattttttcacttttagactcttgatatggatagtggtggaattgtctctctttcggataaggaggtcagtgaagtccttcatttttttttcccgcaattttaaattctgacatggggatttaagttccgtaattatggtattgtttgaaatttcctggttgcaatctatctgtaaaaggctgctcttgttattattctggatgttgtacataagattcaggcaggatttaggataggatctgcagtacgtattactgagttagttgaatttgatcatgtagagttaaggctttcgcataagctattgtttgagttaccttttacttgttgctatatggcaatccaatatttggttgtgtaaggtagtctgttaatctttttttttgctgtggtgattatttactctagatgtccatcgaactgcgtaccgcaaaggaagaaattgaaaaattgaggggagaagtagaatctagtaaaagccacatgctccaggtacttcctgaattggctaagttagtttcgatttcaacatgactattaattgaccttgtgaaccatcatgcagtacaagagtatagctcaggtgaatgaaactgcattaaagcagatggagtctgctcatgagaacttcagacttgaggtatttgtgattatgtttggatgaaacaatg

SEQ ID NO: 17714 - DNA, 3003 bp, Unknown
  misc_feature (1)..( 3003): 2750-1469P.txt file - cDNA_ID_1811007; gDNA_ID_1621202; Annot_ID_57688
acaaaaataaattatcttcattgctttaaaaagcttaaacattattctatttaaaaagttaagaacatttgaacacaacttgctgatgttcacactataacgagcataaaataaaataaaaatacattcttcgatttaatagtagactttacttgatccattcaggtcttatcaatgaaaacaaagactacagagagcttgttggtacataataattagcgtagatgaagggtaatattccaaataaacatgatcttcaagaatttatttcaataaatcaatttcataagagattacataccatttttttttaccatgttcactagaagtctagaatccaaaaaatagacttgcgcgaaagaagagtctctaatcagtaaccacaccatatagttacttagcatataaacggagcattcacaaagcggtcattgcaatacaatcctggtctctgaataaacatctgtttcttcagaatctctcttgccctcaataccatttccttgtttgtaatcttatctttatgatcagtctctgacaaaaccatttggatggcattactaaacgctccaaacgcttctcctttcttcttaacatctgctgatgtctcatctgtttgacatccactcaacagaatccctcggtcaggaaacaatccgttgcttgatcttcctccataaatctcacgatcgctcttcacttgtgcctgcattgcgggtttcatgtagtgttcatcgttcagcgtctcttctatataccctcgagcactttcttcgatcttaccaagtagcgtactttggtcatttgttttccttagcttggtaagaatcactttcatgaacttctttatcttcgggctcgaatcttcaccaaagacatcaaaaagggtgggtctgattttcccaatctcgatattgtcttgcccagtttgttgtttgagaagttcaataaacctctccaacggcagataccttgatctgacaacttcatctccctcgcctacttctacgatctcgcgcgtctctacatgagaacttccgattccacaaaaagcaagcagtttcacaaaaatgctatgcaaacagtttttaaactcgaattcaaaagaagaaactttggattctcgatttggcttcgtcgtggtactctctccgatctgttccttagcttcatcaatgagcccgccgctgtgacaagagtctgatacgatagttatctgacatccctctggaacttgttccactaaatccctgaaatcatcatctggcaatgcaacacacaaaacagcgtagatatataaaaaaaaaaacctcaatcatttctattagtgtccatgtcaacataattcaaaactagccttgagacttaacagagtcaaagagaggggtaaacagattctaaacagagcactctgttttaaacagagcactctgtttttcttcattaaactaaggaaccattccataataaactcttaccaggaattggattcaagtcggaaggaacaatacactcatcaaaacctgtatcatcctcttcccctgtttccggtgggactctcgtgccgtgtccgctgtaatgcacgaataaaacgtcaccggattttgctggctttatgagctccgacaaagcctgacggatgttctttcctgtgggttgagtgtaagattcgtcggtgtcaatcagcacagtgatatcttcctccgcgaatccgaaccggtcaacgagacacttatgcattctatggacgtcattgacgcagccttgtagctcctccgtggttcctggatagttgattcctatcaacaacgctctctttgccattcttgcaaccttcaagagttctttgtcggagaaaaaacttccgctggatctaacgattcttcaatgagatttgtgatgaagattaacattaaaatactaaacattattggcttagtgggaactaactttatgtttctctatttaaatgatggcacgtgaaaattgtggactaattatcaaaaaacataaaacaaatcgccgtctgtggggatcgaacccacggccacgtggttaaaagccacgcgctctaccactgagctaagacggcgagctgatacaacatttcgtaattaattattaaacttaattttaatccgcatgtgtttaaggttcttctataattagtctaagttagcaaaaattacatagtgatgatgatttgtaaggccaagtgaaactatatcatcaggatcgtgatcctataatggatgtttttcttaagtgattttatagcaaagccaaatgaaatcttaagttattctttttttacaaggttcagtgttttaggtcttatcttttgtgtaacacctactttcatataatgatatttatactcttagcgaaaaaaaaatgaaatcttgaacactaatcagtaaaaattgtcaaaaaaaaaaaagaacactaatcagtaataacctattgcgatgagtatcaagtcgacagcaggttcactttaccatttttctcacaatgttggggaataagaaatgaagaattaaaaagaatttttaagttttgcctattttttgacagaaagaaagaatatttttcctatatattttaaaaacaaatcaaaacgccgtctgtggggatcgaacccacggccacgtggttaaaagccacgcgctctaccactgagctaagacggctgaacaataattaaatcataataacattcaaagcataacctaatcagatatgttgaagcccaacaagaggcctaatatctctattcggcccaactaacataacaacgacgtttaattgacgcctggggttttctgtctccggcatagcataatttttcgtcctcccgaagcgctttttcatcttcctttgttctgggtttctctccaaaaatcgccggagaaattcaaatcgtcatctctaattcgtcggagaatccaccgttaggtatataaacacggtttgtttctgaaattagggtacgaaaaaatg

SEQ ID NO: 17715 - DNA, 3000 bp, Unknown; identical to SEQ ID NO: 13669
  misc_feature (1)..( 3000): 2750-1469P.txt file - cDNA_ID_1812229; gDNA_ID_2214643; Annot_ID_188421

SEQ ID NO: 17716 - DNA, 3000 bp, Unknown; identical to SEQ ID NO: 13669
  misc_feature (1)..( 3000): 2750-1469P.txt file - cDNA_ID_1812229; gDNA_ID_2214643; Annot_ID_136306

SEQ ID NO: 17717 - DNA, 3003 bp, Unknown
  misc_feature (1)..( 3003): 2750-1469P.txt file - cDNA_ID_1813111; gDNA_ID_2214662; Annot_ID_188915
atctcataatccttcgtttttcacaaagagtcctcggtactaaaaaaatgaactttatattgtacggacaacatagaagaagaataagctgaaattagttacctttttttctctgacaaaatgaactttataaacaatacataattcatctctcttaaatttccaaaatctaagagatccgttttattctaaactttgatttataatttaagagatttaaagtttgatcaatttttttttgttgcgtctaaaaatctctaaacatcgaaggatggagactgaattgtggtccgttaaaaattggtatttgtaaacaagaaaacaacattacgtaaattgtaattcataaatttgcgtgctttgtgcttgtctacctccacaccggcttacgatgaaccacactctttttaatattcaagacttctatataatcattatatcgtatattcatatatatatatatatatatattatataaataaatattcttttctgttttctgtgttactaacttttattatatagagagagatattcaattatacccaatacaagcctatataattatcaaaattaagtggttttttatttaccaatttgaattctctagatatcttacatacgaggatgtgcttttagtcaaatggacttaaccatttgattccgccttctccaccggaattcgatttcactaagttgcgttatcccgcaatcccgcatagtagggattgagtattgatcgggtcttgtcgatacaaagatgtaaaaaaaaaaattttacatagtcttttttttctgttcttattcttttttttgggggtaaatatctgttattgaacattataattcaaacacttccaaaactttttttaccttgttctgatattgatgcagcgtatcttgaagacaaatgctcctccggtattcatcacgtccgaggagattgtttattgctttacttttgggtttagtttcatatggacttaattaatgtatatttgggctttgaatatttgatattagtttgcttattctttaggctagggtttccattctttttctcttattttaagagatgtaattcattattgtaattagtttttgattattgaataaacgagttttaagagagcttgtctaaagcctagagaggaggactctcaaccctaaaagcttgtgttcaagccctgcaaggaggatttgcaaaacctcatcgatatcgttatcgatctcgaccttatctctattgcttcttcatcaagtttcggcgttctaaacaaaatccgttcgttaatccgagttctcatagagattttgtgttttcgtccgttatttagcttccgctctccatcagatattacttttgttcagtagaccattcataaatacctgccttggatccaaaaataggacaaataaacatcatttgcatcattttattattcttaaaagaaattgcaaatttttgaccaaattgcaaatattttgtttttaggttatacccaatacccacatactgtattatagtcgtaataaaaaaaggaaaagttgcaaaataagtagaggacagtgagaagttggtaactatatatgttttggttaatttagttatgggtatggagtctataacgtatggtttcgatatttccaataattagcaatcgtgtatcttcgttagcatcaacattgttgtattttatttagtgcacaccttctcataatttctaaatcaataaaattttaatatcattttatcttggtatatgtcactatgtatgtggttatttttatgcttccatgtttttattttttttgccatggaaccattagcttaggttgaaaatcatcgattgtaaacctatcatgttttcatttttatgaaatattaggtgatcatccgcgctacaccacggttttttcggatgtttttgtattgtttaatttaaatataatttttatttatcttatcatttactcatgcaataagcaattacatttagtattaaaatatttttttctaaccacattctcaacaatgcatcatacacataatttctaaacaatgtttatcttaaaccaatttaacagagggtagtgttggattctataaacctaagaatttaatgatggagctccttacatattcttcaccctcagttatttattatataaatatcaatttaagagaatataaacatcaatttaagagaatataaacatcaatttaagagaataacttagttaaattattaagtaatatactcatactttgagtttggattaccataaaaatcttcgagtatgagaaaactattaaaatgattttattaaaaaatcatgtgatattaaaataaatttagtaaaagtacaattaaatatgtataataaaataatatgtaaaattaaatataaatatatcattaaactatagatttgaaattgaagagattacattaattatttaataaacacatgtcaaatgctaaagtgatgatgtgtctatcatatgaagagagttggccaactttcatatatataatttacgaaaaaaaaaaaaaaaaacaaatattcaagatctctttcttgatatgggccaatttgatacgaaacattttccagccataacctttcgttttactttatacgggctataggcccattatgggttaacgtgtaggcccaataaggtgttttttcaatttggtttgcatttggtgtgtgtgtgtgtgtcagctacaatttctcaaggagaggcgcgtgtaaatcaaacggataatcctacggttttgatgaaatggcttctcgtagacctcacaatctctaaacatctcttctctttatacgctcttcttctagaaacctctcttacctcactctccttaaacctttaatagggtttttaggttactctttgttcaactactacaaactcttttctctttagagattgagagattgtaaaaaaatctcaaatcttttccttcacaactttcaaatctaatg

SEQ ID NO: 17718 - DNA, 3003 bp, Unknown; identical to SEQ ID NO: 17717
  misc_feature (1)..( 3003): 2750-1469P.txt file - cDNA_ID_1813111; gDNA_ID_2214662; Annot_ID_136537

SEQ ID NO: 17719 - DNA, 3000 bp, Unknown; identical to SEQ ID NO: 6247
  misc_feature (1)..( 3000): 2750-1469P.txt file - cDNA_ID_1813791; gDNA_ID_1621084; Annot_ID_55350

SEQ ID NO: 17720 - DNA, 3000 bp, Unknown; identical to SEQ ID NO: 6231
  misc_feature (1)..( 3000): 2750-1469P.txt file - cDNA_ID_1813795; gDNA_ID_1621084; Annot_ID_55348

SEQ ID NO: 17721 - DNA, 3000 bp, Unknown; identical to SEQ ID NO: 6231
  misc_feature (1)..( 3000): 2750-1469P.txt file - cDNA_ID_1813795; gDNA_ID_1621084; Annot_ID_170467

SEQ ID NO: 17722 - DNA, 3000 bp, Unknown; identical to SEQ ID NO: 6244
  misc_feature (1)..( 3000): 2750-1469P.txt file - cDNA_ID_1813805; gDNA_ID_1621084; Annot_ID_55345

SEQ ID NO: 17723 - DNA, 3000 bp, Unknown; identical to SEQ ID NO: 6234
  misc_feature (1)..( 3000): 2750-1469P.txt file - cDNA_ID_1813809; gDNA_ID_1621084; Annot_ID_55343

SEQ ID NO: 17724 - DNA, 3000 bp, Unknown; identical to SEQ ID NO: 6234
  misc_feature (1)..( 3000): 2750-1469P.txt file - cDNA_ID_1813809; gDNA_ID_1621084; Annot_ID_170459

SEQ ID NO: 17725 - DNA, 3003 bp, Unknown
  misc_feature (1)..( 3003): 2750-1469P.txt file - cDNA_ID_1813832; gDNA_ID_1621084; Annot_ID_55336
tacctagaaaaaatataaaacaatgtcaaaaacgaaaaaaatctgacaaataaaattaaaattagaaaaccgacattattgtataatggtttgtgctagtaattttgttatgttgctattcggattcaaactcttgtatgttattgacaaataaaaaaatccgacaatcatgtatttttctaagttttgaaagaattaacttattttaaatttctatattggattattaataaaataaaggactgagtagataatgtcaaaaaaaaaaaatgagtagattaataaataaatgagagggaaaaaaaaggcgagattggcggtggtagatgtaggagaagaagagaacaaaacaaggaggatacagttggctatggaatattatggttcataatgcaaccaaacacatataattgaaatgaaccacacacacgcttttaattatacacataagagtgatcgagcaccattacattttctttctttgcttcgttgtaaagccgactttatattatcatctctttttatgtaaaagaaagttgtaatgggttttaataatatatataaacagaatgggtcaatctaataaatattcggaccacaatgttaaaaattagttatctgtttttttccggccggaaacaattatggtgatttaaaagattatcatcatcaatttttattttttttgacgttatcatcaccaattattgattggtatatattcttctacggtttctgtaaatttatcatgaaattccttactatgcttttttttggttaaagaattatttactgtttttgataggaggaaaaatgatcgtccacgttcagtatacggcatcatcagcaaaaccattcaaaaatgtttttactggaacggccaaatatggtataacgacttatagcattgtgtacgtgtgttatacaataacaagttctctaaatgtttcgaagtttacatggtataagagcctctatgaaatggaaacctaattcgttatcatggagctcgtccaatggtgagaaagaactcagcaccaagttggtggaattatcaacatcataagagagttcttctagctctttggtgcaagtgacatgtgagaattacaaaaaatgggttaagaattaaaaatgcactcaaattattggtttgttagaatgaaagtggatcacaaatagaatgtggtcgtggagctagaaactggagggtagaggctcatatcagaactcacctcaaagtccatatccgtgtcaaggcaggcgtggacgaggacatcaattaaggccgtagtactgtcccgtattaaacacaataataaaatcgtaccttgaaagctataagaaaatagaagagagtgaacaatcgacaaatgacaacgagaaacatttaatgaaatgaaaatatctatgctccagacacagagataacccacgggcagccaatgaagcactccacttgcgaatttgtaatagaccctacttgacaatgagtagaagagccatatcatgtatatttaatatttaagttggtgtgttgtagaatacgtagaattgttttgtgccataaaaattaagaaagtgtttattttgttttcttagctcgtgtataatcaaatttaagtagttgaattcgtggaattgtagtaagtaactgtgtgcttcgactaagtgtatggtgtgatggtgtcgtggtgacatttcttcggttcttccaaaggaagttaaaccttgcactgcccgcttgatcccgtttgagagaaatgagtccaataattaaagatatcataaatttcttaagttaaaaacagtgtgttgaccgatgaaatattatacaaaaatgtcttttctacctaattgagagtcacacatctttgatccaatttttctctattacatctttgatacaatttattacatctttgatccaaattgcactctattacatctttgatccaatttttctctctatttttctaccgattacacaataacatattaatttgtccataaagattgttatgaatggttcagtgttacaaaatctccattattccaccttgcatattgctgcggaatgcccaagaaacaagactaaagaggcgaataaatcacagaagcgaaaacgctctaaaattcctaatctaatagacgcattcgcctctttgatttattcgccacaaacaagttttgttagtataacaaataaaaattttcccttcgcagaaacaaagtcgagattcgacaaaacgttcaccattcgaacaccaacaacgacgaaaagaagctaattaataaaccaaacagaagagaaagccttggcctgcaaataaccgtcatgacttagtgctggctgcaactaacgccatgaatggtctatcaattaagaactcttttgatgtaattcactacaaaatctaaatttttgacccgctacaagatttaattgggagatacgttgaatctcaaaaaaaatcgtaagaaactacaatcttccttcctataggcatgaagcttgttgtatgcttcgccaacgttacgtgtatgacttataatgccacgtgacactctcttagttggcggtttttgtctaaatcttttatgtgacgtggtgcgttctgatattcttattggtcaattatttttgctgatgtggtatgagaaaagtcaaaatcgtttcaaggagatttgttatcttagctaaaacaaaaagaagttattacaggaatagaaagagagagagacgaaaatttacgctgatgacgtggtaagggaacgacggagtggggaaccacaagccgttcttgatattcaacgtggtttgctcatggcggcgcgtggtagactcgtggtggcgcgtgggaacagaagcttttcatctataatcagaaaatactcattgaaaagtccatttccctctattttgttctttcttatttcttgcaatttcatctctctcatttttttttctgataaaggtgcaatctcatctcttgcaatatg

SEQ ID NO: 17726 - DNA, 3003 bp, Unknown
  misc_feature (1)..( 3003): 2750-1469P.txt file - cDNA_ID_1813832; gDNA_ID_1621084; Annot_ID_170450
aaaattagaaaaccgacattattgtataatggtttgtgctagtaattttgttatgttgctattcggattcaaactcttgtatgttattgacaaataaaaaaatccgacaatcatgtatttttctaagttttgaaagaattaacttattttaaatttctatattggattattaataaaataaaggactgagtagataatgtcaaaaaaaaaaaatgagtagattaataaataaatgagagggaaaaaaaaggcgagattggcggtggtagatgtaggagaagaagagaacaaaacaaggaggatacagttggctatggaatattatggttcataatgcaaccaaacacatataattgaaatgaaccacacacacgcttttaattatacacataagagtgatcgagcaccattacattttctttctttgcttcgttgtaaagccgactttatattatcatctctttttatgtaaaagaaagttgtaatgggttttaataatatatataaacagaatgggtcaatctaataaatattcggaccacaatgttaaaaattagttatctgtttttttccggccggaaacaattatggtgatttaaaagattatcatcatcaatttttattttttttgacgttatcatcaccaattattgattggtatatattcttctacggtttctgtaaatttatcatgaaattccttactatgcttttttttggttaaagaattatttactgtttttgataggaggaaaaatgatcgtccacgttcagtatacggcatcatcagcaaaaccattcaaaaatgtttttactggaacggccaaatatggtataacgacttatagcattgtgtacgtgtgttatacaataacaagttctctaaatgtttcgaagtttacatggtataagagcctctatgaaatggaaacctaattcgttatcatggagctcgtccaatggtgagaaagaactcagcaccaagttggtggaattatcaacatcataagagagttcttctagctctttggtgcaagtgacatgtgagaattacaaaaaatgggttaagaattaaaaatgcactcaaattattggtttgttagaatgaaagtggatcacaaatagaatgtggtcgtggagctagaaactggagggtagaggctcatatcagaactcacctcaaagtccatatccgtgtcaaggcaggcgtggacgaggacatcaattaaggccgtagtactgtcccgtattaaacacaataataaaatcgtaccttgaaagctataagaaaatagaagagagtgaacaatcgacaaatgacaacgagaaacatttaatgaaatgaaaatatctatgctccagacacagagataacccacgggcagccaatgaagcactccacttgcgaatttgtaatagaccctacttgacaatgagtagaagagccatatcatgtatatttaatatttaagttggtgtgttgtagaatacgtagaattgttttgtgccataaaaattaagaaagtgtttattttgttttcttagctcgtgtataatcaaatttaagtagttgaattcgtggaattgtagtaagtaactgtgtgcttcgactaagtgtatggtgtgatggtgtcgtggtgacatttcttcggttcttccaaaggaagttaaaccttgcactgcccgcttgatcccgtttgagagaaatgagtccaataattaaagatatcataaatttcttaagttaaaaacagtgtgttgaccgatgaaatattatacaaaaatgtcttttctacctaattgagagtcacacatctttgatccaatttttctctattacatctttgatacaatttattacatctttgatccaaattgcactctattacatctttgatccaatttttctctctatttttctaccgattacacaataacatattaatttgtccataaagattgttatgaatggttcagtgttacaaaatctccattattccaccttgcatattgctgcggaatgcccaagaaacaagactaaagaggcgaataaatcacagaagcgaaaacgctctaaaattcctaatctaatagacgcattcgcctctttgatttattcgccacaaacaagttttgttagtataacaaataaaaattttcccttcgcagaaacaaagtcgagattcgacaaaacgttcaccattcgaacaccaacaacgacgaaaagaagctaattaataaaccaaacagaagagaaagccttggcctgcaaataaccgtcatgacttagtgctggctgcaactaacgccatgaatggtctatcaattaagaactcttttgatgtaattcactacaaaatctaaatttttgacccgctacaagatttaattgggagatacgttgaatctcaaaaaaaatcgtaagaaactacaatcttccttcctataggcatgaagcttgttgtatgcttcgccaacgttacgtgtatgacttataatgccacgtgacactctcttagttggcggtttttgtctaaatcttttatgtgacgtggtgcgttctgatattcttattggtcaattatttttgctgatgtggtatgagaaaagtcaaaatcgtttcaaggagatttgttatcttagctaaaacaaaaagaagttattacaggaatagaaagagagagagacgaaaatttacgctgatgacgtggtaagggaacgacggagtggggaaccacaagccgttcttgatattcaacgtggtttgctcatggcggcgcgtggtagactcgtggtggcgcgtgggaacagaagcttttcatctataatcagaaaatactcattgaaaagtccatttccctctattttgttctttcttatttcttgcaatttcatctctctcatttttttttctgataaaggtgcaatctcatctcttgcaatatggtattaggagaaacgaataagaaagtgatcaagaatgtgattaagctcttaacgatg

SEQ ID NO: 17727 - DNA, 3000 bp, Unknown; identical to SEQ ID NO: 6240
  misc_feature (1)..( 3000): 2750-1469P.txt file - cDNA_ID_1813836; gDNA_ID_1621084; Annot_ID_170449

SEQ ID NO: 17728 - DNA, 3000 bp, Unknown; identical to SEQ ID NO: 8011
  misc_feature (1)..( 3000): 2750-1469P.txt file - cDNA_ID_1813843; gDNA_ID_1621182; Annot_ID_57401

SEQ ID NO: 17729 - DNA, 3003 bp, Unknown
  misc_feature (1)..( 3003): 2750-1469P.txt file - cDNA_ID_1813843; gDNA_ID_1621085; Annot_ID_55377
catttagtagaaaacttgtaagtctttttgtgcttattctatatcttggtatgttttatatcggttatctgacatttgtgttccttgacgaatacttaccttgaacaaaagcagagactttacaaggatgagtcatattcagcattttctccagggactaggaaatacttacagtctctaatcgatgagccgttgtctactaatcatacatctaaaagtgttctggacccattattatcatttatatacaatccgccgtcaccaaagaagtccaagcttgtacaacctgattcatctagtgaagcaagcatggaagacaatagcttaataagggattcaacagaaaagtaagtaattctttgacattttcttgattctgcttgctttatctcatcttcttaaaccttgtctaaagatacatttcgtatttctgtgtgctcagagactgggaatcgccgtctcccttgtcagatacagagctactagagaaggcaaagaagagagagtttgtacaaggtttaatatcatcagccatatttgatcacatttacaacttctaagagcataagtctttgtatatgaaactctcgcaaagtagtctgtactctgtagtataagccaatgagcttctgtttatcgtcaaacttctactttgcttctttacagctcataatcctcaagtcacttgaggtcggagtttccttaacaaccacttcttgcgtagtttcacatctagagccaagaaagttttcgccttgagtttatcttcaagcagatcacaagcatccaatataagttcatcgtccatgtctggtaacgcttgaatagcctcaaccgtgtcctctattgacatggtttgggtttcatcaactcgaggctttttcgggtttatagggcttgtatcagtattagcaagttgatctcttttgttcttggggtcaaacaaaagagagttgctatcttcttcctcagctgaaatagacaaatctgtagtaccactggacttaaattcttggaattcagtttcagggtcaaaccaatccatagctacaaagcattcgttttcttcgatcccagaatcgccacagagcacacacagatctttatagtacggaattggccgagtcataaattgccttgcatctctatgagcctgtgattaattcagacaagaacacacatcaaaacagagacgaaaacactgtaactaaccacacagcatagatcagagcgattaagttacctttatatagtcttgccatacattattatcagctgtaaccatttgacgctcattatcccaagcaaacccatctgatcgaagaatactcttgatcgcgttgaactgtcttctcagagacttataccggttcttcaacacatcaacatcaaagttagactcaaatttcgcattgaagagattaaccatctcagtccatgcttgtttcctgaaaacaccttcaatctggtttcctctcctcgcttggtccaacatcagatcaatgaaataccggtccattggaggatgccaagtagtcctgcaccgtgtgacactgcttccttttgagttagacctgactgttgacgattcacatattctgttgtacccatcatcttcctgaatcagtgtcttggattctccctcactaatactctcctcagctgaaacatacatattcattcacaggttacttaagaatctttgatctttggtgacaagaatgtacaatgaaggattcaagtaacaatcaatagattaaagattgtacctttgtgctcagacattccatctgagtaaaccaagcacagatctttgtaacaaggtatagactttatccgaaaagatctcgaatcaggatgaatcttcaataacccaaaagcaaaaacaaatcaatccctgagaagaagacacaaaatcacaagtaaacaaaacgcaaaacgcaccttaagatactcatcccaaacgcagttatcagcaacaaccatctgtctagtatcatcccaactaaaaccatcttctatcaaaagattattcacagatttaaacaagttcctcaatgtcttatgcctgtttttcaaaacatctttgccataaagaaacttgaacttggcagtgaaggaacaagacatgaacttccaagctcgtttactaaacaaatgatcttcaaatctgttgccttttctaacttgttccaccataagctcgatgaaatactgatccatttcaggtgtccacactgttcttaatctctcattgccgtttctactgctcattatctatttctcccttcttctttacctgcaaaaaaatcgattgcaagaacacaaatttgaaatcgagaaatcaagttataaaatcagaaatcagattctcgtaagaaactggatcagacccataatagagattcgactaaattagctaaagagcagagaatcttcgcttacagagagtcagagctccggtgaacgggagttggagtaccggtgagattttaaggataaggttgtccgggataaggttatacttttattcgtaaccaatttagaaacctttatgggcttatattactttattgggcttagtctattataggcctatgttaaacgacatcgtctattctagggtttgtttttgggccagagtgacgtttgttttcctttcgtcgtcgtcgtcgtcgtcgtcttcgtcttcgtcttcgtgaaagatgtttacaaaattttgctgtttaaattgatagaagaagattcgacctttaaaggctatctgaagaacatctccatcatcgcctggtgttgtaagtttcttttggattttgattcttgttgatactgactagtgagctcatttttaacatttgttcgtaccaattctgggatttgtaattagctgagtattgagctctaaatcttgaaaaattagtgagtttagtattttgcgaaagacccattaacagattatgatttgtgcgttgtttcttgccaaatacttttgagaggtttatg

SEQ ID NO: 17730 - DNA, 3000 bp, Unknown; identical to SEQ ID NO: 8002
  misc_feature (1)..( 3000): 2750-1469P.txt file - cDNA_ID_1813843; gDNA_ID_1621182; Annot_ID_174317

SEQ ID NO: 17731 - DNA, 3003 bp, Unknown
  misc_feature (1)..( 3003): 2750-1469P.txt file - cDNA_ID_1813843; gDNA_ID_1621085; Annot_ID_170516
ttgacgaatacttaccttgaacaaaagcagagactttacaaggatgagtcatattcagcattttctccagggactaggaaatacttacagtctctaatcgatgagccgttgtctactaatcatacatctaaaagtgttctggacccattattatcatttatatacaatccgccgtcaccaaagaagtccaagcttgtacaacctgattcatctagtgaagcaagcatggaagacaatagcttaataagggattcaacagaaaagtaagtaattctttgacattttcttgattctgcttgctttatctcatcttcttaaaccttgtctaaagatacatttcgtatttctgtgtgctcagagactgggaatcgccgtctcccttgtcagatacagagctactagagaaggcaaagaagagagagtttgtacaaggtttaatatcatcagccatatttgatcacatttacaacttctaagagcataagtctttgtatatgaaactctcgcaaagtagtctgtactctgtagtataagccaatgagcttctgtttatcgtcaaacttctactttgcttctttacagctcataatcctcaagtcacttgaggtcggagtttccttaacaaccacttcttgcgtagtttcacatctagagccaagaaagttttcgccttgagtttatcttcaagcagatcacaagcatccaatataagttcatcgtccatgtctggtaacgcttgaatagcctcaaccgtgtcctctattgacatggtttgggtttcatcaactcgaggctttttcgggtttatagggcttgtatcagtattagcaagttgatctcttttgttcttggggtcaaacaaaagagagttgctatcttcttcctcagctgaaatagacaaatctgtagtaccactggacttaaattcttggaattcagtttcagggtcaaaccaatccatagctacaaagcattcgttttcttcgatcccagaatcgccacagagcacacacagatctttatagtacggaattggccgagtcataaattgccttgcatctctatgagcctgtgattaattcagacaagaacacacatcaaaacagagacgaaaacactgtaactaaccacacagcatagatcagagcgattaagttacctttatatagtcttgccatacattattatcagctgtaaccatttgacgctcattatcccaagcaaacccatctgatcgaagaatactcttgatcgcgttgaactgtcttctcagagacttataccggttcttcaacacatcaacatcaaagttagactcaaatttcgcattgaagagattaaccatctcagtccatgcttgtttcctgaaaacaccttcaatctggtttcctctcctcgcttggtccaacatcagatcaatgaaataccggtccattggaggatgccaagtagtcctgcaccgtgtgacactgcttccttttgagttagacctgactgttgacgattcacatattctgttgtacccatcatcttcctgaatcagtgtcttggattctccctcactaatactctcctcagctgaaacatacatattcattcacaggttacttaagaatctttgatctttggtgacaagaatgtacaatgaaggattcaagtaacaatcaatagattaaagattgtacctttgtgctcagacattccatctgagtaaaccaagcacagatctttgtaacaaggtatagactttatccgaaaagatctcgaatcaggatgaatcttcaataacccaaaagcaaaaacaaatcaatccctgagaagaagacacaaaatcacaagtaaacaaaacgcaaaacgcaccttaagatactcatcccaaacgcagttatcagcaacaaccatctgtctagtatcatcccaactaaaaccatcttctatcaaaagattattcacagatttaaacaagttcctcaatgtcttatgcctgtttttcaaaacatctttgccataaagaaacttgaacttggcagtgaaggaacaagacatgaacttccaagctcgtttactaaacaaatgatcttcaaatctgttgccttttctaacttgttccaccataagctcgatgaaatactgatccatttcaggtgtccacactgttcttaatctctcattgccgtttctactgctcattatctatttctcccttcttctttacctgcaaaaaaatcgattgcaagaacacaaatttgaaatcgagaaatcaagttataaaatcagaaatcagattctcgtaagaaactggatcagacccataatagagattcgactaaattagctaaagagcagagaatcttcgcttacagagagtcagagctccggtgaacgggagttggagtaccggtgagattttaaggataaggttgtccgggataaggttatacttttattcgtaaccaatttagaaacctttatgggcttatattactttattgggcttagtctattataggcctatgttaaacgacatcgtctattctagggtttgtttttgggccagagtgacgtttgttttcctttcgtcgtcgtcgtcgtcgtcgtcttcgtcttcgtcttcgtgaaagatgtttacaaaattttgctgtttaaattgatagaagaagattcgacctttaaaggctatctgaagaacatctccatcatcgcctggtgttgtaagtttcttttggattttgattcttgttgatactgactagtgagctcatttttaacatttgttcgtaccaattctgggatttgtaattagctgagtattgagctctaaatcttgaaaaattagtgagtttagtattttgcgaaagacccattaacagattatgatttgtgcgttgtttcttgccaaatacttttgagaggtttatgaaacagagtaaaaccctagaattcaattcctttgctctgttatgcagtcttcatttcatcaaattcaacacagaagattcgatg

SEQ ID NO: 17732 - DNA, 3003 bp, Unknown; identical to SEQ ID NO: 17729
  misc_feature (1)..( 3003): 2750-1469P.txt file - cDNA_ID_1813843; gDNA_ID_2926183; Annot_ID_140639

SEQ ID NO: 17733 - DNA, 3003 bp, Unknown; identical to SEQ ID NO: 17731
  misc_feature (1)..( 3003): 2750-1469P.txt file - cDNA_ID_1813843; gDNA_ID_2926183; Annot_ID_200393

SEQ ID NO: 17734 - DNA, 3000 bp, Unknown; identical to SEQ ID NO: 6258
  misc_feature (1)..( 3000): 2750-1469P.txt file - cDNA_ID_1813847; gDNA_ID_1621085; Annot_ID_55374

SEQ ID NO: 17735 - DNA, 3003 bp, Unknown
  misc_feature (1)..( 3003): 2750-1469P.txt file - cDNA_ID_1813855; gDNA_ID_1621085; Annot_ID_55372
ggaaatggaacacggtttcgtggaaactagaaactacaataaggagacagccgcaacaacatgattcaacggcacacaactaaactaatcaagccttccttatctcccaagttttttttactagacctctaattacttttaattatagtccttctttaattaatcataatgaaagttccatacaatatttatgtatttgttttcttctaagaaattaattaccttcgcaagttcagtagtgatccagcttaccagattattatagagttgcaactattcgtttataatattattcaaaatataattgcatttcgtaaaagacaaaacaatttaaactctttctagtcagtcataaattctcttaactcttttgttatttcttggttgtaggcttgtagcatttacacaatttggtaaaccattatgtaacgtaattaacatttatatttcaataacaatttttatatataaacaatatctaaacgtaacacatctggagacagaaaacgtgaaactaataattaggtgaaaccaacaaagaatactaaagatgttgaacgtatttacttttaaattaaaaagcacaacagacgaaataaatcgaaaaatgcgtaattgagaaacaaaacggctaaacacagctaagatatggtccacgtccagccgtgacccacatgaacttatttgtaattttttcgtaaaatattattaacaaatatttttttcttttgaaaaattatgataaacaaatttatatgatgtattatacataattaataatacatattgaagcatgtaaggtttaaaaaaaattcggatattagtgtctatggaattttattactttttaaatcaactataaaactatctttttaaaataattcatacaaagaaatactttaattaaggattaaataattaatgtcagtcacgtaggatattatatatttttggagttaaatgtgataatttatttttatttgttactccgcgttgggcaaaattgcaaacagcaagcaaaaagctgcatacctttgtgtatataatacacatacacacacaatcatttcatgaaccataagcaacacacaacaaaaacttcatcatcaaggaaaaagaaaactcatctctgatcaaaaatcgagagtataataaatcatcaatggcggattcgtctcagaagaaaatcagaagaaacgcgataacacataaagcatggagtctcatgaagatggctcttctatggggaagaaaaggtggagttttcaaaaaatggccattgttcgaactacgtagcttgttcttcaagcatctcaaagccctagctcatcatcatagtaacggtgaccgttattacggagaacgccagctttcctttgatgaaacgccgttatttaacgtcaagaagaagatgcattgtcctacttcgtctatgaggttcctcctcctcccctgctttgctcctcccgtagattttgactatgactttgaaatggacggtcaagattattccgacgaggtacaatcgtacggttacgatgaatcttgttcggaagaagagaaaggggtggatgtgagagcagaggagttcattgctaagttctatgagcagatcaagttgcagagacaagtgtcttatttgaaatacaaacaacacaacgacgccgtattattatagatttatgatgatggttttatttactaatatgaatgaatgcagcttgtttttgtagataactgagtctatatatcatctaattacaacaacaaaaagatgtttcatttttgatttcatatgtacttcattttcctttttttttatgaatttccttttaccgtattgttgtttcaaacaaatattaatagataagtagtacattgtttgttaactggaagtcagtacccaatttgccccaaaacctaaaatattagtcaaatgcagtacgatgcaatcttaatagtttaggataggtgggcgcaatctagattgaatcatccaatccaatcatatatataatttaattcaagtttttttttcaatcttcctacacaaaaaataacaaatattacccgttttggtaatttaatatagagagttagggcatctccaaccctattatattttagagtaaaaatgcaagattcttctccaaccctactttataattgactcagagatttctgcagattgactctatatatagagcaactttatttttgagttcaactttttttatttatactttaatccctcaaattcaaacttttttatttaatacatatacacatagttttataaacttaacaatcaaacaagtactaaatttaaaataaacaacataagaaaactaaaacataaaactaataatttaatagtccggtaaattgtttgtagatccgccaaacatcatttttttttgaatcttcaaatgatcttttcgttgtgcacttgtcttctttagttcttctaaaagtttttttatttccttcttctaaggtgttgataaccgacgttgttatatgatgtaattttttcttaataaataattagtgtttaattcaaattatatcaaattttatgggaattttgcaaatctataatatatgaggtcaaattgtaaattatataattaaaaggtattagtatataaagtaaaaatagaatatttttaagaatattattttttagagtagaaatcctaactctattttaaagtaagatataaaactatacatttgagatgttcttagatacgaatttacaaaccatcctaaatatcaaaactagttaaataattaaaattttccaaggtacatgtcactataaaaacagccaaaagcttttctacatgctagtgtagaaactgacccaagaggtatcattaggggaatccaaattcaaaggggatacattcatcaaaagcagttggtgagcctccgttttttctagcatcatcggtcttctttgcgataaaagatgcaatgagatctagagccgagatg

SEQ ID NO: 17736 - DNA, 3003 bp, Unknown; identical to SEQ ID NO: 17735
  misc_feature (1)..( 3003): 2750-1469P.txt file - cDNA_ID_1813855; gDNA_ID_2926172; Annot_ID_140186

SEQ ID NO: 17737 - DNA, 3003 bp, Unknown
  misc_feature (1)..( 3003): 2750-1469P.txt file - cDNA_ID_1813875; gDNA_ID_1621085; Annot_ID_55361
ctcagggatttttcttcccattccttacactgggtttaaggcacttcgagctggcttagtagcagacacctatctggaagcaacgtctgttactcatttcaagaagaaatatgaggagtaaggcgttgttacacctttacactaacgaaacattctgatttagtaacctattccatgtttttctgcatttgcttaagatacaaagcagctttcgtgtgtgcacaatatcagaaagcatctttatacctttttcattatgatctacagatatgagtttcagaaagatgaggaagaacagattgcacgtttggctgaggatggtgacatatacaataagctgtcgcgatccctggcccctgagatttatggacatgaagatattaagaaagctttgcttctccttcttgtgggtgctcctcacaggcaattaaaggatggaatgaaggtgaactttcctgtcctctgatttattctggcaaaatttccatgatattgctatctattatgataaagagtaaagactgtacactgattagaaagcagttgcttgctttagttcatctccgactatattgttttacctatttccatacagtgtccgcagtcttcattgattgagttatggagctttattatttacaaacatgttcagtcattcaagagcacattgcacttgattggaacacattttatctgtgaagatttaaaaacaatacattcattaattatcttttgcagattagaggagatgtgcatatctgtctgatgggtgatcctggagttgccaagagtcagcttctcaagcacattataaatgttgctccaaggggagtctacacaacaggcaaaggtagcagtggagttggtctaactgccgctgttatgagagatcaagtaacaaatgagatggttttagaaggaggagcactggtgagagacaatgcccttttgctttggatatattttagaaaatatgatgtaagagctatgtgatttagaagtttgatacaatctctatctcaggtgctggctgacatgggaatctgtgcaattgatgagtttgataagatggatgaatcagatcgtactgctattcatgaggtcatggagcagcaaactgtaagcattgcaaaagctgggattaccacgtctttgaatgctcgaacagctgttcttgctgcagccaatccagcctggtaagtgaactctcatgatatgaattaaaaactcatgaatgttgagtgatcattgctatcattattgaactatgtatctttgtgtttatgaaggggaagatatgatttgcgaagaactccagctgaaaacattaatcttccaccggcccttctttcaagattcgatctgctgtggttgatcttagatcgagctgacatggacagtgaccttgaattggcaaagcatgtgcttcacgtacatcagacagaagaatctcctgcgcttggtttcgagcctctggaacccaacattctccggtaagttaaatcgcttttacagcattcttgttctgcaaagtcagaaactttaacatgagcatatttggttctctagtgcatacatttcagctgcaaggagattatcaccatacgtcccagcagagttggaggaatatatagcaactgcttattccagcatcaggcaagaagaagcgaaatcaaatactcctcattcttacacaacagtgaggacactgctcagcattctgcgcatatccgctgtaagtagaatttgtgtaggaacttgagtaaattagttggactattgagtgttaatatatttccgatttgttctataggcattagcaaggttgagattttcagaatcagtggcacagagtgatgtggatgaggcgcttagactaatgcagatgtcgaaaatatcattgtatgctgatgaccgacaaaaagcaggactagatgcaatatcagacacatactcaatcataagagacgaagctgcaagatcaaaaaagacccatgtgagctacgcaaatgccctgaactggatctccagaaaggttagtttcttccttcatcttcatcttcatgttctttctgaaaatggatgatcactgagacgagagatttggggtgtgaaaacagggatacagtgaggctcagctaaaggagtgtttggaggaatatgcagctttgaatgtttggcagattgatcctcacacctttgacatccgttttatctgagtaacaccacccaaaaaaaaaaaatggaaacaaaccaagtctctcttgttatgttgtgtgctttatctctattatcttatcacatttcttaacgtagagaccttagaagtggaatctatagaagtgatctcttgattgcagaacaaactttacttttggaaatttagatgtgactttgtactcttgcagttcttttcactctcgcaaatttactacggttttgatctaggtttgattaaaacacttcttagtctaattttgtatccatgtcagtaatatactttcagtttggtataatttgatttcattattacaatcataaaatattgtaagtaccatgctaacatattttcaaaaaaattctaaaagtggaattttgggatttttatgacaattttggaaaacagaacaattttcggtttagtaacataacagatcggttctggatcggtttaagaattaatgggccatattattatacttttaagcccattaatacagagcaaagcccatttacgtcgttgcaatatctcactcactccataagcttttaacggcatgaataattcgattttcgagatggcacagagagagagcgagtattattactagagcgttgtttcccgccaattagcaactttcgccggcgtattttcccggtgaaaaattcccgcgcaatctcttcactccataataagcttctctcatcaatctcgctctcttcgccgactgtttcactccccttctctctcactctctgtgcgctttattccactctccgatg

SEQ ID NO: 17738 - DNA, 3003 bp, Unknown; identical to SEQ ID NO: 17737
  misc_feature (1)..( 3003): 2750-1469P.txt file - cDNA_ID_1813875; gDNA_ID_2926172; Annot_ID_140175

SEQ ID NO: 17739 - DNA, 3000 bp, Unknown; identical to SEQ ID NO: 6252
  misc_feature (1)..( 3000): 2750-1469P.txt file - cDNA_ID_1813879; gDNA_ID_1621085; Annot_ID_55359

SEQ ID NO: 17740 - DNA, 3000 bp, Unknown; identical to SEQ ID NO: 6252
  misc_feature (1)..( 3000): 2750-1469P.txt file - cDNA_ID_1813879; gDNA_ID_1621085; Annot_ID_170491

SEQ ID NO: 17741 - DNA, 3000 bp, Unknown; identical to SEQ ID NO: 6252
  misc_feature (1)..( 3000): 2750-1469P.txt file - cDNA_ID_1813879; gDNA_ID_2926172; Annot_ID_140173

SEQ ID NO: 17742 - DNA, 3000 bp, Unknown; identical to SEQ ID NO: 6252
  misc_feature (1)..( 3000): 2750-1469P.txt file - cDNA_ID_1813879; gDNA_ID_2926172; Annot_ID_199591

SEQ ID NO: 17743 - DNA, 3003 bp, Unknown
  misc_feature (1)..( 3003): 2750-1469P.txt file - cDNA_ID_1813887; gDNA_ID_1621085; Annot_ID_55357
caataaagtaaacagagactcagaagctgatgcaaaagaagtaggtgagcctattccagacaattcggtccatgatggtggttcctcaatttgtcagccacaccatggtagtggaaacggagcaataatcattgcagaaatgtctgagacaagtcgaccatctacagagtggaatcctatcgagaaggatctttacttgaagggagtcgaaatctttggaagaaacaggtaaactggatcttggtaaattattatctttaaacacagaacacctataacgtatttacatctagtatgttttgtccgtgctatctcagctgtcttattgcaagaaacctgctttctggcttgaagacatgcctagatgtgtccaattacatgcgtgaaaacgaagtttcagtttttcgaagatctagtaccccaaatttgctgttggatgatggcaggactgacccagggaatgatgtaagctcttgatcttcctagggtcttttgtcttttcaaattttctgcagtatctgcgactttgggcattgttgtattgaaagttagcttgtcagactgatagggttagagatctattccagaagaaaaaagttctgatccggaaaagccaatttccttgcttaatttttccctgatacctgcattggacaagagaaaacgatagttgaccataagttggcttagacaagtgattattttatttgagattttattgatattagcatgccatgtctgtcagaatcatattttggtttaccgctctcttactttacttgacagaatgatgaggtgcctccaaggacaagattgttccgtagaaaaggcaaaacccggaagctaaaatactctacaaagtctgctggtcatccgtctgtctggaaaagaatagctggtggcaaaaaccagtcctgtaaacaatacacgccgtgtggatgcctgtcaatgtgcggaaaggattgcccttgtctaactaatgaaacttgctgcgagaaatattgcgggtatgcaaacaaattaacgtcaattgaagtaacagaggatcttcttataaccatccattgatttaattcaggtgctcaaaaagctgtaaaaatcgtttccgaggatgtcattgtgcaaagagtcaatgcagaagtaggcagtgtccctgctttgctgctggcagagaatgtgatccagatgtttgcagaaattgctgggttaggtagtcattttaaatctagatctcttgatgtgccatatacaatcaaatctactatttgatgagtaacttaagatgccttgcttattcactcagttgtggagatggttctctcggtgaagcaccaagacgcggagaagggcaatgcggaaacatgagacttctcctgaggcaacaacagagggtataatactgtcatcaaatcatgtatttactaaaaataaaatgcattcattgttgataaatctagtttctcatgtgctatatttaccagatcctattgggaaagtctgatgttgctggatggggtgcttttctaaaggtaaagcatgtgaatatcttcctcattaacttctgtttcatacctcttgtatgtaatctgaacctcatctgatcatcagaactcggtcagcaaaaatgaataccttggagaatacaccggtgaattgatctcacaccatgaggcggataagcgtgggaaaatatatgaccgggcaaattcgtccttcctctttgacttgaatgatcaggtgaccaaatctctcacccttctttctgatagtttcctcttgaatttcgcatatgtcagtaagcttttgatatttgcagtacgtcctcgatgctcaacgcaaaggtgacaagctgaaatttgccaatcactcagctaaacccaattgctacgctaaggtactaaatgcttctctctcatatccattttggtatgaaaaaaccacatgatcggttagtaattataccttctttctcacctctagccactcaaaagttccatttagaaggaggactaggattataacattttgtagaaactaatcgcaattagcactatagaaaacagatgatcaaatctagctttgtaggttatgatcaaaacacacttgtttctacaatctttatgattgtaatgtgtaaagtaacatgtgtatatcatctgctagatttattcaacccttttcgaaaggtgttaattatttacaaaaaagagcgattttcagtctattgtcgtagtaaccatggtctcatcgcttcccgcataagtacggtgtctttttctgtgtggtgtaggtgatgtttgtagcaggagatcacagggtcgggatttttgcaaacgaacgaatagaagctagcgaagagcttttctatgactatagatatggaccagaccaagcaccagtgtgggctcgcaaacctgaaggctccaagaaagatgattcagccattactcatcgtagagccagaaagcaccaatctcattgatgattactggctaagagaagtaacttttataaaaataacttatagagttgtgagagatgatatttgaagtttgataacttaagcttgtctttattaattaattattatagagttgagattttattttattttgacatcgagtttggactttgtataggtgataaaacaatttatgaattattggggtcaataagtaaaaatgtatcatttcgaaaaatagtttcaaatttatggatttttgaacagctaaagccaatctatgtacttttcaacgaataaaactgatttaaaataagtgaacgaaccaatcacactaaaccagtgcctaatctcataaaaagtaatccgactgctaaaccgtattccggttcgaatcggatacggatccgtttcccagttgattagtcggatccagtttcttcttgctttttcaattcacattacgaatctccgacgccaaaattctgcttccggtaacagatattttcgtcgtcgagaagaagcaggagtttagaaaaatg

SEQ ID NO: 17744 - DNA, 3003 bp, Unknown; identical to SEQ ID NO: 17743
  misc_feature (1)..( 3003): 2750-1469P.txt file - cDNA_ID_1813887; gDNA_ID_2926172; Annot_ID_140171

SEQ ID NO: 17745 - DNA, 3003 bp, Unknown
  misc_feature (1)..( 3003): 2750-1469P.txt file - cDNA_ID_1813895; gDNA_ID_1621085; Annot_ID_55355
aaattggaaaccacagttcagagaattacctgaagagtatgtagactgttgcgaaagcattctcgagaaaactctctgtgatcaatgagagaagaatccagtctctgtcttcttatacgaacatgatctgcaacaataagaagaaaaaaacaatgttaggtaaatatacaagtctttgatcgcttaactgtactcaaaattaaattcacgattacagatattgaaaccctaattcaaagaatcaaacacaaatattcgattaattggaagtaaaatcgagtaaatcaaaacaaaaaagatcgcaagatcttaaaagaaaagcgatttttgagaatttgaaaccctaaagagttaattcgatgaagaggattatataaatctttgtttaattttacccaaattgaagagagaaacgagagaaagaacttaaaggcgaatactaaccgaagagaaaaccatcaatctccgattagttatactcaaatcgagtacaacaagggaaagaacttgaaaatttgaaaccctaaacatcgattacagaaattactgactgaagagaacgataagtcatgataaatccagatgaaaccgaagatttgaacgaaaacttacagagcaaaattcaaaatcgccgatcaaagagtcgcagagaaagagaataatgaaaacctttttttttggcattataatagaaatctcagggaatttgatacgcttatatacgccacgtggcacattcctaacgttgtcgccaacgctaataacggctacattacgttttagaaacaaatgttttgatttttgcgtgttgtgattagtgaatgtggccacgtcataagcgttacatgtaaaatttgttaaatattaaattatagcatgccaaaaaagaacaacaaaaaaaatattaaggaaaaagcaaattacaaatacatcttttatgtaacacgatcacattatcattaaataaattaaaatattattattcaaaagtgaaacatgtggacacaaaattatttaccgaaattatttattcttcaaatcctaatcatcaaatagtatattttaatgtttgatgattctgattactaaccatctagaatatttgctaaagtttgtattccctctatttcataaaatttgatgttttacgttttgcacgaaaaagtaaattttttattttttaagtattattttgttagtttaataatattattgttatctcttccttttaatattggccacaaacaaaattaataattatacttttacaaaacattaatcttttgtggaacaagtaaaagaacccaaagcatcaaataatttggaagagagggaaaaattaacaacgtaacaaggtttttataagtcgtccattgttaagaaattgggctatagtctaaatatttttttaacaatgggtcttaaaagttaaaacataaaaaaaaatccaaaaattgtgatgagcttctgcaccgatgcccctttattctacccatttttggtctgggtctggtcttcacgtcggctcttggtacactgccactataaattccgaaagctgctcgtcgaatctctacattactgacatgtttggttagctatctgttcatcgtcttattcaccgggcagaatcattcaagctagctatctattcttgagaaaagctttcgaaaatattgtactgccacttcacctttagaaccttaagtaaattgttcgataccattgccattgtaagaaaggattttttattttttccggtttaacattggttttcattttaacttttaacggatcaaaatattaacagagaagtccgatagtgactgactgactgactgtgacgctttttgtttttagctaccgttaatgtttgttttccgttaacggcgtattttagtgtgcgtggacatatacgctcaagtacgccgcacgcttctcttctttttgtcgcgcattcaaaaaccgaaacgatcagaaaaaaaaaaaaagaatattaaataaacattttggactaaacaattaatttttttttaaaataatttctcgaaagagaaaaaaagagagagagagagagagatggagcttctacagtactaaaagctgagtgaatccgaagaaatctccgccaacggaatattttttttctgggagctgaaaatcgttggtgacgatggcggattctctttctagggtttacggaactctgtttagtggtgttaatatatctctcttctcggatccaccgttgaaaaccccctgaagagtgtttttttttccgggtttaaggtcttttacgtttcgttttttcttgagatttcgtcttccgctgtgagtttctgttctcgcggcgagtttttgtgtagatctgagggttttcaaggcaagagaaagtgtcggtgatgtcgattttctcactcgcgagctcttctggtaaattctcgtttatctattagcttcttatactgtctcttccaagtgtagtgatctcgatttttaaggaattttgaaattggaggaaaaaaagttgtgatgtttcggatttctaattttgtctatgggacctatgtgatatctagttactttgtttctttatctgttaggtcactctgattttggttagtgaatatcaagtcacaatatagatttggaatgtagtttggatttgaacttatcgtgctcaagatttttaggtttatagtttctaaatatatggtacatgatctttagctctggacctatatgttagattatccaggctcaaaaaggcaaagtatgttggaagtgatttgggttttggaccatgtctttgtatattttcatgaatatagaatagtaggttgaattcattaggttgcttaaagacattctttcaaaattactcccgaatggttgcaatacctaatcacatggctagctttagttctgttcttgtcttagctctatctcactgtttttaacgatataacaatcccagattcacaaagagatgacctaataatg

SEQ ID NO: 17746 - DNA, 3003 bp, Unknown; identical to SEQ ID NO: 17745
  misc_feature (1)..( 3003): 2750-1469P.txt file - cDNA_ID_1813895; gDNA_ID_2926172; Annot_ID_140169

SEQ ID NO: 17747 - DNA, 3003 bp, Unknown; identical to SEQ ID NO: 17737
  misc_feature (1)..( 3003): 2750-1469P.txt file - cDNA_ID_1813903; gDNA_ID_1621086; Annot_ID_55380

SEQ ID NO: 17748 - DNA, 3000 bp, Unknown; identical to SEQ ID NO: 6297
  misc_feature (1)..( 3000): 2750-1469P.txt file - cDNA_ID_1813957; gDNA_ID_1621088; Annot_ID_55455

SEQ ID NO: 17749 - DNA, 3000 bp, Unknown; identical to SEQ ID NO: 6297
  misc_feature (1)..( 3000): 2750-1469P.txt file - cDNA_ID_1813957; gDNA_ID_1621088; Annot_ID_170592

SEQ ID NO: 17750 - DNA, 3003 bp, Unknown
  misc_feature (1)..( 3003): 2750-1469P.txt file - cDNA_ID_1813957; gDNA_ID_2926212; Annot_ID_142028
ttgtgtaaatatttctttataagtttgtgatttttggtagcaaacattttgttttatggactcattgtctttgctttcatgttttttgtttttcgtaggaccaaatttataggttatacattcatctaaaaccttaaaaaaatcaactaaagatttacattcttactgatcatagcaagtaaattagtctcctttgtgttgtcgaaatgactcaacctcacaacatgatcacactttctgatccaagagctatccaaaatacaccggttacattaaactacgaacacatttcaatgataatgaacagttaaacacattacatagctttggttataagacgcagaaattaaaaaatcaatcaaaatattcgatactatgaaattgaatgttcatgtgaggtcgaaaagcggaaacgtgtcgaaataaaaatgaagagactaataaatatgttgaaggttagacaattgacaccattgaagatatgataaagcagaggaaaaaggatccattacaagttggctttggtgggtaaagagtataaatgcctaagaagaagatcctctccacacgtacgaaaaaggaaggttcggcacgtaacagatagttgtgcatacgtgtgaaaggagggtgggattcacgtgagagagattgaaccatttctatttcagaaaggaaaaaatagaaaacgagaaaaaatatcggtaggaaggtagaaaggttaagctgtcaattgtcattccaggttttgtagttggaacataaaacttttgtagctataattttaaaataaaacctgcaacgtatttttatgaaattttacgtttctagggaatattaaaatggaaaaacagagtgtttttattttattttattttaattactactccgacatgaattaactgtgtaaaaataaaaaataaaaaataacagaatttgcgtgctgatatgattttgacatgaaagattcccacatggtgtcacacaataaacaaaattcaatgttattatataagtggagttacacttgtgctttcgacatttccattaattatttatcccaatatggacttatgcctacggtgcgatatctaatactttctctaaccatttgtgggatatgcaccaaaactcgaatttgggaatgctatttttttagcaagacagacgtgatacgaaatatgtcaccgctttaagaaagaaattccgatatctatatattaaccatggaattaaaaatatagtctagccataccaaaaaaagaaactcaagtactcgaactcaaagctgttgaaccaaaaaaacggttatgtgtcgatttcatcggttttctagattatcccccacataaacctaattaacattttgagcacttgacttctgaaccgtcctcctacctttcacacgttccaaaccacaactcccgctcgtgcgaactctcatcttttattgtttatttgatacaccaaacaaaaaaaatgcacaccgaatttcattacattatccttcaagccattcatagttacatcgtactcgaccctcaagtagtaaaatttaatttatgatcacaagatcgatggccggaaaaaatagtttgaatatatactttttctagcctttgcattattttgcatgagtattattacttcggccatgctaattgttagaaaatacagcttacattttatttaacactgtattggtatatatgtatgtgggatatattatgttatcattagaaaatgctaattaatatgtaactaatttgtcatttccctgaaaagtcgattggaagggataattaacttgtggttagaacttaaaatcaattgattatatgagattaatttgttgtggtgttgtgattacgaccagtcgtacggagttttagagagtcatattctcgcataaagtaagtaaattcaattttgatgtagtagaaaaaaaaaattaacaaacgttaagaagattttttttttttttatgaagttttttatttacgaagatcttttagggtattccaggttaagataatagagatatgctacatttaaaataaatgtgtagactttaaattatgctgatgaggactggggagctatgcaccaacaatgaccagttacgtaaatatggacttaattgaccctatctgcgagtcagtccagtgaaatcagaagaatgacagatgagggtattatgggaaatataaatatggcagtattttaaatattatatatgttttttttttttgtcacgatagtattactaaaatttatggtggtggttcgtatcattgagatatgaccttgtactcacttaaaaaaaaaaaaaaaaaattacgaaaataaacatcttcaaattgttaatggcagaagacatttacgtgaaaaaaagacgcatcttagaaatttctatccttcaatcctactattaaccttttcaactaaatctttcataagaaaccatagtttaaaaaatcaccgattttttttttgcacgagcagctttatatatatataggaaaccaactaataaagaagattggtgggctaaaaagggtgacgaagaagaaagaagagtgacctctctctcgcatatttttctttccgatatatatatcttttataatatttgtgaattctgaataaactcttagtaagaaagaaaaggagagtccagaaaaagaaagcgagaaagagagagagaaaacgatacctaagctcaattatcttctctgcaacaaactccaaaggtattatcttcttatgctctctctttgcatacatacatatatatagatacctacatatatatatctctatgtctttgttcatcatcagttatataggtgatgtagatagatggacaaaaaaacagcgtaagacctagtttctgacttacatatgttttaaattctttgtctgaatcattacaggatccgagagagagagctctggaacgatattaacatatatcatgaagaaaaagattgaagtattgatatg

SEQ ID NO: 17751 - DNA, 3003 bp, Unknown; identical to SEQ ID NO: 17750
  misc_feature (1)..( 3003): 2750-1469P.txt file - cDNA_ID_1813957; gDNA_ID_2926212; Annot_ID_202690

SEQ ID NO: 17752 - DNA, 3000 bp, Unknown; identical to SEQ ID NO: 6324
  misc_feature (1)..( 3000): 2750-1469P.txt file - cDNA_ID_1813970; gDNA_ID_1621088; Annot_ID_55449

SEQ ID NO: 17753 - DNA, 3003 bp, Unknown
  misc_feature (1)..( 3003): 2750-1469P.txt file - cDNA_ID_1813970; gDNA_ID_2926212; Annot_ID_142034
ttttgttttttttttggttttgattaccattggttaaagcagagattcaacgttagacggatttatctcgacacaactctaattcagtttgaccggactgaacacttttatcaatattaatgttgagttgttgacctatatattattgtaataatgaataaacaacgccatgattgcgtactatctatcagactttatagagtaactactttgattaaccattacattttgtttttatgagaatgttttcagttatatatctttatcaacacagttgaaacctgttcttctatgttaaagcctttgaatttgagtaattttacttttgatagctagcctttttaaaatgaatgattatattgttaggttccaagtggggagttgtcttggggatctcatttgacgtgtgatcttgaatttttgatagagatcctaatgatctcgtggtccctctcgcagagtttatgtaaccatctaatatataacttcatgtctggatatggagaatccaaaacttaagaaatgcacgtattagcattcgtagttgtatatatgttatgtattttgcgtcaaatgcagaacaaaataaagcaagaagagaccaacaatcttcatatggagaattgtaaattgtccaaatcagcaatatatagatgtcttgaacaataaaaagataaccgagtttaacattagaccaaaaaaaaagaaagataaccgctacagaatttgtgacgaaaagaaaaaagctttggagaaaaaaacagagtaagaactgtttttgttgtgtgagaagagtttgtccttaggtcgcataatcttttaggatgtagttatatgtgttaagtgtaacacatgcatatcatttacttctgcaatatatctcttctggagtttcgtaaggtacttatggttggtttgtcttcgaaactaccaacgaacaacttaaaaaacattgatctttttaatagcgtgagtttgatttatgttatccttgttatggtgcatatgtattacggaaactttggtctgttttagatgggtaaatagttgtatatgagtaaatatgatattgccagtgttttatataaagaaaaagggaaacgatgataaaaggtgaaaaagaagtttaggatcatctttgttttttattttgttttccgactttcaaatcagacaagacaacgaggtatgggtcttttaacatacagagactcaacttgaaaattctatcaaaccaccaattaaaaaaccagagaaaacattcaactatcttcttagaatctagacaaaataaaaagtgtatcatgctgattttgaacaaattattaaagagatctcaaccatcgtttcattaatatctttgacaattctagaagccgtagtaaatcttgtctttttatgtgtatatcttgttgaatttgataaggatattcaaaataatgagatatgtatgttgagtaattgagtaaaatcagatcccttgtttaatttgacgattaaacgcttttttcattattttttttcgcattttgttgtgtatgttctcaattacaaattccactataagcatttggactctacaatgtcactttctaattctgatatttaataaaacaattattttgtatatgtataaatagtaccagaaaaacgaacttaataaaataattgaatcaaaagcagatgctgaacaaatagctgcagcttttagcaattgtctcccatatgcttttcctttgtttcaaaaattgtatatacgaggttaagtgaatgttgcaatgaaataaatgatgcagtttgtgcattcatcaagcgaacaagtacgattgatgttttcagtgcaaaaactaaaataaaatactactaacaactatatagtgtaaatatatataactttaacttctttttttttaagtcttcatacgctgcgaacgatcaaaatatatttacaaatttacgaccaatattttaaaaatacttcattaaagaattgatgctgctgtctgcacagttgagaacgcaattggaaactttcgtgcattcactttgttcgccgcaaattggatatgtgaacgtggtcatcattatttatagaattattctataaaacttactataaaacactagatataaagctggatcatataaaatgaatttactaaaaattcgatagttaattatagcagatgttatgttccaatttgaaagcatacgaacgaggtatatagttgaaaacacacaccgtaaagttaataattttcacaacacaagaacaaatcaaagtcgcaagtaatttaacgcatgtcagtagcatgggcttcttatatactagtcaatagaataaactagcaaacaagcaactaatgtattcttgtttatcacgccacgggttacaatatcatacaaaatttgaatactaattaatggtaacaagtaaaaaaacaaattactagaaatggaaatacttttgtcaaacaaccaagacgtataacttttgttttctatagattaatggacttcttaaaaatctctccatcagattaaactttgagatatacaaatacagtttttgttttcttctaaatgatatgaatattaactttatcgatttcatccgtagcagatttccattttaaataataaactatgagaaaacagataaaggttgtatattatttgttaccccaaaaaaaaaaaaaactaactacgagtagtagtttagtgtgtctcacgtgcgacgaggaaaagttttgggagagtaaaaacatttaatatttacgactagtttgaaaaaccgtgagctgacacaagctcattgctaatgctacagtaacagctaccttcacttttaactaaatgacagaccaatcattttaacctctgttttcttagctggcgcgtgacagacactctccctctctccatgcccataaaatctcaaagactgtttaaaaaaaaaaatgttttagctttaactgctttttttttgttgttggtgtaatg

SEQ ID NO: 17754 - DNA, 3003 bp, Unknown
  misc_feature (1)..( 3003): 2750-1469P.txt file - cDNA_ID_1813974; gDNA_ID_1621088; Annot_ID_55447
ttttgccggtaagcccataagaatcaatgggccataagaatcaatgggcttatcttaattgggtttaattaggccttataatataacaactcagccctcataatgggcttgaatctttttaacaaacataaaactaaatcatatagcttaaggtatatggagttttaaaaccaaaatacatagtgaatataaattgattgtgtacaaattttttatttggatactagcaaacaatagctgtaagtatatcatatattctattctgtttattttaggaggaaaaatgtcatttaaatcaccactttgccattcgtggtgatttatcatgaactttgctttttatgattaaaatcatcaattaggtgttgacttcaaataaaatcagtaactttcgttgacaaagccaaattagtcataacgttaactgaataatacgaagattgagataaagattgtgatgaaattggatacgaagctgctggcgaggaagacggtgaagatgaagacggaaatcttgatgacttgcacgaaaaagttagtgtcgatgaagaagttgtgggtacggatgtgactaatttggctttgtcaactaaagttattaattttatttgaagtcaacacatcattttaatcacaaaaaacaaagtttatgatttaaatcaccacaaatggcgaaatggtgatttaaatgacctttttcccatttattttatctcattaaattattcatcttgtgtttactttaccacgtgaagcctgaataaaatttgaaattcgaattaatgttcgtaacttcttaatttatcattcacttccataataatataattttatattttttattctttattaaattattcaattttgtcttgtttattcttcttttgtttaccacgtgaaatctgagaagaagatttgaaattctaattactgttcgtaacttcttttccccctagattaattttgtttatctttgtcccatgtatttttattttattttgtcattcactccaataacttaacttattctatatattatttttactttttgtatttgttagtttctttcaacattcatcttaattaaccttatgtattactcttgtgtttaccacgtgaagcctttgatcaaaatttaaattctaagtaacgttcgtatttttagaaaatagttttaaccatttcactctaataactacttccacatgttatatatagttttcacaattgttagttaaaaaagaaggatttattgtgcttttttacattcctctattaatctatatgactatatgtcaattatccttcatttataagtttttgtgcatataaacaactcatactaatcataatgaaaatgaaggttggtgcatctaataatggtaaacggtcaatttttaagtaataaaagagagagagaagtcgccatgcaattgttgttatcgtttaatcattgaccatacttcactactccttatggtggaaatttcaattggttacgtcaaagtttatataacgtccgtgtgaataaatttgacatgtttcaatcgtctacgagtctttcttttattcacacgccattttatgttttttattttattttattttgtggcgaccacttcagagttcacaccattttgtcttaccaaaatttgtaataattaagtataaatttgggtcatttctttttgttttaattcagatcattgtaggactactttaagcatatatggatttaaaataaataaaaactgtgagagttcgattaacattgttggcaagtcacaaagtctttaactacaaggcattgtgggatttctggtactttgattaaatgtcttttaaatttttatcaagctataattaccgatgtggacttatcatacaaagtgttataggtttgctaattattgttaatcagatttcttgccatagaagtgatatattgagatccgtacgtatgttattagtttctctaacaaccaaaagatttagaaacatttatgagtttcatgaatattccttatcttacgtataacaaattctcaagggaaatcaatctaagtttattctatatccggagaacactaaacttgaaaatggtctaaactaaaaccaaaatcaagatattatttgcaacaaataattcagcaatgagtagagattttgagcatgcatgcacatgttttttaatgacatgtgtgggtgagattttcacaattgttttctaaaatcaacactgtttctacaagagaaaatcacgcatcaccatcaccccatcaataaataataaccaatattcacagccatataaatactacttcacacggtagggaaaaagaatctcaaagaaaaatttgacagaatcttccatccgatttttacgctactaagaaaaacgcgaatcacatggtagatcttgaaacaaacgtgtacaactacaaatctaatttatcaaatcaataaaatagaaaaacatcaaacaattataaatatacatctttaaatattcattaaatttacaggataacaatatatctctatcttttatagctaaaaatcatatttaagaaacactatcttatcaaagtacaatttagtaatcaaattacttaattttatatttttatagtgctatactgctatagtttatttttaattaatgattttttttttgttattctacagtgggcaacaacaagaatcttctcacaccacccacgtttcctttatggaccgctatttcttctcttggccaagagcaaattcttataaattggtaaaatatttttttagataaatccatatacttatataatcacgtgcattaattacataaatacacttgtttacaacaaactattaactttttttcttcttaagaaaataaatatctcaagagtatatatataaaaacagaggtagagttggagaagaagaaagtgtagagaaactgtttcataagacttttttttcttcttcttcttctctgttaaactaatg

SEQ ID NO: 17755 - DNA, 3000 bp, Unknown
  misc_feature (1)..( 3000): 2750-1469P.txt file - cDNA_ID_1813974; gDNA_ID_2926212; Annot_ID_142036
tgccggtaagcccataagaatcaatgggccataagaatcaatgggcttatcttaattgggtttaattaggccttataatataacaactcagccctcataatgggcttgaatctttttaacaaacataaaactaaatcatatagcttaaggtatatggagttttaaaaccaaaatacatagtgaatataaattgattgtgtacaaattttttatttggatactagcaaacaatagctgtaagtatatcatatattctattctgtttattttaggaggaaaaatgtcatttaaatcaccactttgccattcgtggtgatttatcatgaactttgctttttatgattaaaatcatcaattaggtgttgacttcaaataaaatcagtaactttcgttgacaaagccaaattagtcataacgttaactgaataatacgaagattgagataaagattgtgatgaaattggatacgaagctgctggcgaggaagacggtgaagatgaagacggaaatcttgatgacttgcacgaaaaagttagtgtcgatgaagaagttgtgggtacggatgtgactaatttggctttgtcaactaaagttattaattttatttgaagtcaacacatcattttaatcacaaaaaacaaagtttatgatttaaatcaccacaaatggcgaaatggtgatttaaatgacctttttcccatttattttatctcattaaattattcatcttgtgtttactttaccacgtgaagcctgaataaaatttgaaattcgaattaatgttcgtaacttcttaatttatcattcacttccataataatataattttatattttttattctttattaaattattcaattttgtcttgtttattcttcttttgtttaccacgtgaaatctgagaagaagatttgaaattctaattactgttcgtaacttcttttccccctagattaattttgtttatctttgtcccatgtatttttattttattttgtcattcactccaataacttaacttattctatatattatttttactttttgtatttgttagtttctttcaacattcatcttaattaaccttatgtattactcttgtgtttaccacgtgaagcctttgatcaaaatttaaattctaagtaacgttcgtatttttagaaaatagttttaaccatttcactctaataactacttccacatgttatatatagttttcacaattgttagttaaaaaagaaggatttattgtgcttttttacattcctctattaatctatatgactatatgtcaattatccttcatttataagtttttgtgcatataaacaactcatactaatcataatgaaaatgaaggttggtgcatctaataatggtaaacggtcaatttttaagtaataaaagagagagagaagtcgccatgcaattgttgttatcgtttaatcattgaccatacttcactactccttatggtggaaatttcaattggttacgtcaaagtttatataacgtccgtgtgaataaatttgacatgtttcaatcgtctacgagtctttcttttattcacacgccattttatgttttttattttattttattttgtggcgaccacttcagagttcacaccattttgtcttaccaaaatttgtaataattaagtataaatttgggtcatttctttttgttttaattcagatcattgtaggactactttaagcatatatggatttaaaataaataaaaactgtgagagttcgattaacattgttggcaagtcacaaagtctttaactacaaggcattgtgggatttctggtactttgattaaatgtcttttaaatttttatcaagctataattaccgatgtggacttatcatacaaagtgttataggtttgctaattattgttaatcagatttcttgccatagaagtgatatattgagatccgtacgtatgttattagtttctctaacaaccaaaagatttagaaacatttatgagtttcatgaatattccttatcttacgtataacaaattctcaagggaaatcaatctaagtttattctatatccggagaacactaaacttgaaaatggtctaaactaaaaccaaaatcaagatattatttgcaacaaataattcagcaatgagtagagattttgagcatgcatgcacatgttttttaatgacatgtgtgggtgagattttcacaattgttttctaaaatcaacactgtttctacaagagaaaatcacgcatcaccatcaccccatcaataaataataaccaatattcacagccatataaatactacttcacacggtagggaaaaagaatctcaaagaaaaatttgacagaatcttccatccgatttttacgctactaagaaaaacgcgaatcacatggtagatcttgaaacaaacgtgtacaactacaaatctaatttatcaaatcaataaaatagaaaaacatcaaacaattataaatatacatctttaaatattcattaaatttacaggataacaatatatctctatcttttatagctaaaaatcatatttaagaaacactatcttatcaaagtacaatttagtaatcaaattacttaattttatatttttatagtgctatactgctatagtttatttttaattaatgattttttttttgttattctacagtgggcaacaacaagaatcttctcacaccacccacgtttcctttatggaccgctatttcttctcttggccaagagcaaattcttataaattggtaaaatatttttttagataaatccatatacttatataatcacgtgcattaattacataaatacacttgtttacaacaaactattaactttttttcttcttaagaaaataaatatctcaagagtatatatataaaaacagaggtagagttggagaagaagaaagtgtagagaaactgtttcataagacttttttttcttcttcttcttctctgttaaactaatg

SEQ ID NO: 17756 - DNA, 3003 bp, Unknown
  misc_feature (1)..( 3003): 2750-1469P.txt file - cDNA_ID_1813982; gDNA_ID_1621088; Annot_ID_55444
tattattgttaaaattattagatgtcaaattatattttaatctatagttgagtttataaatcatttaatatatgcagaaatatgtaaatgctaaaatatgttgagtcgccaatcaaaacaatgttattttaaaacaaacacgcacgaaaagagaaaattatatacttgtgtttttctagaaagttttaaaattaacagatttgtaattttttttttttcaaatatgacgggagacggaaagatattttatacaatacaaattgcgactttgttaattagttttgtttctattatatttctttttgtatatttaaatgtgttcacctaacacatttcggcttcatttcacatttaggcaccaatgagcttcatttaccttttctttttcaatatatgtgtgtctttagactaaacaattcggataatatattttaacgtgtgagtcgtgacaaattcaagttcttaaaatacccatcgacatctacgtcttcattcttggatttatttccaacacctttggcttttatccgcatttttattatcattcattgataacgccacggctaagtatttaatatcaatcaaagacagtaaaatcttacctaaatagttggcatggttgaagaaaaaaggtcttagagagacgagtattcatagtttacacaaattcaagtctccattggagaaagacgatatcaacgtgtgaaaatgtcgatagttgcatgcacatctccatatatatggacctcatcatacaaatcgtctatttttaaacgctatataattgagtcagtatacttattttgcaagttatagtagaatttagagctaattatatatctatataaatgattcagtattttgtgaaccaaatactcctttggcattgataaatgataaatatttgcgacctttttcatgtcgatagagtttttgttttttttcttaattcaagctagttgaggtatctcattttagacttctatacttcacatttactaacagcgaattgtttcctcttcttttacaagaaattacattctgttaaattgtgcacaatgatagaattttttttctccacatagaaaagtcggaatgaacaattttgacttcgtgaaatactattcaagttgatagtaaacaagaaacttctttaaaacatgcatgtattatgaactacattgttttttttttgttttttttacattagtttttactcaaaaatcatctaacagcttaaacggaaccatttactgtattttataacaaagaaattacagattctgactttatgttgggataaataattaatataatgcggatggtaacacatcgatgacattaacacaaaccactatcttatatagtatgtagtatttgaaaaaaaaaaaatggaaagaaaacaaattagaaaactatcggaccaaaagcataattactccgactttcgttatcataaaaatcttcacccattaactcgaattcaatgaactaatggcttaggtcctttttaaaacaattttggaccatttattcagttcttctatggaaagttcgaactaatttctagggtttggacctttggtgacatgagaaaaaaaaagaccacttgaccaaactcactgaagtcagagtaatggtgagtactctcgacacgcgtcaagaaacatccattttttttgttataaagaaagaaacatggatttgaaacgtaagtctattattttccacgaatctttttgatggaacttgaaagatgagtcatggtaataatataattgcgtttgttgagtattagaatgtttgagttccattccttgttcccatcatgacttttaaactttactttcttccatattctcatcttaacttttgagtcgacaaaaactgttcataaacacattcaaaatccaatataaactaacattgtaatatgttttacggtgaaaagaaaacattatacatacgaatattcaaatgcttatatcaacacattttggggttacagaagcaacgataaaaatatacatgaagctatatcctattatccatatctaagtaggatttgtgtcaaattatatcacttaaagctaaacttcttttactactactttaacaatacttggctacttggctacaatgaacgcgttaaaattttttttttttttagatttcacattttttgaagattaatatgattttagtttgaaaattttcagtatctagtttttagtgatcactccgattcaaactaaaaaaaacataaatgttcttctcatgacctcaaatcaagtggtccaactaatgggatatgatatatgaattaaatgcaatatgattattatgattaagttcatgtaattattatgtacgccatatgttaacgtcatacgttgccactacactcacctcaaaaacaaatgatcaatcacagcttcctgaatgtttggtcaccaccactaattcatttttttctctctcaatttgcagttctataagcgaagacaaataaataaaaaccatttttgcattataaactaattacttaaaaaatgaaaagaaaatatttttaactcgtgacacagctctttcaacaaccggattaaggctttaaacaaaatacaattttttctctaaaaaactatataagtaatttttatttttctgaatctcattattggctttttactcgatcacatgcaacatgcttctaccattttaaaagttggtgtggagccataaaaacacacacacacacacacacaaaactacatactaaaaaatattaaattgagtaaaacttctacatgaatcagaaggtttcattaaaataggggacacgtggaaaacctagatctattttcgctttacatcggacggtccaaattctctgtaaactagtcgtcggaaatataaaattatcgccaaaattcgcctgaaaattttcccaattcgaagagctaattagggtttcttctgagcttagagagcaaggacaagatg

SEQ ID NO: 17757 - DNA, 3000 bp, Unknown
  misc_feature (1)..( 3000): 2750-1469P.txt file - cDNA_ID_1813982; gDNA_ID_2926212; Annot_ID_142039
tattgttaaaattattagatgtcaaattatattttaatctatagttgagtttataaatcatttaatatatgcagaaatatgtaaatgctaaaatatgttgagtcgccaatcaaaacaatgttattttaaaacaaacacgcacgaaaagagaaaattatatacttgtgtttttctagaaagttttaaaattaacagatttgtaattttttttttttcaaatatgacgggagacggaaagatattttatacaatacaaattgcgactttgttaattagttttgtttctattatatttctttttgtatatttaaatgtgttcacctaacacatttcggcttcatttcacatttaggcaccaatgagcttcatttaccttttctttttcaatatatgtgtgtctttagactaaacaattcggataatatattttaacgtgtgagtcgtgacaaattcaagttcttaaaatacccatcgacatctacgtcttcattcttggatttatttccaacacctttggcttttatccgcatttttattatcattcattgataacgccacggctaagtatttaatatcaatcaaagacagtaaaatcttacctaaatagttggcatggttgaagaaaaaaggtcttagagagacgagtattcatagtttacacaaattcaagtctccattggagaaagacgatatcaacgtgtgaaaatgtcgatagttgcatgcacatctccatatatatggacctcatcatacaaatcgtctatttttaaacgctatataattgagtcagtatacttattttgcaagttatagtagaatttagagctaattatatatctatataaatgattcagtattttgtgaaccaaatactcctttggcattgataaatgataaatatttgcgacctttttcatgtcgatagagtttttgttttttttcttaattcaagctagttgaggtatctcattttagacttctatacttcacatttactaacagcgaattgtttcctcttcttttacaagaaattacattctgttaaattgtgcacaatgatagaattttttttctccacatagaaaagtcggaatgaacaattttgacttcgtgaaatactattcaagttgatagtaaacaagaaacttctttaaaacatgcatgtattatgaactacattgttttttttttgttttttttacattagtttttactcaaaaatcatctaacagcttaaacggaaccatttactgtattttataacaaagaaattacagattctgactttatgttgggataaataattaatataatgcggatggtaacacatcgatgacattaacacaaaccactatcttatatagtatgtagtatttgaaaaaaaaaaaatggaaagaaaacaaattagaaaactatcggaccaaaagcataattactccgactttcgttatcataaaaatcttcacccattaactcgaattcaatgaactaatggcttaggtcctttttaaaacaattttggaccatttattcagttcttctatggaaagttcgaactaatttctagggtttggacctttggtgacatgagaaaaaaaaagaccacttgaccaaactcactgaagtcagagtaatggtgagtactctcgacacgcgtcaagaaacatccattttttttgttataaagaaagaaacatggatttgaaacgtaagtctattattttccacgaatctttttgatggaacttgaaagatgagtcatggtaataatataattgcgtttgttgagtattagaatgtttgagttccattccttgttcccatcatgacttttaaactttactttcttccatattctcatcttaacttttgagtcgacaaaaactgttcataaacacattcaaaatccaatataaactaacattgtaatatgttttacggtgaaaagaaaacattatacatacgaatattcaaatgcttatatcaacacattttggggttacagaagcaacgataaaaatatacatgaagctatatcctattatccatatctaagtaggatttgtgtcaaattatatcacttaaagctaaacttcttttactactactttaacaatacttggctacttggctacaatgaacgcgttaaaattttttttttttttagatttcacattttttgaagattaatatgattttagtttgaaaattttcagtatctagtttttagtgatcactccgattcaaactaaaaaaaacataaatgttcttctcatgacctcaaatcaagtggtccaactaatgggatatgatatatgaattaaatgcaatatgattattatgattaagttcatgtaattattatgtacgccatatgttaacgtcatacgttgccactacactcacctcaaaaacaaatgatcaatcacagcttcctgaatgtttggtcaccaccactaattcatttttttctctctcaatttgcagttctataagcgaagacaaataaataaaaaccatttttgcattataaactaattacttaaaaaatgaaaagaaaatatttttaactcgtgacacagctctttcaacaaccggattaaggctttaaacaaaatacaattttttctctaaaaaactatataagtaatttttatttttctgaatctcattattggctttttactcgatcacatgcaacatgcttctaccattttaaaagttggtgtggagccataaaaacacacacacacacacacacaaaactacatactaaaaaatattaaattgagtaaaacttctacatgaatcagaaggtttcattaaaataggggacacgtggaaaacctagatctattttcgctttacatcggacggtccaaattctctgtaaactagtcgtcggaaatataaaattatcgccaaaattcgcctgaaaattttcccaattcgaagagctaattagggtttcttctgagcttagagagcaaggacaagatg

SEQ ID NO: 17758 - DNA, 3000 bp, Unknown; identical to SEQ ID NO: 6295
  misc_feature (1)..( 3000): 2750-1469P.txt file - cDNA_ID_1813986; gDNA_ID_1621088; Annot_ID_55443

SEQ ID NO: 17759 - DNA, 3000 bp, Unknown; identical to SEQ ID NO: 6295
  misc_feature (1)..( 3000): 2750-1469P.txt file - cDNA_ID_1813986; gDNA_ID_1621088; Annot_ID_170577

SEQ ID NO: 17760 - DNA, 3003 bp, Unknown
  misc_feature (1)..( 3003): 2750-1469P.txt file - cDNA_ID_1813986; gDNA_ID_2926212; Annot_ID_142040
acttaatcataataatcatattgcatttaattcatatatcatatcccattagttggaccacttgatttgaggtcatgagaagaacatttatgttttttttagtttgaatcggagtgatcactaaaaactagatactgaaaattttcaaactaaaatcatattaatcttcaaaaaatgtgaaatctaaaaaaaaaaaaaattttaacgcgttcattgtagccaagtagccaagtattgttaaagtagtagtaaaagaagtttagctttaagtgatataatttgacacaaatcctacttagatatggataataggatatagcttcatgtatatttttatcgttgcttctgtaaccccaaaatgtgttgatataagcatttgaatattcgtatgtataatgttttcttttcaccgtaaaacatattacaatgttagtttatattggattttgaatgtgtttatgaacagtttttgtcgactcaaaagttaagatgagaatatggaagaaagtaaagtttaaaagtcatgatgggaacaaggaatggaactcaaacattctaatactcaacaaacgcaattatattattaccatgactcatctttcaagttccatcaaaaagattcgtggaaaataatagacttacgtttcaaatccatgtttctttctttataacaaaaaaaatggatgtttcttgacgcgtgtcgagagtactcaccattactctgacttcagtgagtttggtcaagtggtctttttttttctcatgtcaccaaaggtccaaaccctagaaattagttcgaactttccatagaagaactgaataaatggtccaaaattgttttaaaaaggacctaagccattagttcattgaattcgagttaatgggtgaagatttttatgataacgaaagtcggagtaattatgcttttggtccgatagttttctaatttgttttctttccattttttttttttcaaatactacatactatataagatagtggtttgtgttaatgtcatcgatgtgttaccatccgcattatattaattatttatcccaacataaagtcagaatctgtaatttctttgttataaaatacagtaaatggttccgtttaagctgttagatgatttttgagtaaaaactaatgtaaaaaaaacaaaaaaaaaacaatgtagttcataatacatgcatgttttaaagaagtttcttgtttactatcaacttgaatagtatttcacgaagtcaaaattgttcattccgacttttctatgtggagaaaaaaaattctatcattgtgcacaatttaacagaatgtaatttcttgtaaaagaagaggaaacaattcgctgttagtaaatgtgaagtatagaagtctaaaatgagatacctcaactagcttgaattaagaaaaaaaacaaaaactctatcgacatgaaaaaggtcgcaaatatttatcatttatcaatgccaaaggagtatttggttcacaaaatactgaatcatttatatagatatataattagctctaaattctactataacttgcaaaataagtatactgactcaattatatagcgtttaaaaatagacgatttgtatgatgaggtccatatatatggagatgtgcatgcaactatcgacattttcacacgttgatatcgtctttctccaatggagacttgaatttgtgtaaactatgaatactcgtctctctaagaccttttttcttcaaccatgccaactatttaggtaagattttactgtctttgattgatattaaatacttagccgtggcgttatcaatgaatgataataaaaatgcggataaaagccaaaggtgttggaaataaatccaagaatgaagacgtagatgtcgatgggtattttaagaacttgaatttgtcacgactcacacgttaaaatatattatccgaattgtttagtctaaagacacacatatattgaaaaagaaaaggtaaatgaagctcattggtgcctaaatgtgaaatgaagccgaaatgtgttaggtgaacacatttaaatatacaaaaagaaatataatagaaacaaaactaattaacaaagtcgcaatttgtattgtataaaatatctttccgtctcccgtcatatttgaaaaaaaaaaaattacaaatctgttaattttaaaactttctagaaaaacacaagtatataattttctcttttcgtgcgtgtttgttttaaaataacattgttttgattggcgactcaacatattttagcatttacatatttctgcatatattaaatgatttataaactcaactatagattaaaatataatttgacatctaataattttaacaataatataaaatatgagatttataaattacgaatataaatattcaagggagagaaaaagtagaacataattcaaaagataagactttttagacttttttaacaatatttttgatggataaaaattattcaaaagagaagaaagtaagaagaaaagatgtttctgagaatttctagaaacagcatccgtttttataatttaattttcttacaaaggtaggaccaacatttgtgatctataaatcttcctactacgttatatagagacccttcgacataacacttaactcgtttatatatttgttttacttgttttgcacatacacacaaaaataaaaaagactttatatttatttactttttaatcacacggattagctccggcgaagtatggtcgtcgtcttcatcttcttcctccatcatcagatttttccttaaatggaagaaaccaaacgaaactccgatcttctccgttctcgtgttttcctctctggcttttattgctgggattgggaatttctcaccgctctcttgctttttagttgctgattctttttccttcgactttctatttccaatctttcttcttctctttgtgtattagattatttttagttttatttttctgtggtaaaataaaaaaagttcgccggagatg

SEQ ID NO: 17761 - DNA, 3003 bp, Unknown; identical to SEQ ID NO: 17760
  misc_feature (1)..( 3003): 2750-1469P.txt file - cDNA_ID_1813986; gDNA_ID_2926212; Annot_ID_202703

SEQ ID NO: 17762 - DNA, 3000 bp, Unknown; identical to SEQ ID NO: 6317
  misc_feature (1)..( 3000): 2750-1469P.txt file - cDNA_ID_1813988; gDNA_ID_1621088; Annot_ID_55440

SEQ ID NO: 17763 - DNA, 3003 bp, Unknown
  misc_feature (1)..( 3003): 2750-1469P.txt file - cDNA_ID_1813988; gDNA_ID_2926212; Annot_ID_142043
atcttctccggtacttgcgacgattaactctgtttttcagttatgagatcgaaattgactgttttgcatgcttgttttagagctcaattgcttgattttaagtagaaacagacttcaatttcgatgtaaatcataaccctaaaaaaaaactttttagagaatcttaaagtttgttttgttttgcagattgattttgttataggaagttggatacattgcaagatcccaacaggagtatctttgaatataacaagcatctctggattcttaaactcatcaacaaaagctccaaactttgtggtcgaactaatacagagcagttccaagtcgcttgtgctaatccttgacctcccacatcgtaaagatcttgttcttaacccggattatctcaaggagtattaccaagacactgctcttgattctcatcgacaatctctccttaagctacctgaagttaacccttatgtgtctccttctctctttgtccgttctgctttctctcctactgcttcgatgcttaagattgatgcggaggaagaggataagttggaggagatattgagagatcatgttagtccagctgctaaggaggttctcgaggtttggttggagcggtgtgtgaaggaagaagaagagaagattgtggttggggaagaagagagaatggagttggagagaagagataaaagctttagaaggaagagcatagaggacgatttggatttgcagtttccgagaatgtttggtgaagaagtttcctcccgtgttgtacacgctattaaagaagctttcggtgttctctagattatgtaactatatatatacatcagttaatgttcattgtactaaacatttactttcatcaatgtcacaagaacgcaagatgaccatcaaacaagtcctgttttctcctaagaacgtctttgttgtgaatcatctctgaatcggattccttctgattcattttaatactatgggattgtaaatttatcaatcaagtttctaatttatctgtaaaaaaaagtcttgaattattgtttttctcatggattttaaagtttttttttcactattttacatggatgttttgttaaatttctcgttctctagatcatgtcattttacattagcaaaaccaatataatatatagattaatattaacgaaggaacataaacgtgcaaaactaaaagttttaaagctaaatcgctttcaaaagagttagtaaccagacaaaaaagagacagatcatcggcaactaatctcgtcatcgcatgcatcataaaccaaattaactaaatcatccatttaatccatttgttcttatcagatcatccttttccttcctacacaagaaatggttagtgttttcttttctcgattgtctcttagtttagattctttatccgactactttgttcatcggttttgtttttctttttgtcttccggaaggcgaattacatgtcggaagcagcacagctcagaagaggtctaaagcctaaagggaagacttatgggttgaccaatcagaagagacgagagatcagagagatctttgatcttttcgacatagacggttcaggtaaactattaaaccgattctttatccgatttacaaagttattgctcacatgatttagtgcatcatttcatatgtaggtagcatcgatgctagcgagctcaacgttgctatgaggtcaacggcaatttttctttctttttcaaagttattttcttcaagttctagttaagtatagtactaaaaaattatcagctgattacaggtctcttggatttgagatgaataatcaggtttgtttgttttccttccttttttcttctttgttttaatttcatggtttagatcattgtacgtagaaccaacttgtatttagtttggtcatgttcattgttgcagcaaataaacgaattgatggcagaagtagataaaaaccaaagtggagccatagatttcgacgaatttgtgcatatgatgacaaccaaattcggagaacgagactccatagacgaattgtctaaggcgtttaagatcattgaccacgacaataatgtgaataaatctaaacctgtcattatttcattctttttaatattatctttttttgtttggattgatttcattgtgtttgactggacaacttttggaatgttttaggggaagatttcacctcgtgatataaagatgattgctaaagaattgggagaaaatttcacagataatgatatagaagaaatgatcgaagaagcagaccgtgacagtaagcaaaaacacataataattttgcgttttatctataatcggtccctcaagttcatgtttttgccttaacctacgcagaagatggagaagttaacttggaggagttcatgaagatgatgaagagaacctcttacggctaagtataaatcaattagtaatggttgtgaataatatttgttaatcaccttgatttataataataaagaagtttgatttgtggcttggtcgaataaaaatgtattgttgtataaaaataataatgtaattcacatccattattttgaatatgtaaatgtccttgaacgaacatttgttttatcattttttatgtataaatgtctttgaccaaaaaataaattatgtaaaatatgaaccagaaacgatgttgtttagatctgatacttacatataaccaaacgacgacgttgctagagtaataaatctcaaaagactggaaacgactgcgtataagtccgtgacctggttaccggagcgtaacttctccggcgaattggacaattttgagaaagacggattatggactccatggaagctccatctctaccatttcaatctccctctcgttccaggttttaattttgagtttataaggattatctcataccttctaacaaaaaccctaaaaacccaatttgtttttttggtttgcagtcaacaattgcatttctacctcgccgtggatcgtccccaattcaaaatg

SEQ ID NO: 17764 - DNA, 3000 bp, Unknown; identical to SEQ ID NO: 6298
  misc_feature (1)..( 3000): 2750-1469P.txt file - cDNA_ID_1813991; gDNA_ID_1621088; Annot_ID_55439

SEQ ID NO: 17765 - DNA, 3003 bp, Unknown
  misc_feature (1)..( 3003): 2750-1469P.txt file - cDNA_ID_1813991; gDNA_ID_2926212; Annot_ID_142044
atatgtcttttttttacgtacgttctatatcggttattggtcaatttttttggttgtttcggtttttagtcggttatttcggttttggtttatttatggttaccaagtttaatatccgaaccgttcctcaaatatccaaatggtttttatattactataagtgaaataaccgaaatcatgcgcaaccgaaccgaaactgaatggttaaccgaatgcccaggcctaattcaacttgtttttcctattattatgtagatttagcattccagtttttaattttgaatttttaaaagttgttttccatattttgtttttttttttccggattttaaaaaccttttttgtgtttgtttttttttttaaatttatttgcttgaattttaaatttatataatgataggaaatctaaccaaattttggattcaacattaatcgcgatttcagacattcaacatttatttcctattattatgtagatttaatattcaagtttttgattcagatttttataacgagcatctttgcaaatgcccacaaaggaccttttatgtttacaaaattaaattttaaatttaagggaaatttacaaaactagcctttttttactatcttttgcattaataccctattgtgttgtccatttttaaaaataccccttccattgaacagaatgaccaaattaccctcatctaataggaatatttaattggaaactgaaattttcccgccaaattttctttttcccgctaaaaaaatattccgccaaactttttcccgccaaaaaaaagttcgtgacaaattttttttcagcaaaagaaatgcttttaaaaatccttgtaaattttttttggcgggaaatagatttacaagggattttaaatgatttcaaagatttataagagattttaaaagggttcaaaaatatttacaagaaattttaaagggctttcaaagatttataaatgtttttaaatgatttttaaagggtttaaaagtgttttaaaagatttacaaatgattttaaaagggttttataatatttacaaaggattttaaaagtgttttacaagatttacaagagattttaaaaggttttaataaaatttacaagagtttttaaaatgttttcttgtaaattgtttaaaaatcttttaaaaatccttgtacatcttttaaaactcttttaaaatttcttgtaaatctttaaaaccgttttaaaatcccttgtaaatcttttaaaacgcttttaaaccctttaaaaatcttttaaaaatctttgtaaatcttttaaagccctttaaaattctttgtaaatattttaaaaccttttaaaattccttgtaaatgtattaaaacccttttaaaatcacttgtaaatcttttaaaacccttttaaaatcccttgtaaatattttaaaaccttttttaaatcgcttgtaaatctttttaaattcttttcaaatcccttgtaaatctttttcccgcaaaaatatttttgaaaaaaagttttggcgggaatctttttttcaaaaaattttggtgaaaaagtttttggcggaaaatttttggtgggaattttattttggaatattttaggcgaaaatattaatatttcattttgttaacataaaataatttctaaatagggtaaaatggtaaataaaaaattaaagagagtaaaaataaaaatggcaaatagaaaagggtagaattgaaaaagggtagtgtgcaaaggacattatcagcaattattctaccaaatttaaatacataaaaacaaaccagacttaatatttcatccttaaatccgtaagtcttgtggtaccatattttaacatatttttacataattaaatttaacacttaaatgctttcacaaatattgtcctaaatatttttaattttatttttaaattgcaaactttcgtgatcctttactatttttgtaaaatataaatgtttatcggttttcattttgcgacgaaatttcctttagaaggtcaaaccgaagcaacacatttttaaaaagcattaactaaaaaagggcactccttagttttgactttgacaatgagtttgtcgaatgcacacctttgatccccaactgctatttacatttctttatttggattggaaacaatgaagattaaaatataaacacaacgatttaattcctaggatgtcacatatatacagaagaaaataatcaaatatgatatagttcattatcgcatcatgaaaaccttaaaatacaatgaatctatttcatccgtcttgggtataaatttgatgtcaaaataaacgagtttatgtgatttttcatcattcttattaaaacaaaaaggaaaaacgatttgtttgaatataaagagttaacgtacttttgtatcatatatttggtagttgaaatttttgagtttggatggaggatctacttagcatgagaatttttttcttttttttaaaaagaaatctaattagcatgagaagtaacattaatgacaataaacgataacgagattaattctagagtgactaaaaccataaattcagactattcatttagtatgtataatgactttatccaacataaaaaaaatcagtaaaaataatgaatacaacagtaacattcagagaggcacatagtttgcttggcacgccattaataatatctgcaaccaattccaatgacgtctttacacacgtctgaccactttttcttcaacaatttctcctatcaactatatataacttattcatggaacattcaaataaactataaaaaaattctctcaacatttttatctaatgggttctcgccttctcggtgtttgagtctttgcgtttcttgtcaattgtcatcacccctttgtctttttcctgatttcatctcttttgtagacttggacaacacgcctttctctctctctaatttttccacagctataaaatttgtaaaaattgatacaaaaatatctgagctttcctttccggaagactatg

SEQ ID NO: 17766 - DNA, 3000 bp, Unknown; identical to SEQ ID NO: 6299
  misc_feature (1)..( 3000): 2750-1469P.txt file - cDNA_ID_1813993; gDNA_ID_1621088; Annot_ID_55438

SEQ ID NO: 17767 - DNA, 3003 bp, Unknown; identical to SEQ ID NO: 15995
  misc_feature (1)..( 3003): 2750-1469P.txt file - cDNA_ID_1813993; gDNA_ID_2926212; Annot_ID_142045

SEQ ID NO: 17768 - DNA, 3003 bp, Unknown
  misc_feature (1)..( 3003): 2750-1469P.txt file - cDNA_ID_1813997; gDNA_ID_1621088; Annot_ID_55436
aaaattaaactttctcggtatacataggaactcgatggagaagaggcgaggcttgcggattacttcgacgtgatagctggaactagcaccggtggtcttgtgacggcgatgttgactgtaccggacgagaccggtcgacctcatttcgcggctaaagacattgtgccgttttaccttgaacattgtcccaagatatttccccagcccacgtaaagaaattctatttctctatatacacactaattacaaaaacaataataattagacacttgtatttctgtttagaatagaaaaactttatgttcacaatttcgaaaatagtaaacgttatttaaatttttttaaggaataaatcaaccagtattttggtgtctcatataattgtttgttttttcctaatgaacaattggcatataaattaaacaaattccaacgtaacaattgaaaaaacattctaatgaaaaatgcagaggcgtgcttgctctgttaccgaagcttccaaagcttctgtctggtccaaagtacagcggaaagtatctgcgaaatcttctgagtaagcttcttggagagacaagacttcaccagaccctcacaaacattgttatacctaccttcgatatcaagaaacttcaacccactattttctcctcttaccaggtctctcttcttaacactacacacatgtatagactaaaatctaaagctcctaattaacaaacttaattagttcactttctgtttttgaagctgttggttgaccctagcttggatgtcaaggtatcagacatatgcatcggcacttcagctgctcccactttctttcctccccattacttttccaacgaagacagtcaaggcaataagacggagtttaatctcgttgatggcgcggttactgctaataacccggtactatcaaaaacaaagagaatacaaagaaattgataaaacctttagattttcgaaaatcaaaacagaactaactccgttgtgtttggtcctgtaatcctgttatagactttggtggccatgacagctgtgtctaagcagattgtgaagaataatcctgatatgggtaagctcaagccgttaggtttcgaccggtttctcgttatatcgataggaacaggatcaacaaaaagggaagagaagtacagcgcaaaaaaggctgcaaaatgggggatcatatcttggttatatgacgatggatctactccgatattagacattaccatggaatcaagccgcgacatgatccattatcacagctctgttgtgtttaaagccctacaatctgaagacaagtacctccgaatcgatgtaagagctacatattaacatatatgtatgtccttatttctgattgatcgtttaatttacaattgcaggatgatacattggaaggagatgtaagcactatggatctagcgacaaagtctaacttggagaatcttcaaaagattggagagaagatgctgacaaacagagtcatgcaaatgaacatcgacactggtgtatatgaacctgttgctgaaaatattaccaatgatgaacagctaaagaggtgattaagcaattatgaatgtttttcttcttggattacaagtaatctcgatattttttatttattaaaataaaataaattaataatgggcctcccaaacaaaattgggctgggcctaggacattacaaaagattagtaatctcgatctttgatataggtatgcaaaaattctctcggacgaaaggaaattaaggagactaagaagcgacacaatgattaaagattcatcaaatgaatcacaagagataaaataaaaggaaatcattcgtgcttttgtgtgaaattgtttgttgcatatgttttacgtggtgacgtccattactttatatgctgtgagatgaaattttttaaataaaattggttatctaaatttagttctacaagtaataagatgaaacagcagaaggccagaagctaatcctgagatcattttattctatgacaagtgtactcagaacaagtctctcgacatggagggagatataggtcctagattcaaactctattacaatatattttcttcgtaaatttagctcatgacagctcaagctaaacctacattaaaataattccacatggaaatatacaaattctacaatcatgattagcacgaaatatgtatgaagaaaagtctgaccaaatagttttatcttttagtatatactactacacgtgaagtttattttttttgtcaaaacataatttaaatactaatgctaacgtcaattcatatttaaatgcttgttggttttggattttttccgctaacctaatttttttgaaataatgacccaaaacaaaaacacagtttttacatatattttgactttttcgaaaaacttcaaatttcgctgatgaaacttaatcacgtattacgggttttactatttaagacactagattaagtgattcctaccaattaggttttctaatgtaaatagataactgatctccaagcaaaccaaataactcattattagttatgattcgtggcattagttgtagtttccaattgatagatgtctttagaacaagtctgaatagtggattcagaagggaaacgagtcgcagaaaatccaaaaaaaaaacaaagtcagtttctggctgtttatttttgattaattgcaaagtccacgaaagaaaatatttgtttcttaattcaaatttatctattgcaactatttctcgtaaattaatttgtgacagcccaagctcgatgaccctaattaatgatagggtaatattacttgctttaaattatcatattccacataaaacatatatcagcttgtatgaagaaaagtctgaccaaatagtgttaaatctatgcaaatgaaattgtgcatttgtatatatatattgacctctacatccaaaacttctaccaaatttcgattcaaaatcttgtagttcaaaagaagattgatcaactataatg

SEQ ID NO: 17769 - DNA, 3003 bp, Unknown; identical to SEQ ID NO: 17768
  misc_feature (1)..( 3003): 2750-1469P.txt file - cDNA_ID_1813997; gDNA_ID_1621088; Annot_ID_170570

SEQ ID NO: 17770 - DNA, 3000 bp, Unknown
  misc_feature (1)..( 3000): 2750-1469P.txt file - cDNA_ID_1813997; gDNA_ID_2926212; Annot_ID_142047
attaaactttctcggtatacataggaactcgatggagaagaggcgaggcttgcggattacttcgacgtgatagctggaactagcaccggtggtcttgtgacggcgatgttgactgtaccggacgagaccggtcgacctcatttcgcggctaaagacattgtgccgttttaccttgaacattgtcccaagatatttccccagcccacgtaaagaaattctatttctctatatacacactaattacaaaaacaataataattagacacttgtatttctgtttagaatagaaaaactttatgttcacaatttcgaaaatagtaaacgttatttaaatttttttaaggaataaatcaaccagtattttggtgtctcatataattgtttgttttttcctaatgaacaattggcatataaattaaacaaattccaacgtaacaattgaaaaaacattctaatgaaaaatgcagaggcgtgcttgctctgttaccgaagcttccaaagcttctgtctggtccaaagtacagcggaaagtatctgcgaaatcttctgagtaagcttcttggagagacaagacttcaccagaccctcacaaacattgttatacctaccttcgatatcaagaaacttcaacccactattttctcctcttaccaggtctctcttcttaacactacacacatgtatagactaaaatctaaagctcctaattaacaaacttaattagttcactttctgtttttgaagctgttggttgaccctagcttggatgtcaaggtatcagacatatgcatcggcacttcagctgctcccactttctttcctccccattacttttccaacgaagacagtcaaggcaataagacggagtttaatctcgttgatggcgcggttactgctaataacccggtactatcaaaaacaaagagaatacaaagaaattgataaaacctttagattttcgaaaatcaaaacagaactaactccgttgtgtttggtcctgtaatcctgttatagactttggtggccatgacagctgtgtctaagcagattgtgaagaataatcctgatatgggtaagctcaagccgttaggtttcgaccggtttctcgttatatcgataggaacaggatcaacaaaaagggaagagaagtacagcgcaaaaaaggctgcaaaatgggggatcatatcttggttatatgacgatggatctactccgatattagacattaccatggaatcaagccgcgacatgatccattatcacagctctgttgtgtttaaagccctacaatctgaagacaagtacctccgaatcgatgtaagagctacatattaacatatatgtatgtccttatttctgattgatcgtttaatttacaattgcaggatgatacattggaaggagatgtaagcactatggatctagcgacaaagtctaacttggagaatcttcaaaagattggagagaagatgctgacaaacagagtcatgcaaatgaacatcgacactggtgtatatgaacctgttgctgaaaatattaccaatgatgaacagctaaagaggtgattaagcaattatgaatgtttttcttcttggattacaagtaatctcgatattttttatttattaaaataaaataaattaataatgggcctcccaaacaaaattgggctgggcctaggacattacaaaagattagtaatctcgatctttgatataggtatgcaaaaattctctcggacgaaaggaaattaaggagactaagaagcgacacaatgattaaagattcatcaaatgaatcacaagagataaaataaaaggaaatcattcgtgcttttgtgtgaaattgtttgttgcatatgttttacgtggtgacgtccattactttatatgctgtgagatgaaattttttaaataaaattggttatctaaatttagttctacaagtaataagatgaaacagcagaaggccagaagctaatcctgagatcattttattctatgacaagtgtactcagaacaagtctctcgacatggagggagatataggtcctagattcaaactctattacaatatattttcttcgtaaatttagctcatgacagctcaagctaaacctacattaaaataattccacatggaaatatacaaattctacaatcatgattagcacgaaatatgtatgaagaaaagtctgaccaaatagttttatcttttagtatatactactacacgtgaagtttattttttttgtcaaaacataatttaaatactaatgctaacgtcaattcatatttaaatgcttgttggttttggattttttccgctaacctaatttttttgaaataatgacccaaaacaaaaacacagtttttacatatattttgactttttcgaaaaacttcaaatttcgctgatgaaacttaatcacgtattacgggttttactatttaagacactagattaagtgattcctaccaattaggttttctaatgtaaatagataactgatctccaagcaaaccaaataactcattattagttatgattcgtggcattagttgtagtttccaattgatagatgtctttagaacaagtctgaatagtggattcagaagggaaacgagtcgcagaaaatccaaaaaaaaaacaaagtcagtttctggctgtttatttttgattaattgcaaagtccacgaaagaaaatatttgtttcttaattcaaatttatctattgcaactatttctcgtaaattaatttgtgacagcccaagctcgatgaccctaattaatgatagggtaatattacttgctttaaattatcatattccacataaaacatatatcagcttgtatgaagaaaagtctgaccaaatagtgttaaatctatgcaaatgaaattgtgcatttgtatatatatattgacctctacatccaaaacttctaccaaatttcgattcaaaatcttgtagttcaaaagaagattgatcaactataatg

SEQ ID NO: 17771 - DNA, 3000 bp, Unknown; identical to SEQ ID NO: 17770
  misc_feature (1)..( 3000): 2750-1469P.txt file - cDNA_ID_1813997; gDNA_ID_2926212; Annot_ID_202710

SEQ ID NO: 17772 - DNA, 3003 bp, Unknown; identical to SEQ ID NO: 16383
  misc_feature (1)..( 3003): 2750-1469P.txt file - cDNA_ID_1814001; gDNA_ID_1621088; Annot_ID_55435

SEQ ID NO: 17773 - DNA, 3000 bp, Unknown
  misc_feature (1)..( 3000): 2750-1469P.txt file - cDNA_ID_1814001; gDNA_ID_2926212; Annot_ID_142048
cttttcgacgtgaaaaatattattctaaattatttatcgcaaatatgtttccttttactcttatatataaaccatgagctttttaaacccaaaatatgttagatatccatctctatttccaacgtcggattataagtccatgttttcatattttacatgataattcgactctagacaagttaggctggtgacattggactacttcactaccatgacaaagaaatatatcccataattttgaacaccactaagaagataatgtcatcaatatcttctgttgtcatttaattttccactcttaatgaaaatatattcaaaatacacaattacaaacaactttacaaactaatgttgaaaggttttaactcattaataactacccaaaccaaaaagggtactataaatatagttaatcatctaatagtttctccaaaattcttatacgatcatatatgatatctatagatagatgtaataaatatattagatgacacataattgtcacctctgatcatctagcctcttcccatcacatgccattaatggacctatgcggtgctgatagtaacgtataaccatgacgacgtctgagactcagaggatcttactctaacataattaaaaacataaacttgcactagtgaatttgtaatttcatataaggaaacattttggagcaataaacattatatccttttttcctttccctgtatattgccacatttatgcacataaaatcagctcatatccatcgatcggtccccaatttttcaatgattagtcaattttttcttccttttgataaccgctgtggtccaataagacaagtgaatagggtccatttagggctagcgtacgtggtacatcgcatgttcactatcacttatgagcgcatgcaagtgaaattacatgtcaaaaaaccttacgctatatataagtgtatatggtatctgtcaacattactatacaaaacaaatcttttatttttattgatcacatattttgtcaaaaagtatttgttttgtatcattaggcccaaagaatgtttttgtgtcagttttcttttcctaataaaacagaagaaataaacaataagattcaacttttcacagttaatacagtatttgtaaaaattctgaacaacagattttcaaaactacgacatttaaaattagaacgaagattaacacgcattagtgagtatcaaacgaattcaaaaacttatgtaaatataccaagaatatgtaattataattaactaaacatttttaatttttaaattaaaatgttaaatttcaatgctatttagaacattttggttatgattattaaaatcgtgacacgatggatagtaactaaatgaaagaacaaataggttgaaagctatagggaaataaataaatgaacggtttatagtaacatctttatcataaagctggactgtctcgttgtgatataaaacaacgaagataagtaaggagatttagtactgttgtcattcgccaacgtcaacttcactaatgatcactagtccttttagtttttagagagtttccatcagaatttgcaaacgtaattacaaatattgggccttaatttgaaacctacatagagggccgagtatttgatgaagcccaatcgtctaaagtcgaaaaacatgtaaatagtcaacacacagtgaaaatataaacatatgtaaatacgtttgtgatccaaattaaattacgatgataagatggaacaacagaagctaaccctgagatcatcttctatgacaggtgttacttagaactagtctggatagggagggagatatgtgtcctagaaacttcaaataattcaaactctattatcaaaaaaagtcagaaataaatatagtcttgaatcagttatgcagatctcgtttgttatgtttttggacagtcgacgaaagaactcctagttaattaatattatctattacaatatattctcgcaaaattaagcttatatgtgacagctagagctcagcgttgatattgcctccacacttacattatataattctaacgggaattatatacataaactataatcatgattagcacgaaatgtacgaagaaaagtctgaccaattagttttatcctacacgtgaagacttgaagttgatatgtattaccaatatatcatcaaattattgatataataataagttgttgtttggtcgagaaagcgtgcttgcatgctataatgctaattcatatttaaatgctttgttgctttgattcgctaattaacccaaaattttgaaaatgactcaaaacaaacatacagtttttacatatactattctgttgatcgtgcatgcagagataccacagtttttctgaaaacttcaatattccgctgacaaaactaatatttcacgtgttagtttttagttttttactaattaagacactagactaactgattcctactaataggttttctaatgtaaacaacataagagactctagctagaaaagagaggaaaaacaataaaagcaaatcttgagatcttctcagtcaattgacagatgtctttagaacaagtctaaatagtggattgagaagggaaatgtgtcacagcaaatccaaaaaatccaaactcatcagtttttgaaacttttggacgcaaaactcgcttggctgtgttattcattatttcaaagtccacgaaagaaaataattgtctcgtaaattaattaattaagcttatgacagctcaaggtcgacgacataattgattttgttccttactataaattatctattcaaaggaaaatatatactagctatatatataatccttattcgtacgaaatgtatgaagaaaagtctaaccaaatatttttttcgtttttttaattaaatctatacgaaattgtgcatttatatatcttgacctctatatccaaaactttaccaaaatctcgatttataatcttaactcaaaagaagatcgatcaactattatg

SEQ ID NO: 17774 - DNA, 3000 bp, Unknown; identical to SEQ ID NO: 17773
  misc_feature (1)..( 3000): 2750-1469P.txt file - cDNA_ID_1814001; gDNA_ID_2926212; Annot_ID_202711

SEQ ID NO: 17775 - DNA, 3000 bp, Unknown; identical to SEQ ID NO: 6302
  misc_feature (1)..( 3000): 2750-1469P.txt file - cDNA_ID_1814016; gDNA_ID_1621088; Annot_ID_55429

SEQ ID NO: 17776 - DNA, 3000 bp, Unknown; identical to SEQ ID NO: 6302
  misc_feature (1)..( 3000): 2750-1469P.txt file - cDNA_ID_1814016; gDNA_ID_1621088; Annot_ID_170561

SEQ ID NO: 17777 - DNA, 3003 bp, Unknown
  misc_feature (1)..( 3003): 2750-1469P.txt file - cDNA_ID_1814016; gDNA_ID_2926212; Annot_ID_142054
tccattccttcctggagattacgcattaatatatttagatcttaggtcttattagcttctttattcgcacttttttttttcctctactcgaagcttaacgatcgtaacaatcatggcgacggcttcaggtaccatgattccttcaatttcttcttctaatactttaacctaattctcgatttctctgttaattcccgttgatgattaagaatctcgcttctgatatcttcttctttctttaaatctatatattagtaaattagggtttttactagttttgctattggctagattcattttggctaaattctggcaaaattgattttatttttaatgtttgaatgttgttctgatatatgttttctatgggatctgcagttgcttttaagtctagggaagatcacaggaagaaattagaattagaggaagctcgtaaagctggtctcgctcctgctgaggtagacgaagatggcaaagaaatcaatcctcacatacctgagtatatgtcaaaagctccatggtatctcaagtctgaacagccggtatatgcgaaaattcttctttctcttgcttctctgcattgtcttggttgagaacattcacactcatactctgtgatttttttttgtacagagtttgaagcatcaaaaaaattggaaaattgaacccgaacccaaaaagatatggtatgatagaggtaaaaagatctatcaagctgaacaataccgcaagggagcgtgtataaactgtggtgcaatgactcacagttctaaagcatgtatggatagacctcgtaagattggagctaaatacacaaacatgaacattgctgctgatgagaaaatcgagagttttgaacttgactatgatgggaagagggacagatggaacggttatgatacttcaacctaccgtcatgtggtagatcgttatgatgctaaagaggaggcacgaaagaagtatctcaaggagcagcaacttaagaaactagaggagaagaacaataatgaaaacggtgatgatgcaaccagtgatggggaggaagaccttgacgacttgagggtcgatgaagctaaggttgatgagagtaggcaaatggattttgcaaaggttgagaaacgtgttcgaacaactggtggtggtagcacaggaactgttaggtatggactactcttcatcaaacatgataacataagtttaaattggtgtttctacttgatgcactaatggtgttaccttttcttaatttcaggaatctgcgtatcagagaagacactgctaaatacctgttgaatcttgatgtaaactcagctcattatgaccctaaaactcggtccatgcgtgaagatccacttccagatgcagatccaaatgaaaaattctatttggttagtttgtgatcatcgtgaatcatgtagttgtatcttatattttgatgatatgagaatactaactttttttttcttcttatcatctatccagggagataatcaatatagaaacagtggccaagctctggagttcaaacagataaacatccattcatgtgaagcatttgacaagggacatgacatgcatatgcaagcggctccatcccaagctgaattgctctataagaactttaaagttgcaaaggaaaaactgaaaactcagacaaaggacaccattatggaaaagtatgggaatgcagctacagaaggtgaaattccgatggagcttttgcttggccaaagtgaaagacaaattgagtatgacagggcagggaggattatgaagggacaggtatagtttttgatggttctttcttgagtcgagtgatagctgttgcgatatgaacagcttgagataagtttgcttaatacgtgttgtttattgtgtacaggaggtgataattccaaagagcaaatatgaagaagatgttcatgctaacaatcacacaagtgtttggggatcatggtggaaagatcaccaatggggatataaatgttgccagcagacaattcgcaacagctattgcacaggttctgctggaattgaagctgcagaggcgtccattgatctgatgaaggctaatattgctcgcaaagaagcttctaaaggtttgtgttgttgactctgtttgttcttctagtctcttatttgttctcattgtattgtaacatttcggaatatgttttgtaacattggtttgtattttggtgatcagagagtccgaagaaggttgaagagaagaaaatggcgacatggggaactgatattcctgaagatttggaattgaacgaggaggcacttgcaaatgctcttaaaaaggtaagaaagacgccacagtttcagttcatattttctcttgccaagactcttgtttctctgccctgcaaggtttatctgacgtgttgttgtttgtgtgcaggaggatctaagtaggagggaagaaaaagatgagaggaaacgcaaatacaatgtcaattacaccaacgatgtgacctccgaggagatggaagcttacagaatgaagagagttcaccacgaggacccaatgagaaatttccccggctgataaatgtcttttccctttcaccatattaagctgaagaaaccttgtttttaagtttcatgtctttaaataagacccttgttattcatgtcattatttgttactgtcttcatgtccacccaaagattcattatataacgtatgaaactagaataaattttcttagccaaatcaaattaaccatgttgtatataaaccacgaccaagctttatatgaattttggtccaatcaaaccgaaatcctttattaagacaaaactgataatgtattgtttgcaaaagagccctccaaatttgttaaaatgtgaaagaaagctaattaaatatcaatttatctgtgtttaaagttttaacgagagggggcttttgaatttttttgctcaacttccaaatcgtcgccggcgatagaaaccctagatttgattctccgtcggttatatccagcaatg

SEQ ID NO: 17778 - DNA, 3000 bp, Unknown; identical to SEQ ID NO: 6305
  misc_feature (1)..( 3000): 2750-1469P.txt file - cDNA_ID_1814031; gDNA_ID_1621088; Annot_ID_55423

SEQ ID NO: 17779 - DNA, 3000 bp, Unknown; identical to SEQ ID NO: 6305
  misc_feature (1)..( 3000): 2750-1469P.txt file - cDNA_ID_1814031; gDNA_ID_1621088; Annot_ID_170555

SEQ ID NO: 17780 - DNA, 3003 bp, Unknown
  misc_feature (1)..( 3003): 2750-1469P.txt file - cDNA_ID_1814031; gDNA_ID_2926212; Annot_ID_142060
atagtgtttgtaaaatattatagattcttcagaatcctctttttaagactaatttgggaaaatattaaatacaggataacaggaatatgagaatcttgaatgagaagagcactaaaaacaaaataaataacaagtttcccaaaactgaaaattgtaatataattaatagccgaattaaaaggaaaaaaatccttaaagaaaaatataaaaaaagagaagaataaatatatataagtgagtgtaacgattcgccgcgtgtgtacgggcatcacaaaaagattctttcttccatttaaagataaatctaattttaatattgacaaaaacaccctcaagtctccacttatttacagcggctacggttcaccgcgtccttcttcttcttccctaatctcattttttttttgttctcatttatcttcttcagcatcttcatcatcttcttctatatatacctctttaagcttgcttctctttgtctttatcttgtccgatggttcaaacagaaaccgatcaaaggatgggtcttaatctgaatttgtctatctactctttaccaaaacccttatctcaatttctcgatgaagtgtcgaggatcaaagacaatcattccaaactgtctgaaatcgatggttatgtcggaaaattagaggaagaaaggaacaaaatcgatgtttttaaacgagaactccctttatgcatgctcttattgaacgaaggtatcttttattaaaattctctccttttcttttttttatcttctctaatcgattcgtgtttttgtttaaagagattgtttttctctgtgtagcgattggggcgttgaaggatgaggctagaaaagggttatcactgatggcatctaatgggaaattcgatgatgttgaaagggcaaaaccggaaactgataagaagagctggatgagctctgcccagttatggatctcgaaccctaattcccaattccgatcggtacgatcaaaaagcaaccctttttatgttttgtgaagaatcatatgttgtgtgattgatcttgttgaccttatgatcatgttttgacagacaaatgaagaagaagaagatcggtgtgtgagtcagaacccatttcagacatgtaattaccctaatcaaggaggggtatttatgccatttaaccgtcccccacctcctccaccaccagctcctctgtctctcatgactccaacatcagagatgatgatggattatagcagaattgagcagagtcatcatcatcatcaattcaataaaccttcttcacagagtcatcacattcagaagaaagagcagagaaggagatggtcacaggaacttcaccgtaaatttgttgatgctcttcataggcttggagggccacaaggttagtccttaaccttagtaaaggatcaaactttgctttagatttgattgattgattatactgagattgttttgtattgttgttgttgttgttgttgttgttgttgtgagacagttgctacaccaaagcagattagagatttgatgaaagttgatggtttaaccaatgatgaagtcaagagccatttacaagtaaaagttctcatcttttacagtaacttaaactttgatgtgtggatgaatgaatgattttgacagtgcggtgaaatgaaattgttattgcagaaatatagaatgcatatccgtaagcatccgctgcatccgacaaagactttgtcatcgtcggatcagccaggtgtgttagagagagaatcgcagagcttaataagtttgtcgaggtcggattcgccacaaagcccacttgttgcaagagggttgttcagtagtaatgttggtcatagctcagaggaagatgaggaggaggaggatgaagaggaggagaagtctgatggacgtagtagctgtagaaatgatgaaacaaagaagaagagacaagtgttggatcttgagctttgaaagtctgcatagtgaatgatataatctttaccaacttatgttatatatgctcaaaactttgagtttgttcgggagtttttgtagatgtaaacatgagagttgaaataaggaagaggattttgagcaaaaagtagggtttgtttttgcaagaggaaatagatagagaagagtgttcgaaatcctctgtgttttttttttttttttttttttacttcataagtaagataaactcatatatcaaagattttgtttttatacttattacagtctcaaccatgtgaatgaaggagtcatttgtttagttttaccagctcgtcatactaattaccttttaccttcgaaaacagaggatgaagaaacatcacaatctttgtctctttctgtaactcatcgttttctacaaatctacgtaatctgagagaataagtaaggggaaaaaaaataagaatcttttattgcataaaatcgtacgaaaagataagatttttcgtctgaaaaacgacaagatttattttcactattgaaggaattgacaatgtatatagaaaaaatctactcactgattagtgatttgatgaatagtttacttccacgagatttgcatgttttgtggataaagcttcttgcaccatgtaacatacattagccaatagtatagggtagatatttatcttttgacataattttcttcaaatttgttatttttattcaaaaattcaaatagttactctctgcttttcacaattaatgagtgtatatactaaagacatttaagcggcaatggaatatttgttcaaattggttcggtcgattcagtttctaaacccaaccggtttattcacccggttatttcgagtcaatttatgtggttttgtggtctctgggcctcacggggccgcctctccgtcttcatcaacattctcaaactcttttacaaatctaggctcgacgagggtttaagcaatcaccggagctcttagtctcttacgctgtgagctaagaaccgaccttttgcttagtttctttcaagtctccaatcaaacaaccatg

SEQ ID NO: 17781 - DNA, 3003 bp, Unknown; identical to SEQ ID NO: 17780
  misc_feature (1)..( 3003): 2750-1469P.txt file - cDNA_ID_1814031; gDNA_ID_2926212; Annot_ID_202723

SEQ ID NO: 17782 - DNA, 927 bp, Unknown
  misc_feature (1)..( 927): 2750-1469P.txt file - cDNA_ID_1814031; gDNA_ID_2926213; Annot_ID_202742
gcaaaaagtagggtttgtttttgcaagaggaaatagatagagaagagtgttcgaaatcctctgtgttttttttttttttttttttttacttcataagtaagataaactcatatatcaaagattttgtttttatacttattacagtctcaaccatgtgaatgaaggagtcatttgtttagttttaccagctcgtcatactaattaccttttaccttcgaaaacagaggatgaagaaacatcacaatctttgtctctttctgtaactcatcgttttctacaaatctacgtaatctgagagaataagtaaggggaaaaaaaataagaatcttttattgcataaaatcgtacgaaaagataagatttttcgtctgaaaaacgacaagatttattttcactattgaaggaattgacaatgtatatagaaaaaatctactcactgattagtgatttgatgaatagtttacttccacgagatttgcatgttttgtggataaagcttcttgcaccatgtaacatacattagccaatagtatagggtagatatttatcttttgacataattttcttcaaatttgttatttttattcaaaaattcaaatagttactctctgcttttcacaattaatgagtgtatatactaaagacatttaagcggcaatggaatatttgttcaaattggttcggtcgattcagtttctaaacccaaccggtttattcacccggttatttcgagtcaatttatgtggttttgtggtctctgggcctcacggggccgcctctccgtcttcatcaacattctcaaactcttttacaaatctaggctcgacgagggtttaagcaatcaccggagctcttagtctcttacgctgtgagctaagaaccgaccttttgcttagtttctttcaagtctccaatcaaacaaccatg

SEQ ID NO: 17783 - DNA, 3000 bp, Unknown; identical to SEQ ID NO: 6283
  misc_feature (1)..( 3000): 2750-1469P.txt file - cDNA_ID_1814035; gDNA_ID_1621088; Annot_ID_55420

SEQ ID NO: 17784 - DNA, 3000 bp, Unknown; identical to SEQ ID NO: 6283
  misc_feature (1)..( 3000): 2750-1469P.txt file - cDNA_ID_1814035; gDNA_ID_1621088; Annot_ID_170552

SEQ ID NO: 17785 - DNA, 3003 bp, Unknown
  misc_feature (1)..( 3003): 2750-1469P.txt file - cDNA_ID_1814035; gDNA_ID_2926213; Annot_ID_142063
tagcttgaacaaaagcggagcagtttagctagactaaccgttagtgggataacatacgcattttttattcgtatattttagtgtttaccgtgaatattttaattaaaacataaaaatattttttcccctaattctttaattttggttttcattttcaagtccgccaaaaaaagcgaagagagggttttaatacgattccactcttctcaacaaatttgacgtttttgttcttcgaaattcaaattcacccagaaaaaatctcaatccgcgatggttgaagaatcagcttctgcgtcggaagcttcggtgatacaaaccctaaccgagccggcgacggagattgcgcaaaccctagaacctaacctagcctcaatcgaagccaccgtcgaatcggttgttcagggaggcactgaatcgacttgtaacaacgacgctaataacaacaacgccgctgacagtgctgctactgaggtttgtgatgaggagcgtgagaagacgcttgagttcgctgaggaattgacggagaaaggctctgtgtttttgaaagagaacgatttcgctgaagccgtcgattgcttcagccgtgctctcgaaatcaggtatctttttgggagattcatttgagaatttgtagtcgagaacctctcaatcaagggtttagggtttcagatgtttctgaatctagtttatgctcgaatgatctaatcatggttctgaatttttagttgagtttcaattgtgtgttctctcgactgaattctttagtatctggtccttttatcaaaggatctaatgaaaacattgcttgttttaatggtatggttagggttgcacattatggtgaacttgatgctgagtgtataaacgcatactatcgatatggattagctctcctggcaaaggctcaagctgaagctgatccacttgggaacatgcctaagaaagaaggtgaagttcagcaagagtccagcaatggtgaatcgctggctccttctgttgtttcaggtgacccagagagacaagggagttcaagtgggcaagaaggtatggattattgggaattgtcttaggttaagcttatgggtatagatgcttctgcttctttgtttgctgacttcttttctccctcatgtataggttctggtggtaaagaccaaggagaggatggtgaagattgtcaagatgatgacctatctgatgctgatggtgatgctgatgaagatgagtctgatttggatatggcctggaaaatgctggacattgctagggttattactgacaaacagtctactgagacaatggaaaaagtggatatactctgttcgcttgctgaagtgtccttggaaagaggtattttttcttcctttcacctttgcattgtcttattttctcatgtcagctattggttggttttgagttctgttgtttactatgcagaggacattgagtcttccctgtctgactacaagaatgcattatccatcttagagagactggttgagcccgacagtcgacgcacagctgaattgtatccttgtggtttcttaaattgtacctgattttcgtttctgtcaattcagttgttggattatatcttaacttgaacgtttcagaaacttccgcatctgcatttgtcttgagactggatgtcagcctaaggaagcaataccatattgtcaaaaagctttgttaatatgcaaagctcggatggagaggctcagtaatgaaatcaaaggtgcatctggttcagcaacttcctcaaccgtctctgaaatagatgaaggcatccaacaatcatccaatgttccttacattgataaatctgcttcagacaaagaagttgagatcggagacttagctggtctcgctgaagatctagaaaagaaggcaagtaaactaaacctatcagttcattaaaatatctctaaacccatactaatgtccaacattttttttctgcagcttgaggatttaaaacaacaagcagagaacccaaagcaggttcttgctgagctaatgggcatggtatcagctaagccaaatgccagtgacaaggttgttcctgctgctgctgaaatgagctcttctaggatgggaactgtgaacaccaatttcgggaaagatttagagtcgcctacagtctcaaccgctcataccggtgcagcaggaggaggagcagcatcaggtgttactcacttgggtgttgttggaagaggagtgaagagagttttgatgaatacaacctcgattgaatcaagtgcatcaaagaaaccagctctagagttttcagacaaagcagatggcaactcctcttgaaaccggaaaaaggtataaaaattcctgttactagtgaagtatctaacctaagaaaactgagaaaaacatttggtatcttcctcatgaatcttccaagactagattttcaggttcatgttttgtaatggagtccgtacttgctacttttttaaatcgctgagatattttttactttttattcttgtttaatcagtcttattttttcaaagtgttttttagtttaggcacaaaagcagaatcttattatcacattatcagttgataatcatctgatgagaaatagttctttggagatcttttagggaattttataagtaataattaagggataattggatatcctttattaaaaaatgtaggctacttgtagaattaaaaactggaatcttataatatgattagtataataagattacgctatatctggattctggagatatcatagataagctctgtctatgaaaacgagacccttggggaagccacgtgtcaaatctatctctgtcaccagcgaagcctacgtggcgagcagctcctagaatatccaaattcacaacagtatttttttttctttcgttctgattcaacagttgtcacaaacagccaaggtgttttgtgattggttataaatactctgctatgtgagagagtttactacattcacaaacaaactaaaacttaaaaatg

SEQ ID NO: 17786 - DNA, 3003 bp, Unknown; identical to SEQ ID NO: 17785
  misc_feature (1)..( 3003): 2750-1469P.txt file - cDNA_ID_1814035; gDNA_ID_2926213; Annot_ID_202745

SEQ ID NO: 17787 - DNA, 3003 bp, Unknown
  misc_feature (1)..( 3003): 2750-1469P.txt file - cDNA_ID_1814041; gDNA_ID_1621088; Annot_ID_55417
ttgtactttaagtctttaagatacattatgcttaaaaatgacagttaaaatttggtttgtatactacttagacgaattctttgactgttaatattcaaatatatttgcattctctgttatttcattcatatccaataaatatatatattatttattatagtatgatataaactaacacataatatatacatagatatatttcgtttaaagatgtggtgtcaatcgtattttttatagagcaaaatttcgaggtaaattagttttttcaaacatctacagtttgtacatggcattggacttaaataaaataatgtcacgtagctatcgacaaaaagaaaagcatctgatgtagctatgaaatttacaaccactgctaaacaaattgtccacttaataaatagtttatagataatttgggaataaagctgacaatgactgtgtcggatatcgttattcgccgaagctaacattcatataaacgaataacgttttttgttttttttggtcgaaataaacgaataatgtataaaatgaaattttgtttacaccaaaaaaagatccaccggtaacaagaaaaaatcttagtgctctgaattagaagaataaattaattatcacaaaaaggaaaggccgtagagaagattgtaagctttaaaaagcccaatatttttggacaattttcgtttggttacctgtccccgttcgtcctttcaagtacatcttcttctctctcgatttagcttgaggtataaccagtcaaccgccacatttccttgtattacaatgaataattgggcctttaaagcccataaattggcctctaaacgtttcattcggttaagtcccttgcattttaagatttcatcttgtcatttcacctacaattacaaaacaaaattacaaatcatctctctgtttcagagtcaatggttgaaggaaaaaaaaaaaaaactcactgtacttttatttttatggatcaaaagtgagttgttctatgatttactttttgtttcacaaacagataccgttttgtttctttaatacaagtttaaaaaaaaaaatgtaatcgtcattatgatttaagtttattatttccataactgtatactgtatagtgtgttgagaaaaacatatgatataaattttagatgttttcttaaaacgagggaatttaaatcatttaatagcatatcgtaagtttaaagtcaactagaggagtgaatggcaggctaattattcttcttcttctcaacccaactcgaggaaatttagctgaattagcataaacaatacgtaaggaggaacatgatccattgattaggcaaaaagtttaggttacaaattcatacatttgcatcttacttaaaaggagcaatagaattcctagttccaaggtcaagagtcaatttacatttccattttttaaaaataattttgtttgatgttataagttataacttaagtaatagatacaaatcatggggacataaacatagatgagcttttcttatggttgaaagaaataaaaatccaaatggcgaaggatcaaatggccgactagcattgattgaattgctaaagcgagactttaccttttacattataaatcatttgatttgacctcatttgtgacttaagttatctaatagcgattttttctctatgtttttttttataataagtttttggttgaagattaagatgtagatcataattcagggaaaagatcatctaatgaaaattcatggtccaccacaagactaacaaggctgggtttgtggcttttactattggactcattatagttgatgaactttattgaatctttttcaacccaaattttgtattttataaagaagtgggtagagatcacctccaacctttacaaaagaaactgtttaacagttataaagaatgcaaaaagggaataataagagactaaaatgatgagttatggagtatggaccatgtgtgcactcgtatatctaattattgaaaacctttacacttttttttccagggatgccttaaatacaatttacccacctcatgaatcatgcttatccaaactcaaacatatccaaaaccatgtaactgatcttcaatttgttaccattttataacctcgaagtaaatgcgtatttttttgcttataatattgacaatttcaatttccttacatataatcattcatataaagaatgtgaagctcttttaaactcatggagtgttatattattttccctccaattaatcatatgtagcttgaagacaaattattatttcgtacagaattgaatgcagaatcttccggacgactgaaatagctctacttattacaaaaaaaattgtaatcaaacgaataaaaacaaatgataataagcagcacatggaaaccatttacagagtaaaatacttgtaaagcatccataaacaaaaaaaaaatccccaaaaaatggaaaacagcagagacattcgaaactatattctaaaaacaaaaaccaagaacatgcccttatttttctaaaattcaaaaacatccattatattcgatttagattccttcgagctatattggttgtgtgaaccaaaaacagaagaatatcatgtaaaagtcaaatttacaactttagctatagatgatataaatgtcttgtagcttactgattctaagaatctatctactcgtttcttcggctcactaaagaaagagagagagagagagaaaaaaagaaagtacaatttcataataataaatgaagaagaccgtaacaagaagtgtgtagtcgtattgattatagaattaaagaaactctgcaatatttttgcagagagacagagacacaaagaaagagagagagagagcatttagggagcaggaagtggagtgtttggttacgtgagctgttttctctttctctatctttaactcccttcacacctctccctctctcttcttcatatctctctctgtcacaatagtgtgatgatgcaatgagaatg

SEQ ID NO: 17788 - DNA, 3003 bp, Unknown; identical to SEQ ID NO: 17787
  misc_feature (1)..( 3003): 2750-1469P.txt file - cDNA_ID_1814041; gDNA_ID_1621088; Annot_ID_170546

SEQ ID NO: 17789 - DNA, 3000 bp, Unknown
  misc_feature (1)..( 3000): 2750-1469P.txt file - cDNA_ID_1814041; gDNA_ID_2926213; Annot_ID_142066
tactttaagtctttaagatacattatgcttaaaaatgacagttaaaatttggtttgtatactacttagacgaattctttgactgttaatattcaaatatatttgcattctctgttatttcattcatatccaataaatatatatattatttattatagtatgatataaactaacacataatatatacatagatatatttcgtttaaagatgtggtgtcaatcgtattttttatagagcaaaatttcgaggtaaattagttttttcaaacatctacagtttgtacatggcattggacttaaataaaataatgtcacgtagctatcgacaaaaagaaaagcatctgatgtagctatgaaatttacaaccactgctaaacaaattgtccacttaataaatagtttatagataatttgggaataaagctgacaatgactgtgtcggatatcgttattcgccgaagctaacattcatataaacgaataacgttttttgttttttttggtcgaaataaacgaataatgtataaaatgaaattttgtttacaccaaaaaaagatccaccggtaacaagaaaaaatcttagtgctctgaattagaagaataaattaattatcacaaaaaggaaaggccgtagagaagattgtaagctttaaaaagcccaatatttttggacaattttcgtttggttacctgtccccgttcgtcctttcaagtacatcttcttctctctcgatttagcttgaggtataaccagtcaaccgccacatttccttgtattacaatgaataattgggcctttaaagcccataaattggcctctaaacgtttcattcggttaagtcccttgcattttaagatttcatcttgtcatttcacctacaattacaaaacaaaattacaaatcatctctctgtttcagagtcaatggttgaaggaaaaaaaaaaaaaactcactgtacttttatttttatggatcaaaagtgagttgttctatgatttactttttgtttcacaaacagataccgttttgtttctttaatacaagtttaaaaaaaaaaatgtaatcgtcattatgatttaagtttattatttccataactgtatactgtatagtgtgttgagaaaaacatatgatataaattttagatgttttcttaaaacgagggaatttaaatcatttaatagcatatcgtaagtttaaagtcaactagaggagtgaatggcaggctaattattcttcttcttctcaacccaactcgaggaaatttagctgaattagcataaacaatacgtaaggaggaacatgatccattgattaggcaaaaagtttaggttacaaattcatacatttgcatcttacttaaaaggagcaatagaattcctagttccaaggtcaagagtcaatttacatttccattttttaaaaataattttgtttgatgttataagttataacttaagtaatagatacaaatcatggggacataaacatagatgagcttttcttatggttgaaagaaataaaaatccaaatggcgaaggatcaaatggccgactagcattgattgaattgctaaagcgagactttaccttttacattataaatcatttgatttgacctcatttgtgacttaagttatctaatagcgattttttctctatgtttttttttataataagtttttggttgaagattaagatgtagatcataattcagggaaaagatcatctaatgaaaattcatggtccaccacaagactaacaaggctgggtttgtggcttttactattggactcattatagttgatgaactttattgaatctttttcaacccaaattttgtattttataaagaagtgggtagagatcacctccaacctttacaaaagaaactgtttaacagttataaagaatgcaaaaagggaataataagagactaaaatgatgagttatggagtatggaccatgtgtgcactcgtatatctaattattgaaaacctttacacttttttttccagggatgccttaaatacaatttacccacctcatgaatcatgcttatccaaactcaaacatatccaaaaccatgtaactgatcttcaatttgttaccattttataacctcgaagtaaatgcgtatttttttgcttataatattgacaatttcaatttccttacatataatcattcatataaagaatgtgaagctcttttaaactcatggagtgttatattattttccctccaattaatcatatgtagcttgaagacaaattattatttcgtacagaattgaatgcagaatcttccggacgactgaaatagctctacttattacaaaaaaaattgtaatcaaacgaataaaaacaaatgataataagcagcacatggaaaccatttacagagtaaaatacttgtaaagcatccataaacaaaaaaaaaatccccaaaaaatggaaaacagcagagacattcgaaactatattctaaaaacaaaaaccaagaacatgcccttatttttctaaaattcaaaaacatccattatattcgatttagattccttcgagctatattggttgtgtgaaccaaaaacagaagaatatcatgtaaaagtcaaatttacaactttagctatagatgatataaatgtcttgtagcttactgattctaagaatctatctactcgtttcttcggctcactaaagaaagagagagagagagagaaaaaaagaaagtacaatttcataataataaatgaagaagaccgtaacaagaagtgtgtagtcgtattgattatagaattaaagaaactctgcaatatttttgcagagagacagagacacaaagaaagagagagagagagcatttagggagcaggaagtggagtgtttggttacgtgagctgttttctctttctctatctttaactcccttcacacctctccctctctcttcttcatatctctctctgtcacaatagtgtgatgatgcaatgagaatg

SEQ ID NO: 17790 - DNA, 3000 bp, Unknown; identical to SEQ ID NO: 17789
  misc_feature (1)..( 3000): 2750-1469P.txt file - cDNA_ID_1814041; gDNA_ID_2926213; Annot_ID_202748

SEQ ID NO: 17791 - DNA, 3003 bp, Unknown
  misc_feature (1)..( 3003): 2750-1469P.txt file - cDNA_ID_1814045; gDNA_ID_1621088; Annot_ID_55415
cgtcgaaggaagagacggcgagtgacggagatacggcgagcggtggcgcctcaccgtccaacgacggcagactcttctcggagggcgagcgtgttctcgcttaccatggtcctcgcgtctacggagccaaggcaaataaaaaacctctctctctctctctctttctctgtgcatcgtcagatgttcgcataatttgaattctagagattatcttgttcgtgttaatttagcaattcttgtatttcacgtgggttttggttgtatccgactacggaattaactggtttcattgaattgagatctctctgctagatttggcttaggggtttcttggtagatttcggtttcaagttacgacgatccgaaagatgaacccattgagattggattcgagttttctttttttggtaatggattcatgtagcattagagctttttagattggaatgatcataaatgcttagtcgtaatagatgcaaaagaataattcacttgccgttggagcaaggaattcaataaattactcggaaaatagggcaagctaatctacttgcatgtttattttttcaatcatatattatataggtcactggattgagtctcattcatatcaaatgtgtgtcgttgttatgctaaatcttcatagttttgaaaaaaatctgttattgcatagtgttttcagtgtgtgggcagacctgatagattattgacattccattacaggttcaaaaggtcgagcttcggaaaaaggagtggaaatactttgtgcactatcttgtgaggcctccttcttctgagctattatagtttcattatcctgtttcatgtactagctattttcattttggtttgcagtaataagtgatacagcgatctttgtctgcagggttggaacaaaaagtgagtatctctctctgctctcatgtcgattctggtttatgtagcaaaatcagtagattgggacccatgacatgattgtcttgccaacagttgggatgaatgggttagtgcggatagattgttgaaacataccgaggagaatcttgtcaaacagaaagctctagacaaaaagcaaggagttgaaaaaggtaccaagtctggccgttccgctcagacaaaaactagaagctctgcaggtgagttgttgcctccacattgaccatgctgagagtacatgatacatattttggtcatccaggctaagaaactaactatttctttctgatcttgcacttgcagacacaaaggctgataaagatgacaccaagaccaatggtaggcaacatattaatttacgctccctttgtagttcagggttctcccaacaatttccaaggaaatgatttggtagactgggtgcaacttaaattatttaagctggtgtatagatgattacattttctgttgcagctgcaaaagggaagaaacgaaagcacgagtcaggcaatgaggtcaggcttgcaaaaacttagagatgtatttggttcatacctgttaggtctttgttaagattatattttacagtacaatagatggctgatgtgttgttatgcatatacacacatacgaaaagggtcaatttttcaggtcttctaatatcgataaggtttttgttttcatttgtaatctatagaaggataatgtaacggcggagaagctaatgaagatccaaattcccgcatcacttaaaaagcaactcactgacgactgggagtatattgcgcagaaggacaaggtatcatcaattttctctattttgtgcacatacttttagcactattagaattgttattgaatcagctagacttgaaagttaagagacataagtgtgtatttgtagtcgaatgaattgtgtataccaaagtgaagggaaattgatgtttggtaatctgtcttcaaatgattatataggttgtgaaacttcctcgttcacctaacgtcgatgagatattgtccaagtaccttgaattcaaaaccaagaaggatggaatgtgagtcttttactcgaacacagagtttgatatatttgaatcttttccgaaatccaacgatacaaaattttgtgtttctgtttttgtgcagggtaactgattcggtcgctgaaatattgaaaggcataaggagttatttcgacaaggcattgccagtgatgctcctatataagaaagagaggcgacaataccaagaatcaatcgtggatgatacttcaccttcaactgtttatggcgccgagcatttgctccgtctctttggtaaaatctcattaagttcttatttggacagtaaaattcgatgttctgaaattttatttttgctttttttaaaaatctgcagtcaagttgccagatcttttttcatatgtaaacatggaagaagaaacatggagtcgcatgcaacaaacattatcagacttcctcaagtatatatctaatctctctgtttcatcactaccattttgatttctcggttttaacggttaaattcacaatttctggaaaaaaatctttacaggtttattcagaagaatcagagcactttcttgctaccatcagcatatgattctgataaggtttcagatggtaaaggcaaaggaaaagacgactgacatctccaggaaaaaaatattgttgtaatttagaattccttcatttttctgatgaattcataattgtaagatttgcagctgaatatgaaatattttacaggcctttgaagttaactatttggttcatgtaaatttctttaagtggtcaataaaacatccggaacaatggaaccttggttggtagaaggcaacaaaaaaaatggaaaaaataaaaaagtgtatgagatgagattatttatgtggctaatgtcatcggaataattacattggttctccttctctgttattattctttcatctttttcaccaagacgaacgactcttacacgcagagttcgcgagatcagaatcaatggtggcatgaaaaacgacgcttgagctcaaattcgtcgaccatg

SEQ ID NO: 17792 - DNA, 3000 bp, Unknown
  misc_feature (1)..( 3000): 2750-1469P.txt file - cDNA_ID_1814045; gDNA_ID_2926213; Annot_ID_142068
cgaaggaagagacggcgagtgacggagatacggcgagcggtggcgcctcaccgtccaacgacggcagactcttctcggagggcgagcgtgttctcgcttaccatggtcctcgcgtctacggagccaaggcaaataaaaaacctctctctctctctctctttctctgtgcatcgtcagatgttcgcataatttgaattctagagattatcttgttcgtgttaatttagcaattcttgtatttcacgtgggttttggttgtatccgactacggaattaactggtttcattgaattgagatctctctgctagatttggcttaggggtttcttggtagatttcggtttcaagttacgacgatccgaaagatgaacccattgagattggattcgagttttctttttttggtaatggattcatgtagcattagagctttttagattggaatgatcataaatgcttagtcgtaatagatgcaaaagaataattcacttgccgttggagcaaggaattcaataaattactcggaaaatagggcaagctaatctacttgcatgtttattttttcaatcatatattatataggtcactggattgagtctcattcatatcaaatgtgtgtcgttgttatgctaaatcttcatagttttgaaaaaaatctgttattgcatagtgttttcagtgtgtgggcagacctgatagattattgacattccattacaggttcaaaaggtcgagcttcggaaaaaggagtggaaatactttgtgcactatcttgtgaggcctccttcttctgagctattatagtttcattatcctgtttcatgtactagctattttcattttggtttgcagtaataagtgatacagcgatctttgtctgcagggttggaacaaaaagtgagtatctctctctgctctcatgtcgattctggtttatgtagcaaaatcagtagattgggacccatgacatgattgtcttgccaacagttgggatgaatgggttagtgcggatagattgttgaaacataccgaggagaatcttgtcaaacagaaagctctagacaaaaagcaaggagttgaaaaaggtaccaagtctggccgttccgctcagacaaaaactagaagctctgcaggtgagttgttgcctccacattgaccatgctgagagtacatgatacatattttggtcatccaggctaagaaactaactatttctttctgatcttgcacttgcagacacaaaggctgataaagatgacaccaagaccaatggtaggcaacatattaatttacgctccctttgtagttcagggttctcccaacaatttccaaggaaatgatttggtagactgggtgcaacttaaattatttaagctggtgtatagatgattacattttctgttgcagctgcaaaagggaagaaacgaaagcacgagtcaggcaatgaggtcaggcttgcaaaaacttagagatgtatttggttcatacctgttaggtctttgttaagattatattttacagtacaatagatggctgatgtgttgttatgcatatacacacatacgaaaagggtcaatttttcaggtcttctaatatcgataaggtttttgttttcatttgtaatctatagaaggataatgtaacggcggagaagctaatgaagatccaaattcccgcatcacttaaaaagcaactcactgacgactgggagtatattgcgcagaaggacaaggtatcatcaattttctctattttgtgcacatacttttagcactattagaattgttattgaatcagctagacttgaaagttaagagacataagtgtgtatttgtagtcgaatgaattgtgtataccaaagtgaagggaaattgatgtttggtaatctgtcttcaaatgattatataggttgtgaaacttcctcgttcacctaacgtcgatgagatattgtccaagtaccttgaattcaaaaccaagaaggatggaatgtgagtcttttactcgaacacagagtttgatatatttgaatcttttccgaaatccaacgatacaaaattttgtgtttctgtttttgtgcagggtaactgattcggtcgctgaaatattgaaaggcataaggagttatttcgacaaggcattgccagtgatgctcctatataagaaagagaggcgacaataccaagaatcaatcgtggatgatacttcaccttcaactgtttatggcgccgagcatttgctccgtctctttggtaaaatctcattaagttcttatttggacagtaaaattcgatgttctgaaattttatttttgctttttttaaaaatctgcagtcaagttgccagatcttttttcatatgtaaacatggaagaagaaacatggagtcgcatgcaacaaacattatcagacttcctcaagtatatatctaatctctctgtttcatcactaccattttgatttctcggttttaacggttaaattcacaatttctggaaaaaaatctttacaggtttattcagaagaatcagagcactttcttgctaccatcagcatatgattctgataaggtttcagatggtaaaggcaaaggaaaagacgactgacatctccaggaaaaaaatattgttgtaatttagaattccttcatttttctgatgaattcataattgtaagatttgcagctgaatatgaaatattttacaggcctttgaagttaactatttggttcatgtaaatttctttaagtggtcaataaaacatccggaacaatggaaccttggttggtagaaggcaacaaaaaaaatggaaaaaataaaaaagtgtatgagatgagattatttatgtggctaatgtcatcggaataattacattggttctccttctctgttattattctttcatctttttcaccaagacgaacgactcttacacgcagagttcgcgagatcagaatcaatggtggcatgaaaaacgacgcttgagctcaaattcgtcgaccatg

SEQ ID NO: 17793 - DNA, 3000 bp, Unknown; identical to SEQ ID NO: 17792
  misc_feature (1)..( 3000): 2750-1469P.txt file - cDNA_ID_1814045; gDNA_ID_2926213; Annot_ID_202751

SEQ ID NO: 17794 - DNA, 3003 bp, Unknown
  misc_feature (1)..( 3003): 2750-1469P.txt file - cDNA_ID_1814049; gDNA_ID_1621088; Annot_ID_55414
aactctagaatttttcaaaaaacgaacaaaacataattgtcatgttggttcgtgggcatgagaaaaagaagggagataacatagacagacaaattcggtggtactcacacaaaatacttgtatggacggacggactctaactctgcttcatagttgtcatgataacaatattggcatctatcttcttcctctttttcctttttgtttttaaacgtcacttcccccacatgtatgatgtaccctcaattttatttcattatcaatcttgcatcttcgaatcttttttaaaaaaaatcgagtttgcagaactaaatccataattatttctaatttcgattttttaatgtgaaatatttagtggtcaaatatgaatataagtactgtttatggacgaaccatgtgaacatatcatgttttcgatatacaaattatgatattgcattgtgcagtcacaatttggttcttttgagatgttatagttgtatactaccttaatccctagagatacatatctgctatttgaatggattaaagatttgcttttatatagatttaagtaaataattgaaattcttttgtccaaagatatttgttcaagaattatattaatttcatgtaattggaaggaatacaaaagactggaatcttgataatgaatttattaatgcagaatttgattccattattaatggactaccacgtccgaactatacatagttaaacattttttcttcttgtattattctggcgtggtcttacgccacttataaactatattattttggccaaaccaatatttataaaatcgaaataaaacattaaaccgggttttaagtactttgtttgtattattcaataattggttattaaactaagttaataatttcaaaatagtgatttcaccttaaaatatgggaaagagtttcctgatgctctggaatttggtttctttgtcttatactctaactgcggataaaaaggagcgattttgctataaaaaggaacagtttgagatgatattacactttattccggtaaattatttggctaccatcaataatatattcttcaaaactatcaatcttcctttttttttagaaaataaataaatttcatcacaactctgtttgaaaaatcgtttatgaacttgagacggaaaaattatcataattcaacgtcatatagcagcaagagttgaaataaaaattaatggttttgtcttttcataggatagatttcttatttctacctaacaaaaactaaaatttggatgttgaattttgagtagtataaagtttggttgttcaatgttttttgcaagaaaaatcacgtgagaaggaactatttttggtcgtgcaagaaaaataacaccaaagtgtttgaacttttgaagcattgatgattaggtttggtgtatctaacaatattataaaacaaacacatgagatccgactcatagtcaatttagcttatgtcactccttaaatcagctggtttaaccgaaccagaaaccctaaccaaatttttaaaaaaaattcaagttatctgattttaaatttattttctatatataaaaaatttggctgaaagttgaaacgaaaccaaagctagagatgtacattttctagtaaagtaaaataaagtaaacaaattcaatctgaaaccaacaatataccataatatacttacgaaaaccaaatctaaaccggctaacgatatatgtgagtgtgactttatatacgttgcgagtttgaaattcaagcattatttttggtctacacaactacaaatctaccttaatatttagctgccgtctgctccaaacaatgaaacttcatgtttggtctacgatattaaattctttatttctaatattcaattccttatccttttcttcattgatggctttcactattttgtgttcaataaatacacacaaaattgaatgctcaagaaacaagttggtattttcccaggaagcagcatactaactaatttcaatgatcacattcttttcaattcaaacttagtcaagaataaaaattcaaactttgcatctccacgaacactactatatagtcacattctcaactcacaaaacactcacaacaaaattcattatctgccaaagagaaagaaaaccatattttttataaacagagttaaattgttcttaaacatgatgatgaacaaaaacgttctgagttcgattctgttcttcatgttgattggttcggttcttgtcgagagtcgtccgcttggtctaacaaagaccgaggagaagttcgtggctagtttattcgatggcttatcacttggttcgatcaaagactcaggtccaagtccaggcgagggtcataaggtcgtggacaggaaggatacgtttcgatttgttaagcactcaggtccaagcccaagcggaccgggccactaatgtttcaatctttagttcaaaccgggccggttaaagtgcccatacccatctaggtcgagaaaattatttcatttttttgttccagtttcattagtggaaaatattatacatgtctcatgtttctgatcgatacataggaagaagaatggcaaaaacaataattattgtctcatttttctatatttaggattattgttttgttagtgaaataaagttacttgaaaagtatacaaataaaatgtattaatcaatttttttatatttatttgaatgtaataatagttaataaacatcagtgtccaaagtgaaatatgagtccaactgctcaacgaccaataaaggcataaatttttttaaaaagacaatgctttataaatgggcgacgagtatatttaaaaggtttaagagatttaatcgaactattgtgaaagttaagggactcaattgaaaaactattcgcaacgattcagtcattcagcagttgtcgtagattcatttatctagacggttaaaggggtgccttgtgatgtgaagatctttgcctctcgctctcgctttcggtgacaatg

SEQ ID NO: 17795 - DNA, 3000 bp, Unknown
  misc_feature (1)..( 3000): 2750-1469P.txt file - cDNA_ID_1814049; gDNA_ID_2926213; Annot_ID_142069
tctagaatttttcaaaaaacgaacaaaacataattgtcatgttggttcgtgggcatgagaaaaagaagggagataacatagacagacaaattcggtggtactcacacaaaatacttgtatggacggacggactctaactctgcttcatagttgtcatgataacaatattggcatctatcttcttcctctttttcctttttgtttttaaacgtcacttcccccacatgtatgatgtaccctcaattttatttcattatcaatcttgcatcttcgaatcttttttaaaaaaaatcgagtttgcagaactaaatccataattatttctaatttcgattttttaatgtgaaatatttagtggtcaaatatgaatataagtactgtttatggacgaaccatgtgaacatatcatgttttcgatatacaaattatgatattgcattgtgcagtcacaatttggttcttttgagatgttatagttgtatactaccttaatccctagagatacatatctgctatttgaatggattaaagatttgcttttatatagatttaagtaaataattgaaattcttttgtccaaagatatttgttcaagaattatattaatttcatgtaattggaaggaatacaaaagactggaatcttgataatgaatttattaatgcagaatttgattccattattaatggactaccacgtccgaactatacatagttaaacattttttcttcttgtattattctggcgtggtcttacgccacttataaactatattattttggccaaaccaatatttataaaatcgaaataaaacattaaaccgggttttaagtactttgtttgtattattcaataattggttattaaactaagttaataatttcaaaatagtgatttcaccttaaaatatgggaaagagtttcctgatgctctggaatttggtttctttgtcttatactctaactgcggataaaaaggagcgattttgctataaaaaggaacagtttgagatgatattacactttattccggtaaattatttggctaccatcaataatatattcttcaaaactatcaatcttcctttttttttagaaaataaataaatttcatcacaactctgtttgaaaaatcgtttatgaacttgagacggaaaaattatcataattcaacgtcatatagcagcaagagttgaaataaaaattaatggttttgtcttttcataggatagatttcttatttctacctaacaaaaactaaaatttggatgttgaattttgagtagtataaagtttggttgttcaatgttttttgcaagaaaaatcacgtgagaaggaactatttttggtcgtgcaagaaaaataacaccaaagtgtttgaacttttgaagcattgatgattaggtttggtgtatctaacaatattataaaacaaacacatgagatccgactcatagtcaatttagcttatgtcactccttaaatcagctggtttaaccgaaccagaaaccctaaccaaatttttaaaaaaaattcaagttatctgattttaaatttattttctatatataaaaaatttggctgaaagttgaaacgaaaccaaagctagagatgtacattttctagtaaagtaaaataaagtaaacaaattcaatctgaaaccaacaatataccataatatacttacgaaaaccaaatctaaaccggctaacgatatatgtgagtgtgactttatatacgttgcgagtttgaaattcaagcattatttttggtctacacaactacaaatctaccttaatatttagctgccgtctgctccaaacaatgaaacttcatgtttggtctacgatattaaattctttatttctaatattcaattccttatccttttcttcattgatggctttcactattttgtgttcaataaatacacacaaaattgaatgctcaagaaacaagttggtattttcccaggaagcagcatactaactaatttcaatgatcacattcttttcaattcaaacttagtcaagaataaaaattcaaactttgcatctccacgaacactactatatagtcacattctcaactcacaaaacactcacaacaaaattcattatctgccaaagagaaagaaaaccatattttttataaacagagttaaattgttcttaaacatgatgatgaacaaaaacgttctgagttcgattctgttcttcatgttgattggttcggttcttgtcgagagtcgtccgcttggtctaacaaagaccgaggagaagttcgtggctagtttattcgatggcttatcacttggttcgatcaaagactcaggtccaagtccaggcgagggtcataaggtcgtggacaggaaggatacgtttcgatttgttaagcactcaggtccaagcccaagcggaccgggccactaatgtttcaatctttagttcaaaccgggccggttaaagtgcccatacccatctaggtcgagaaaattatttcatttttttgttccagtttcattagtggaaaatattatacatgtctcatgtttctgatcgatacataggaagaagaatggcaaaaacaataattattgtctcatttttctatatttaggattattgttttgttagtgaaataaagttacttgaaaagtatacaaataaaatgtattaatcaatttttttatatttatttgaatgtaataatagttaataaacatcagtgtccaaagtgaaatatgagtccaactgctcaacgaccaataaaggcataaatttttttaaaaagacaatgctttataaatgggcgacgagtatatttaaaaggtttaagagatttaatcgaactattgtgaaagttaagggactcaattgaaaaactattcgcaacgattcagtcattcagcagttgtcgtagattcatttatctagacggttaaaggggtgccttgtgatgtgaagatctttgcctctcgctctcgctttcggtgacaatg

SEQ ID NO: 17796 - DNA, 3003 bp, Unknown
  misc_feature (1)..( 3003): 2750-1469P.txt file - cDNA_ID_1814052; gDNA_ID_1621088; Annot_ID_55411
agtctctttagttttcagtcaattaattttcgtgttttaaaggccacaaagtacccatctggtccatctcgatcccacacacgacacaactttacacaaaaagaaagaaaaacccaaaaacaaaagaagcaatcaacaagaaaatggacctcacccaaatcctactcctctcctttctctttctcactatctccatcaaactcttgctcacaaaatctaaccggaaacctaatcttcctccttctccggcttaccctttaccggttatcggccacctccacctcctcaagcaaccggtccaccgaacattccactccatctctaagtcccttggaaatgctccaatcttccacctccgcctgggaaaccgcctcgtttacgtcatctcctcacactccatagccgaagaatgtttcaccaaaaacgacgtcgttcttgcgaaccgtcctgatatcatcatggccaaacacgtcggctataactttaccaatatgattgcagcatcttacggcgaccactggaggaatctccgccgcatcgccgccgtcgagatattttcttctcatagaatcagtaccttttcttctatccgtaaagacgagatccgacggctcataacacatctctctagagactccttgcacgtacgtaaccaccttcttatttaactcattatttatcttttatttactttggcattactaaaatttaccaaaaaacaaaatatcaaaaatcaaaatttttatttatcgactattgcggttgaatttgtccatgtgagtaggattttccactttcaagccgcccttctttattatattaacacgcatatttaattatttgtcgcttattggctggaaaataatatatttatcagttaggttacttgtatgcatcaaatttgtcacgacagaaaataaaataaaagctctcagtcgtcatagatggaactgaactatacacctttgatatagatctattaaaaattacacaatgtaataaacttgactagtaatcgtcccactgcagggatttgttgaagtggagttgaaatcgttattaaccaacttggcattcaacaacatcatcatgatggtagccggaaaacgatattacggtaccggtacagaagacaatgatgaagccaagctcgtgagggaacttatagcggagataatggccggcgccggttctggaaatttggctgattatcttccgtccataaattgggtcacaaactttgagaaccagaccaaaatcttggggaatcgactcgatagagtcctgcaaaaactggttgatgagaaacgtgcagagaaagaaaagggtcaaactttgatcgatcatttgctttctttccaagaaaccgaacccgagtactatactgatgtcatcatcaaaggaatcatactggtaagttcttattaactaatattatcctccttatatgtggagtgggtttacttattagagatatatatatacacaggctttggttcttgcggggacagatacatcttcagtgacgttggaatgggcaatgtcaaatttgctgaaccatccagagatacttgagaaagcgagagcggagatcgatgataaaatcggttcagaccggttagttgaagaatcagatattgtaaatctccattatctccaaaacattgtgtcagaaacattacgtttgtatcctgcggttccactactactccctcatttctcatcggatgaatgtaaagtggcgggctacgatatgccacgtcgcacgttgttattaacaaacgtatgggcgatgcatagagatccaggtttatgggaagagccagagaggttcaagccggagaggttcgagaaagaaggagaggctcgaaagctaatgccgtttgggatgggacgacgagcttgtcctggagctgagcttgggaagcggttagtgagccttgctcttgggtgcttgattcagtctttcgagtgggagagagttggtgcagaacttgtggacatgactgaaggcgaagggatcactatgcctaaagctactccgttgcgagctatgtgcaaggcacgtgccattgttggtaaaacgatataattgacgtatgtaggatctattgtgtagaaacctatatagtttcttacattccacgtgttcatggaaaataaaagtattctgtggtcaattagttggatgcagagcaatgtcacggcttctatagaaagttcaacagaaccaaaatttcactgtttccatctctccaatgttggtttcttgaaatttagaattggtttggtgacttggtcatgtagtgggcatgtgttgggcctcgtcaaaatgttgtctttctctgcattttaaattaaatacccattaacaaatctgtatacatatgttcttcactgtctgaactagtaattcagcataagctaaaagtataatattttttttttaataaaaggactgttgttaaaaacgaaaagtttggatttcatgttagtgttggtaccgaatctgccacgttttgatgattatagttgtagaaaatgtcaaccaagcaatattattgtaaagacaataatggatggaaatctaagaatttcgattgaatttttatcttatcgagaactttcaacaaaaccttttggattgatcaaatgaaagagacataagtggttatacattagacttgttcacgacactccaatgtagtatgatttttctgtttgtttgtcaaattcattgtttacttgtcttataggaattttccttattttacaaaaacaaaagaaataaaagaaaagaaaattggtgcttgtttttccaaattagtacgctaattttatcactattgtatgcactattttgttatttgactttgtaaatgcatgaattaaagagtgtttaaaaatcagtatcttatactatattatttaatagcgcacggaggagaaaccaaaatatacacaaagttagagaaaaaaagaagagaaaaggagttatatatg

SEQ ID NO: 17797 - DNA, 3000 bp, Unknown
  misc_feature (1)..( 3000): 2750-1469P.txt file - cDNA_ID_1814052; gDNA_ID_2926213; Annot_ID_142072
ctctttagttttcagtcaattaattttcgtgttttaaaggccacaaagtacccatctggtccatctcgatcccacacacgacacaactttacacaaaaagaaagaaaaacccaaaaacaaaagaagcaatcaacaagaaaatggacctcacccaaatcctactcctctcctttctctttctcactatctccatcaaactcttgctcacaaaatctaaccggaaacctaatcttcctccttctccggcttaccctttaccggttatcggccacctccacctcctcaagcaaccggtccaccgaacattccactccatctctaagtcccttggaaatgctccaatcttccacctccgcctgggaaaccgcctcgtttacgtcatctcctcacactccatagccgaagaatgtttcaccaaaaacgacgtcgttcttgcgaaccgtcctgatatcatcatggccaaacacgtcggctataactttaccaatatgattgcagcatcttacggcgaccactggaggaatctccgccgcatcgccgccgtcgagatattttcttctcatagaatcagtaccttttcttctatccgtaaagacgagatccgacggctcataacacatctctctagagactccttgcacgtacgtaaccaccttcttatttaactcattatttatcttttatttactttggcattactaaaatttaccaaaaaacaaaatatcaaaaatcaaaatttttatttatcgactattgcggttgaatttgtccatgtgagtaggattttccactttcaagccgcccttctttattatattaacacgcatatttaattatttgtcgcttattggctggaaaataatatatttatcagttaggttacttgtatgcatcaaatttgtcacgacagaaaataaaataaaagctctcagtcgtcatagatggaactgaactatacacctttgatatagatctattaaaaattacacaatgtaataaacttgactagtaatcgtcccactgcagggatttgttgaagtggagttgaaatcgttattaaccaacttggcattcaacaacatcatcatgatggtagccggaaaacgatattacggtaccggtacagaagacaatgatgaagccaagctcgtgagggaacttatagcggagataatggccggcgccggttctggaaatttggctgattatcttccgtccataaattgggtcacaaactttgagaaccagaccaaaatcttggggaatcgactcgatagagtcctgcaaaaactggttgatgagaaacgtgcagagaaagaaaagggtcaaactttgatcgatcatttgctttctttccaagaaaccgaacccgagtactatactgatgtcatcatcaaaggaatcatactggtaagttcttattaactaatattatcctccttatatgtggagtgggtttacttattagagatatatatatacacaggctttggttcttgcggggacagatacatcttcagtgacgttggaatgggcaatgtcaaatttgctgaaccatccagagatacttgagaaagcgagagcggagatcgatgataaaatcggttcagaccggttagttgaagaatcagatattgtaaatctccattatctccaaaacattgtgtcagaaacattacgtttgtatcctgcggttccactactactccctcatttctcatcggatgaatgtaaagtggcgggctacgatatgccacgtcgcacgttgttattaacaaacgtatgggcgatgcatagagatccaggtttatgggaagagccagagaggttcaagccggagaggttcgagaaagaaggagaggctcgaaagctaatgccgtttgggatgggacgacgagcttgtcctggagctgagcttgggaagcggttagtgagccttgctcttgggtgcttgattcagtctttcgagtgggagagagttggtgcagaacttgtggacatgactgaaggcgaagggatcactatgcctaaagctactccgttgcgagctatgtgcaaggcacgtgccattgttggtaaaacgatataattgacgtatgtaggatctattgtgtagaaacctatatagtttcttacattccacgtgttcatggaaaataaaagtattctgtggtcaattagttggatgcagagcaatgtcacggcttctatagaaagttcaacagaaccaaaatttcactgtttccatctctccaatgttggtttcttgaaatttagaattggtttggtgacttggtcatgtagtgggcatgtgttgggcctcgtcaaaatgttgtctttctctgcattttaaattaaatacccattaacaaatctgtatacatatgttcttcactgtctgaactagtaattcagcataagctaaaagtataatattttttttttaataaaaggactgttgttaaaaacgaaaagtttggatttcatgttagtgttggtaccgaatctgccacgttttgatgattatagttgtagaaaatgtcaaccaagcaatattattgtaaagacaataatggatggaaatctaagaatttcgattgaatttttatcttatcgagaactttcaacaaaaccttttggattgatcaaatgaaagagacataagtggttatacattagacttgttcacgacactccaatgtagtatgatttttctgtttgtttgtcaaattcattgtttacttgtcttataggaattttccttattttacaaaaacaaaagaaataaaagaaaagaaaattggtgcttgtttttccaaattagtacgctaattttatcactattgtatgcactattttgttatttgactttgtaaatgcatgaattaaagagtgtttaaaaatcagtatcttatactatattatttaatagcgcacggaggagaaaccaaaatatacacaaagttagagaaaaaaagaagagaaaaggagttatatatg

SEQ ID NO: 17798 - DNA, 3003 bp, Unknown
  misc_feature (1)..( 3003): 2750-1469P.txt file - cDNA_ID_1814056; gDNA_ID_1621088; Annot_ID_55410
tatagagcataatttttaaaaataatatatttccttgaccacatgtatatatctccaaaacaatagtaaaaaaaagagagacgaaaagaaagaaagagagagagccccacaaacaaacaaaatggatttgaaccaaatcttgatcctctcatttctctctctttttaccttagccatattcttgctcacaagatccaaacggaaactaaaccttcctccgtcgccggcgatctccttgccggtgatcggacacctccatctcctcaagccaccgcttcaccgtaccttcctttccctttccaaatccatcggaaatgctccggtcttccatctccgactcggaaatcgcctcgtttatgtcatctcttcacgttccatcgctgaagaatgtttcacaaagaacgatgtcgttctcgcgaaccgccccaagttcaccataagtaagcacctcggctacaacgccacctacttactctcggcatcttacggcgatcattggaggaacctccgccgcatagccgccgtcgagatattctccactcatagactcaattcgtttctgtatattcgtaaggacgagatccgacggctcatttcacatctctctcgtgattccttacacgtatgatctccttcaattctttttatttattatttgttctgtattcattactttatctttggtttgtcaactaacaaatttattatttattcattactcgtgacgactactttcatatagtacatacttttatatttattgtggtgataaattgtccatgtgactagtttatttttttgaagcattgcgtgtatattacgatactagctatttattcacgaaagtctgatcactatattcataaatattacatagtttattcacaaattacaaatgtacagaaaagcttaattttaaatttatagaaaaagatgcagtgtaggttttaattgtcttaagttggttgaataattatttggttcaaaataaacacattgttctaatatgttaaggtggcgaatatggaaatgcacaaatttttacatacttaccaaaactcttatctgtttactaatattgtattcgtactctcagggatttgtggaggtagagatgaaaacattgttaaccaatttggcatccaacaccaccatcagaatgttggccgggaagagatatttcggtgaggacaacgatgacgctaaactcgtgaagaaccttgtgtcggaggcggtgaccagcgccggtgcaggaaaccccattgattatctttccattttacgttgggtctcgagttatgaaaaacgaatcaagaatttgggaaataggtttgatacgtttttgcagaaattagtcgacgaaaaacgtgcggagaaggaaaaaggtgaaactatgatcgatcacttgcttgctctccaagacattcaacctgattactatacggatgtcatcatcaaaggaatcatacttgtaagtatcaatcaataagaaagtttttatatatatatagagagagtttaatgattgaaattttgtttagaccctgataattgcagggacagatacgtcatcagtaacactagaatgggcaatgtcaaatctgttgaaccatccagaaatacttaagaaagcgagaatggaaatcgatgaaaaagtcggtttagaccgattagtagacgaatcggacattgtaaatctctcttatctccaaagcattgtattggaaacactacgtatgtacccggcagtcccactactactacctcatttgtcatcagaagattgtaaagttggaggctacgatataccaagtggaacaatggtattgaccaacgcatgggccatgcatagagatccagaggtatgggaagatcctgagatattcaaaccagaaagatttgaaaaagaaggagaggctgagaagctaatctcatttgggatgggacgaagagcttgtcctggagccgggctagctcatcggctaataaaccaggctcttggaagtttggttcaatgttttgagtgggaaagagttggtgaggattttgtggacatgaccgaagacaaaggagccacattgcccaaagctataccattaagagccatgtgcaaagcacgttctattgttgataaactgatataaatgttttacgttgaaaaatgtattctatttaatgacatgtttttaattatgtgttttggtcttcaattcgtccttcaatcttttgttgtatctttgaatcttgcttaatatcatcgggtcaatgaagctgggcttgctcaccgggttagtgggctggctcttgcgttgttggtccaatgttttattgattgatatattttttaatgtgattgcattatagttaggttaaatatagtgtttttaatgaagttgtaaaatcaataggtcacgttgagtcgttgacccgtattttatacttgacccgtattctccagtaaaacgtgaagaatcgtaaaaaaagaactatcatatagtataaaattcacatcacataaagtcactacagattcgataataaatgcattgagtcttgtgattctatattttctattcatcgcccccaattaagctacgtaataacagggacataaattgtctttttaatagattttttaagtcggcaagtactgtcttttagatatttcggttgtcctatgtagaaggtagatatgtaaagggtagattaaaaaaggaaatttaccttctacatcctatttagtatatttactatactaaaaaaggaaatttacctaactttctcattgaaaattagttattaccttctctttcaaaaagcagatcaaaatctctatccaaccatttccaaaaattcaagtctctttagttttcagtcaattaattttcgtgttttaaaggccacaaagtacccatctggtccatctcgatcccacacacgacacaactttacacaaaaagaaagaaaaacccaaaaacaaaagaagcaatcaacaagaaaatg

SEQ ID NO: 17799 - DNA, 3000 bp, Unknown; identical to SEQ ID NO: 4007
  misc_feature (1)..( 3000): 2750-1469P.txt file - cDNA_ID_1814056; gDNA_ID_2926213; Annot_ID_142073

SEQ ID NO: 17800 - DNA, 3003 bp, Unknown
  misc_feature (1)..( 3003): 2750-1469P.txt file - cDNA_ID_1814064; gDNA_ID_1621089; Annot_ID_55478
tactatggttatgaacatgagttcttgcttttttttttctttccatcgaatatttgttcatttggatgtctaatagtgtaagaaacagaatttcttagctgacctggatactaaattatgttctgaataatgtgtatctaggtgtatatcattgattttgggcttgcaaagaagtatagggatctccaaacacataggcatatcccctataggtgatttatggtgctttcatgttcctgtttatctacttcttttattttgttttaacttaaattcttacagatactcatgttgttttctttgcagagaaaacaagaaccttacgggcacagctcggtatgctagtgtcaacactcacctaggagttggtaagcaatacatagaaccactcgagaatttgctccaaagtcatatatacaattcctaaaatgtgtggatgtttgcatatctgttggcagagcaaagtaggagggatgatctggagtctcttggttacgtactcatgtatttcctgagaggaaggtttgtgcatacagatccgtttttgtctgactaaatctttggacatgtttgttctggtctaacttttctggattttcgggttcagcttaccgtggcagggactaaaagctggcacaaagaagcaaaagtatgacagaattagcgagaagaaagtatcaactcctatagaggtaaagacataatatggcttagataccattgactgaagttagatcagccatctcattgtcacataaatgaagggttaattgttctaccatactttaacaggtcttgtgcaagtcatatccacccgaattcgtatcatactttcaatactgcagatctctgcgattcgaagacaaaccagactactcatatctaaagagacttttccgagacttgtttatccgtgaaggtttgcatttgctctgttttggttattttttccctaagggacttcacagtacagttctgtgttgtgacattttgttataccaatgctttttttttatgcctggaattgctttttatctttgattgccctcactagttactgtcaaattttctagatattgaaatcttccttgatatttctataaatgtttcactcttttaacgaatggattcgcggtatcaggttatcagtttgattatgtattcgactggactgcattgaaacaccctcagagtagtgccaggtcccattccagtacacatgaaagggtgagtacacatgtctgtagatttttctatcgagtatgactatacatactcactttcgtttcgtattgatctcttcttcagcatcgtaccggtaaaccagggatgggtgcgggaccgtctgctgaaaaacctgaaaggatttcaggtaacccttgacttttttctacagttaagaatcatataactcttcttcgctaaacggtggtcggttctgattttgtgatcctgtctatgtcttacagtagggaacatccgcgataaattctcaggtgcggtcgaagcatttgcgagaaggaacgttagaggacccagtccccatcaaaaccataccagacatcgaactcttgacgaaattccttcaatgaaacctgctgtggtaaaaaataatatcatcatcttatatatatcaaaattttgatatattgttattacattatagaacgtgcttagtgattttaacacttttcaagaaatcaatcttgctcgttcttgatatatcaatttatttgatattgtcagaatatggtatctgagaaaggaagaaacacttccagatacggcagtgcttcgaggagagcagtagcctcaggaagtagaccaagctcatcaggtgaacaaagggagagccgggactcgagccgcgtagcctcaagcggtggcggtgtccgaccatcagtcttccaaagaacccaagcagcagctgctgtgagtggatacgagtcaaagacagcatctgcctttaaccgcgaccgagtagccgcttcaagaacagcacgagacgaggctctcagaagcttcgagcttctttcgatccgcaaatgaagccttcatcaattggctctttgctgtaaattggattcttctttacatatgttgtttggtcctttgtttccacgaaactcccaatttttcatgtattatcaaattctctggattttgtatcaatttttacacactttattgtaatcatgacaatttgttgagtttaattcaatgttacagttttaattttgtgttacatatgaatttatacctttaaattcgacgacgtcgtttccaagtgtataacgtgtacgccaactatcgtcgtttgaaaccgtcaagtttaacggcagcctccgtcggtgaccttgtcgtgacgcagggccttttcctcgctccaacatttaaattctctgaatttcgattgatcaatacggagtacgaagcacgaagatcgatttagcattctagttcatgatgttgaatccgacaaggtacaaacttgattgcttaaaggttatgtttttgccggaactgggacaatgtttagattgtattctcataagtctggtacttcctttaaaattggagtttttgtttgttggagaaacttgacttttagctacataagatttttaagggtcaattttgattgttgttagttgttttgatgaatttgtacagggatgatagtctataataggtttgctctgaatctggattgacccagagaaaaaaaagtgaagctttgtatgatttgttgtggatttatgtggaaatccggaggtgaagatttgcaaggtttctatccagttagagaagaatgtgtagcagatgttcccaggactcgatttaaatcaagggtttgtctttttcttagaccatctatgttcttgatcaatcaaatttgtttcaaagtttgagtatttcattttgggatatgatcaggctggtaaaactcttagtgctagaaaatggcacgctgcgtttactggagatggacatttggatatg

SEQ ID NO: 17801 - DNA, 3003 bp, Unknown; identical to SEQ ID NO: 17800
  misc_feature (1)..( 3003): 2750-1469P.txt file - cDNA_ID_1814064; gDNA_ID_2926193; Annot_ID_141134

SEQ ID NO: 17802 - DNA, 3000 bp, Unknown; identical to SEQ ID NO: 6346
  misc_feature (1)..( 3000): 2750-1469P.txt file - cDNA_ID_1814072; gDNA_ID_1621089; Annot_ID_55476

SEQ ID NO: 17803 - DNA, 3000 bp, Unknown; identical to SEQ ID NO: 6346
  misc_feature (1)..( 3000): 2750-1469P.txt file - cDNA_ID_1814072; gDNA_ID_2926193; Annot_ID_141132

SEQ ID NO: 17804 - DNA, 3003 bp, Unknown
  misc_feature (1)..( 3003): 2750-1469P.txt file - cDNA_ID_1814079; gDNA_ID_1621089; Annot_ID_55472
acccttgatggccgtacacttacaatcccgatcacaaatgtgatccatccagagtatgaagaggtggttcctaaagagggaatgccactccagaaagatcagacaaagaaagggaacttaaggatcaagttcaatatcaagtttccagcgagattaactgcggaacagaaagctgggtttaagaagcttattgggtgatgattaaagcatctctgtcttgtgatgtgtggagattgggataaatttggtaatatacaatttatagggaattatctccctcttcattaaatttcgtgttgttaaacaagtcttctttttaaagaatagttttttcaagatttggtacatgtcctccataaacaaaaattgaagatcacaaatctttttgttatacaaaagtttttcagttcttgtctagagtatgaaattattctttggtaaggggagatccgatgccatgacggcgtgtagggaacgctaggaagaaggcaccacaaatgacgccgatgacaaaaggtaaactggtaagaatctccttggtttcctcggaaggaacggggaataaacaacgggttacgttctgatcaaacatggagactgcgaagaagacgagcattgacatgattgcgtgaataaaatcaagaatcttgagcttatacttttccttctcctcctccgttaaagtaatcgatccatccatcactaatagcccactccacgttgccaacccgtacctaacctgcaacattaagtttggtgcttatgtcaacaagttgttatgaatggtacaaaacagcggaaaatgtgacagagatatgtatatataccttgccgtttgggtctctaatggagtcggtaaaggagaagaggaagcaggagatggcgcataaggagacgaggaagcaggtgagccagcgactggtgatggtgggacactgaccttgatgggttaggaccggacacattatttgaaaactcattacagaaccggttgggagcagatttgatagatgagctgttcctttgaatgttttcctcacaactctctctactttcgactttggttttcttggtgccgacggcaacgatgctatcaatgactgcttcgtctcctccatcttcaattgttttttcgttaatcactctgcaaattcgaatgattatatatgtttcttttttttgtctctatggttaattctgatttgaaagaattgcacaagattttatgggtttcgatttctttcttttttggtgtttgcttccgttgagttgtttgttcaggtttcaaggttgatattctgttcttccatttttatgtttctgttgcatgtcaggattagcaataaaaaacgtaaaaaccaaataacatttgagtaacgaaacaagaaataggagttttgtaacagaaaggattaaactaaaactctgtcaccgtttcctaagaagatatatcattatcaaagttacttttattatattgatatagtaaaactttgctaaactagtaaaaactagtttttcgaaaataatctagattagaattctccaaagacgtggcttaattctaatctgtctaacgtatggaccataaagaattgtattaaattggtctttgaacgaatttattcttcggctaaaagaggttatcggttgtgaagtggacctgcaatttcatttgtttgttcataagaatatatgaacgagaacttaggtgacctctatttcatataacttttacatactgcatactggtaaatcatatgaaatatggacttttaaaacgaaacaaaaatcacgtataaccctattagtgtatatagagtctctgttgtgttgagactctgttgtgttgagactctatatacactaataaaccctttttacttctttgttccatacgaattaagcttcagaataacagaatttaagagaatatcgttattaacagcaaaagtccaaaacaattaaaaggcagagtgcttgtggagacgtaaagggaatgcaaactaagaagaagaaaagtcattatcgttagaggaccaaagacttaaacattattggattaaggtgacatcatagtgcatagtgcgttgtaccatcgcgcaaactcgtgatattcgatcacggattaaagccatgatctatcattttctcttctttccccccttaaatctcgttgttttttcaaatcatagtgactgttgcttttcccatcgaaatgaaagtaatctaacaaaatctactgttagatcatgtttctccgaccaaccaaatttgaccttgtctacatatacacgtggcttcacaaatgcgcatcaagcaattggaacttggaagcatcactatagttctaaacttccaattaaaagattgttagtcaatctagggttgggatcataggtggctaagttttcggtttaacaaattttcgagatcatcgatataaaatcataggatatgtcctcatcacaatacagtatacacacacacataagtgattaagttatgcattcataacattaatccagaagctttatatgcagactcgaaaagtcaacataaatccagcattacatggcccatttgtctccatcattttgaccatcatagcatttcagttgacttggagagtgaccattggtccattctgtttcttttcaaatgaacaattaaatgtttgttcatttatcaaaaaaatattttttataaaattaccttatgtaattattcataatccgatttttttttaatatcactttacaaatttgtttatgatttatatgtacagtagtactttgctccgtaatcgatttcacatggatgtatactattgcctcctaattcttccaatatcggaaaacatgtctcacccatgtcttgtcacagtgctcgtttccctttttgcttctacaattccttataattaccaatccataatttcgttttattcacaaatccaaagcatgaaaaaagaagaataacgattccttttccaaaaaaatg

SEQ ID NO: 17805 - DNA, 3003 bp, Unknown; identical to SEQ ID NO: 17804
  misc_feature (1)..( 3003): 2750-1469P.txt file - cDNA_ID_1814079; gDNA_ID_1621089; Annot_ID_170637

SEQ ID NO: 17806 - DNA, 3003 bp, Unknown; identical to SEQ ID NO: 17804
  misc_feature (1)..( 3003): 2750-1469P.txt file - cDNA_ID_1814079; gDNA_ID_2926192; Annot_ID_141128

SEQ ID NO: 17807 - DNA, 3003 bp, Unknown; identical to SEQ ID NO: 17804
  misc_feature (1)..( 3003): 2750-1469P.txt file - cDNA_ID_1814079; gDNA_ID_2926192; Annot_ID_201178

SEQ ID NO: 17808 - DNA, 3003 bp, Unknown
  misc_feature (1)..( 3003): 2750-1469P.txt file - cDNA_ID_1814083; gDNA_ID_1621089; Annot_ID_55471
atatgaagattagaaccatacctgcatgttatcaagaaataatgcaatttgcagcgcgtttggatattctgcaaacttaatgtagatcatgtaagcaatatctagaaccaacatgtcatctggtcctggaagatacctggaaaaaaacatacaatatcaacgggactgataatgtgcaagataaccaagcaaagctcatgagagcttgtctcatatgaaaataacataattaagggtgaaacgccagtcgaatgaataagctaaacatattgaaattactttgctgcactcgtgagatagttgcacgtcctcctgaaatttgtattgtcaacatgctcaagtaagagatcaagatcctcaacatccattaaaaggtcaacagcttcggtttcggcattatgctgcaaagaacaaaagggaatccttcaaaaatgtgaacaaaacaagaggcgcaaatttcacgcctatcaatgaaacttatattaatatacaatggaccccttgttattacaagaaaagtaagaatgacaaggatctcaccttcatgtgaaaagaaacaatttgctgcacaagatccattaagtcttcaatagaggactcttcaccctgatataacaaaaagaatgagcattataaccatattcagtaacgagcccattgtcataatattcattaacaaaccataatatccatgacgttgccagaatatgagtgaaactcctcgagctaaagaacattgccaaagaccaaattgtttactaacctgacgtattgtatactcttttgcaatctctccagccaaattcctgacatactcgtgaccccacgatccgatgtcactctctgatccattcaacctatagtttaagctttcctgaaagagtattgcataacaaaggatcagcaacaaatagcttaagtcaaattctaccaagaaccacaaaacacaaatctggtaaggcatatcataagaggaaaacaaaagggaatctagttaaatgaatgtgaagcaaatagcaataggcaagaaactcctacaacagtagcaagaaagcataccctttcaccttcagcagacatggtcagtgccaggacagaaagtatatcagccaacattttctgcaaaaacgagtgcgatcttataatccagactcagtagaacgactaagacggtgttgatgagaaatgacttaaaatgtttgaaatcgtactttgagatcagactctgccatttttgcatgaaattctttaagaactccataatgagggcggagaaacttgaggggttttggaactgatgtcatggagcttgttgagtcacgaatttccttcctacataccaaaagagatcgatcaagattagactatgaaaacagtgaaagcactaaaagcagcaaaagaagtgtcataagcccattaaagaaactccaatagaaaattatcagaatatttgcatctaatcaaatcaaggatgggtttaagagatacaaaaactacctcatgctttcaagagcaatcttctgtaactcaggattggggtcctgaactctctcaacatagagctccagattctgctttagttgcaagtcctcttcagactacaataacatcatatgcaaattgagtcagctgccaatcaaaccagctaaaaccatagccatagtacaaaagattcctattaatttaactccatgtgacttaaaccctaacaagaattgtatcttcccagaacgagttataatgtggatttaaccaacttcttaacctcgctttctaaatagcaatgcgacattcacaatatatcagctaaaccgtacatctcggaaaatctacagcttaatcgtgagttttttccgatctccctggattctttctaactcagctaagcacgattccaactaataatcgaaatcgatataaagaaaactcaccagatcctcttcctttttatcatctttcttcttggaatccttagaaggaatcttcgtcgtagcttcgtcccgcttcgcaccaccgccaacactgttcggatccggaactggagccattgtaagtcagactatcacctgatcaaatcaacgaatccaaacaatgagtatcgaaattcgtaaaactcggaagaatcgagcagcttctatcttatgagctctcgcgtaaaccctaagtctctctggaatggctcgttagagaagaactatgcttttcttcaggaactgtagcaaaaaggttcaactgtaaaaaataaatactatcagataaaaaaaagtacttatacggaagaagattacccctcgatcaagaattccattgtgggctcagcccataataaattgggctattcattgggccatagtattctactatggtctctatataaaacaccttgtctttggcaaacatctctatatataatcaacactttaaaatttattttatttgggcgatatagccaatcacaaaataaaggactccaaaaacatctattttatcggatttacatttgatcaatttaaattcgaagcaactaattcgatcggatttaaattcgaacaacataataatagcaacatttatataaatacgttacatgtcttagtcgacatgttcttttatggtaaagttagcaatattagtcgaactcaaacatataccttcacataatgaaagaggaaataacatttaattgtttttataattaataatataaatgggagaatctgaattacttgagcgataataaaagaagaaaaggaaaagaaatggagaagggaagaggcaagatggcaaagctgtgatttaaaacaccgtcacctccccgtcaacggagacaaacaaagatcgtgttttctcgaaccttccacgagatatactaagccaaagaagaagaagagacctgagacgaacaagaaatccagaaattaccaattccttttttttgtttaatcgaattcaggaaaagtgaagaaacgaaagagagaagacaaagaagaagaaggtgagatg

SEQ ID NO: 17809 - DNA, 3003 bp, Unknown; identical to SEQ ID NO: 17808
  misc_feature (1)..( 3003): 2750-1469P.txt file - cDNA_ID_1814083; gDNA_ID_1621089; Annot_ID_170635

SEQ ID NO: 17810 - DNA, 3003 bp, Unknown; identical to SEQ ID NO: 17808
  misc_feature (1)..( 3003): 2750-1469P.txt file - cDNA_ID_1814083; gDNA_ID_2926192; Annot_ID_141127

SEQ ID NO: 17811 - DNA, 3003 bp, Unknown; identical to SEQ ID NO: 17808
  misc_feature (1)..( 3003): 2750-1469P.txt file - cDNA_ID_1814083; gDNA_ID_2926192; Annot_ID_201176

SEQ ID NO: 17812 - DNA, 3000 bp, Unknown; identical to SEQ ID NO: 6335
  misc_feature (1)..( 3000): 2750-1469P.txt file - cDNA_ID_1814087; gDNA_ID_1621089; Annot_ID_55470

SEQ ID NO: 17813 - DNA, 3000 bp, Unknown; identical to SEQ ID NO: 6335
  misc_feature (1)..( 3000): 2750-1469P.txt file - cDNA_ID_1814087; gDNA_ID_2926192; Annot_ID_141126

SEQ ID NO: 17814 - DNA, 3000 bp, Unknown; identical to SEQ ID NO: 6334
  misc_feature (1)..( 3000): 2750-1469P.txt file - cDNA_ID_1814093; gDNA_ID_1621089; Annot_ID_55468

SEQ ID NO: 17815 - DNA, 3000 bp, Unknown; identical to SEQ ID NO: 6334
  misc_feature (1)..( 3000): 2750-1469P.txt file - cDNA_ID_1814093; gDNA_ID_2926192; Annot_ID_141124

SEQ ID NO: 17816 - DNA, 3003 bp, Unknown
  misc_feature (1)..( 3003): 2750-1469P.txt file - cDNA_ID_1814105; gDNA_ID_1621089; Annot_ID_55464
agagaatgctataaggaatgcctacagatcaacagatgccgtgatattgcagcagtcccttaagcttggtaaaggcggatcaacagctgtaacgggaattctaattgatggtaaaaagctagttgttgctaatgttggagactccagagcagtgatgtctaagaatggtgttgcgcatcagctatctgtcgatcatgaaccaagcaaggagaaaaaagaaatagagagccgaggtggctttgtgtcaaatattccaggtaaagctacataatttgttctaactagttatgcttttggtcttcttggattaagtattaacgttcctaaaatgttgcaggggatgttccacgagtggatggacagttagcggttgcaagagcatttggagataagagcttaaagttacatctgagctcagaaccggacataacacaccagacaattgatgatcacactgaattcatccttttcgcaagcgatggtatttggaaagtaagtttaatgactcagtatcttactctgtttctaaccgtggtttagccagtttctggtctacttcttctaacatgatggacgatctttaactgcaggtattatcaaaccaagaagcggttgatgctatcaagagtatcaaagatcctcatgcagctgcaaagcacttgatagaggaagctatatctaggaagagcaaagatgacatctcatgtatcgttgtaaagttccactaatcttctcttcttcttatcaaaagctattttgtctataagttaccatcaagttgcaagatagagaaatatatgctcaagctgtgtctgtaaaaacccagtaatgaggtttcccagaagatgtaatatattatcgaaatcgcaacagccttaagatacaaaagaaagaactgaaattaaaaaaatgaaataaaacaaatcgcaacagccttaagatacaaaagaaagatgttcttcgtagttgttgtcatcttcgaatctcctcttctctgcagaaatagaaaaacaaaggacaaagtatattgtcagctttaacatacaagcaaaaaaattgtggtggatcaaaggaattaatggaacttacaagcgcatgtgtggtctctagacatggggaagtcagaactgaaatgacactggtcggaaagagccaaaacgtctggcttgagtgattcgatggatgtggtcagaaactccatacaccggcaaagcctgcgcctctccttcccatgcttacggcggcactgaaccaacggcaacactctgcggtgggcggagactcctgatggacgaagaacatcttgcactgttctagcatcacgttcgccacgtctacacactccggtggccaaggacggtacactgcgtcggtagttgtggctgcaacaagaagacacatcattgcaaacgctactttcatcatcatcctagccaaaatgtagcaattgttgttgttttgtttttgtgttggtcttattttatctctacctaacgtaatcgtgacactatcttaacagaaaattcaacttagtaacgcatgcgagattttaatgctttcggccgcgtgggaactatctaaaatttaaatataggcgtttctcgtatttgaaattttaaatggaccattaatggccatgttagtgtatgtgtgtggtgaaattgcgaactacatacagataacaaaaaaaaaagaaaaaaaatctaactttcttacatatgttagttttggaaatgcgtaagaccatatatcacaaacttgaacaattgtgttttatgtataaaaaaaaaacatgaataaatgtgttattctaaactcccatttccaagacgattaaagaaaattgggttttcaatatcgaattttatgttaagttatgaaggatttaaataagttttagagtattttaattagtactgtatctgtatgtaagtaaaactacaattaaaactttgagaaaaaaaaatcaattatacagaaaaaaaaacattcagaatacgttagaagtgggaacctcaatgttactcgtaaccttaaatggtcaccgaccattgcgcggatctagttgtttttatcgtggacgtcaaaaaacccttttttaaaattacctctctaatcttttgacgggaactacacttcgttccaatggccattgttttctcttaatttttgtttaggctaaacaacaacttcaaactgacctcaaatatctgttacaaaagttctgaatccacagaggatttaacttaactaggcgggatagaatataatttaggatcatagttaacaaatgaaagagacacctttgtctttctatccgaaagctcatttaaacctcggtatatatgtaaacattactttgacctccttcacaatgttgagcagattacgtgtgttttgaaggattggttttagggctggccattcttcatctgcatttagcatcgttacaaagctcattggaattcgaggatgactttttgtgttgaagttggctacggttcccacttgccttttttctctcttattaaattgcccattcacgaggtattgtagttttttttgtttttaacaataattttaaaagactctttataaaaagaaagaataactaaaagacaactataaaattagacacctctcgtgaatgcctgaatgacccatttcgtattgatcaataacatgaagatataaagacgtaccaataatcatgtatattttacggattaatctgtgcttatatatatctaagtgataatctaatttatgtttgtgcttgtcgctagtggcttatgggtagcatttaagtatgggttagtgcttgtctgagttgtgtctatgaactcgagtgatcgagcgcacattccaaactgaacacacaaaaaaagcaaaaaaaacatctaatttatgtttcatgcttatatatatgattccactttcacaaaagaataagcacacaaaagaaaaaacaaaccaagaggaagaagttcactcggagcaatg

SEQ ID NO: 17817 - DNA, 3003 bp, Unknown; identical to SEQ ID NO: 17816
  misc_feature (1)..( 3003): 2750-1469P.txt file - cDNA_ID_1814105; gDNA_ID_2926192; Annot_ID_141120

SEQ ID NO: 17818 - DNA, 3003 bp, Unknown
  misc_feature (1)..( 3003): 2750-1469P.txt file - cDNA_ID_1814115; gDNA_ID_1621089; Annot_ID_55460
ttcggtgtaccggtttaatatattgattaaagttaaattgttcaaaccattcttatatgtacaaaaagtgtataagatctatttatatgtttcaacaagattttagtttgtgtggagaagttttattgcatgagctatgtgaactctacatattcgtcgtatatattcatattagtgtgatcataattaaaacacaaaataaaaacattcgcatctaatcaatacaaaaaaacatcttaaatattttctttagtaagaacaaaaacgagacagcggaaacattaaaaatgggttacaagatgcttcaaacatacaaataaaaaggcacataaatatgaaactcaatggtagagtaattaataccctcacaaatttaatgactagcgacaatatataaacccctcaaaacagagaacttatcataatcacaagaaccaccatccccggaccaaccaaaccggccgaattgggagctgtagccggtcctggagctggaacacgagagtttgaatcagatgatggttccactcctggagaaggccccggcgaagacaactcctgatggaccggagacggggagggagaggtatgacgaggagagtggctgtggtggacggtggacaagaccttgacggctagcttctgacctttaagacagttttgagagttgccactaatgaaaaagtaggaacctgagtggctaagtaggaagagagagtctccgtctgagagggaagtcagggggtgtgtcgtgttgcatgtgttgtactcttgttcagtcacctccaacactgaatcttttcccttggcgtacttaaaatcttgtaaaaatcaaaattactatgcattaatattgacacattgtgtatatatagtagagaagaggaaatagacttacgaagagtgtcgttgacttgaaaccggtttcggtgagaccaatgagaataatcttcggaaggagtcgggacccaaccatctttcccaccaacatagaacttgtatccatttgatatcgtaaaccctaaacccatcaacatcacaaacataaggtaaagatcaaacctcatgaccaaacccatctccgatgcaaaacgttaatcaaaccccaacttcttactaactcttttgaagtgagtgtgtgtgtgtgtgtgtgtttgcaacctcaagaggtgcttatttatggtgaaagtaaagaaaacatagccgttaggtcaagctttttgggctgtgcatcgattacctaaagaaatgcgaattaagtagaagcgttttggttttgctcctgtcttcttttgaacacgtctcgacatgcagtggacttaacggctatctacctttaatttttcactttctttctcacaaacaaacatttctcactcagatcttgtaattatttagccatcaaatataaaattgtaatcctttagtatttattattatttaaaacttacgttacatattgttttattttatatttcaatttacaaatcgataaatatcccagtgatacaataataaaattttagtgggcctttcaaatggattgggtatgttgtaagaaaggctttgcagtttcttctcctctacctttaaagcccaactattagtagaagactgaatcctttttgattgtcttgtagtttacacaatgtacacaatctttctcctaattttatactctttctcctctacttttaaaacatcaactactgtagttggacaatattagaaattgtttactttctataatgaggatttagtgggggtgaaggatctaattaaatatttgatgatcgttcctaaactgtgagatcgaaatatacaaatttctacttatgttttagtccaaaaaaaaacgtaatagattggtacaaatcctttttgaggaaaaaagaagttttaaggcgtaaagaaaagacctgagaatatgaaacctcaactaactaatttatcaattgaaccttccttcgtttataacagaaaaagctaataaataaaaataaaaataaaaatcagagagaccaaaaagaagtttcgacttgttcaacaattgagttattgaagaatacgtttgattgagaagcttcaacgaccgcaattgcccaaattcatcaattggagttttttataaaacaaattgcatcttaaggttgttattgttgttgttgtttatctgtctgtaatcatctttctatctgctgtctgatacatctacgaatcttatgctgtcttttgggttttcttacacaaccaaaaccaaagcctagttttgttttgacttcatttgaagcaaacctctttctttcttcagttatgtgggtttttgagctagactcgaatcagttctgatccagtcggattttgtattgagtcataaagaagggatttttgggggttgtgagtgatatgaagaagcgggaacatttgggattagggttcttcgagtggcagattatcttatggttatcgatttggttggcgatttcgcaacaagcgctgggattgagacctattagggagaaacctcgatcatggagtgacgaggtatgtgtgtgtgtttttactttattgatgattgttcgaaagtttcttcatttcgatgtttcccagaaacatatttttatgttttgttcgtaattttgatgtgcctttccaactaagaattcgagcagtttgctgtcaaatgttttttttattgacttgtttctgctcatgatttgctgaacgagaactggtcataattgatgattttttttctaagtctgagattttctgagtttcgaagaaaatggaccatattgaatgaaaatcccggagtagagcagctctgatctaagttttatcttttgatttgattgagcaaagctgaaaatgtatataaactatttacattagctcgattgagctcatcggtatctaagctttgttctgccggcgaatactttgagatgaataagaatgaatctgtcgttagtagtgtggtgtgatgagactacaataatg

SEQ ID NO: 17819 - DNA, 3003 bp, Unknown; identical to SEQ ID NO: 17818
  misc_feature (1)..( 3003): 2750-1469P.txt file - cDNA_ID_1814115; gDNA_ID_2926192; Annot_ID_141116

SEQ ID NO: 17820 - DNA, 3000 bp, Unknown; identical to SEQ ID NO: 6330
  misc_feature (1)..( 3000): 2750-1469P.txt file - cDNA_ID_1814119; gDNA_ID_1621089; Annot_ID_55459

SEQ ID NO: 17821 - DNA, 3000 bp, Unknown; identical to SEQ ID NO: 6330
  misc_feature (1)..( 3000): 2750-1469P.txt file - cDNA_ID_1814119; gDNA_ID_2926192; Annot_ID_141115

SEQ ID NO: 17822 - DNA, 3003 bp, Unknown
  misc_feature (1)..( 3003): 2750-1469P.txt file - cDNA_ID_1814123; gDNA_ID_1621089; Annot_ID_55458
ttatatagtatatctaaaggggaaacattcaagcagaccaattattcttttgaactaccaaccaatgtcattcaataatatctgaagacaaagcaaaccaattcaaagtaacaatacttaaagatgtttgagaattatactcaattactcattgtggatcaagagcattggagtatctttttgtcaaatatgcatcattattactttgaaaactatgcattgacttagattgagtaccttcttacacttgttattaatgttgtattctgaagaattggtgcaactcatcacctatgaagcttttttacttacccaacttcagcttggaccatacctaatcacatgcacttactccttacacaatttttcttcttcttcgtcgtcacattcacaatatatctgtttcacaattactaggctatcatcatcgtactctagtatttggcatctcacatagtttaaatatatttatatcaagtattcagctgatagaaagttataagttagatactgtatttaacgttttcactaaaacagaaaatgagccattgatggtaatcagtaaagcccaaatgggccttcaaacccatattatagttgaggtttcagaagctcttccacggaagagacagagaatgaccgacaaacagagagacgaccaaaagaagaatctgtgttctctctcaaagaaataaacaaaagaaatgtcaataacttcacgtgtcggtattgtgacgtggaagcattcgttttgacatcatcagagaacacatcaatccaacaaagaagatcgatattttcagattcaagaaatcaaatcttgttaaactaaaggacaaataatgaagaaagatttcaatatatacacactttttttttggtatcaatgttaagtttaaaaaaaagaagacgcaaacatgcaaagaagggaatcgaactcaacacccaaaacttgcatggggtgttgtactattttacaacatataccataagataagatgtcaatatattagttatgaatgttttcgttaatgacaaaatgcaaaaactgaatcaagaagatgaagagtaataagagttaaagaagacaaagtaagcaataacagcacaaagaagagccacaaagtttccttctttaagaagaaccttaaacacataaccagcaatttctttcgtcactttccttccttcaatcaccactttcttcctcgactttacggggaacgctattgtcaccactaccgatatccagatcacaacgatcgctggcacagcgatgaacagagctgccgccatagatagaactccgaacaccgcaccaagaagaaccgacgcgtaaatagcaggcaaaccagatgatgtctgatgattctctccgtaccaattcactatcgaattcaacgaatttcttgaagaagacaaaaggaccgcgtagactacaagaaacagacagacccatgttctcctcttgcttatgactctcaaaaacagcttgtacgaggtcatcgtctcttgttcttccttatccgccatatttgagaacaccagattttcttatgattctgtgttggaattgaaactttgattaaacctgaaaaagagaaaagcttcaagtgggaagaagatgaagaaaagagaagaaccaaaagcaaagcaaaaggagaagaagaagttgtcgaagaagaagagtcaacagaagagatgagaaagtcaaagatgaggctattgggctagagtgaagcccacatagtaaattagtaattgtgtgttttggttagtaaatgggctattattagagttgagcccagattttgtgcatatggtgtgcttataattaagctaagctagagtagctaaagagtagttgttaagaggagttgtggtgtaaggtttagtagtttaacgttacttgtggttttagtctagtccttaggaataatcatgtctaagtgggagtagttttaaagctagaatgttaagtgtgtgaatgtgtatcttgtggtgaaataccactataagtatgtgtattgtgtcttgtagagttatccttgtgatccattagtacaatgtagacaactaaaagaaaaaaaagaaaaaatcgtttcttgtgtttctctctaaacaataacaaaaacagagagtgtaacaatgagagagagacataaagaatgagagttctaacctagtgtaaaagggaggtaacattcggtgtctggtttggtaaagttatggtaaatagtaaaacaatatttgcaatgttgcacactgtcaacatctcccaaacgcaccgtttcataaaccaaagtgattagtgattgattagtaatacttgcactgttgcacatagtaataagagaatatcaacttcaatgtttttgaattgaacaatgaacctaccaaaaaagtagttactgttaggcatttgacatgatgattttaggattaatatatactaggtcctattaatactatgatgcttacaggtgacgaataatttgagttatgtgcgatatgtttgaaagaattaaagaggagaatcaagaagaagatgaatatttgacatttcaaagctgacttttttgacgaataagttcatcattattcacacctataaatgtggacagcgaaataccaagtccaacaatttcacgattaattccaagtggcttggatcaagaaatatacaaaaacaaaattccaaatgcttaggaaaataaataaacgagagatcaaattatcacggcggatattatttcgtccacatttgttgttcaaacagatttctaacacatataattagcatatatacattaaacaacattatctccttaataattttgactctggaacagatctttccagtttcagacaatatatttgaacaatcggttcgttgaatcgagaacaaaccaatcaaatctcttttgacaaagctcttcttcttcttcccataaaacttcacaacggcacacgtctacgaaaaaacctctctcagtcatcatg

SEQ ID NO: 17823 - DNA, 3003 bp, Unknown; identical to SEQ ID NO: 17822
  misc_feature (1)..( 3003): 2750-1469P.txt file - cDNA_ID_1814123; gDNA_ID_1621089; Annot_ID_170618

SEQ ID NO: 17824 - DNA, 3003 bp, Unknown; identical to SEQ ID NO: 17822
  misc_feature (1)..( 3003): 2750-1469P.txt file - cDNA_ID_1814123; gDNA_ID_2926192; Annot_ID_141114

SEQ ID NO: 17825 - DNA, 3003 bp, Unknown; identical to SEQ ID NO: 17822
  misc_feature (1)..( 3003): 2750-1469P.txt file - cDNA_ID_1814123; gDNA_ID_2926192; Annot_ID_201159

SEQ ID NO: 17826 - DNA, 3000 bp, Unknown; identical to SEQ ID NO: 6358
  misc_feature (1)..( 3000): 2750-1469P.txt file - cDNA_ID_1814140; gDNA_ID_1621090; Annot_ID_55495

SEQ ID NO: 17827 - DNA, 3000 bp, Unknown; identical to SEQ ID NO: 6358
  misc_feature (1)..( 3000): 2750-1469P.txt file - cDNA_ID_1814140; gDNA_ID_1621090; Annot_ID_170679

SEQ ID NO: 17828 - DNA, 3000 bp, Unknown; identical to SEQ ID NO: 6362
  misc_feature (1)..( 3000): 2750-1469P.txt file - cDNA_ID_1814162; gDNA_ID_1621090; Annot_ID_55488

SEQ ID NO: 17829 - DNA, 3003 bp, Unknown
  misc_feature (1)..( 3003): 2750-1469P.txt file - cDNA_ID_1814174; gDNA_ID_1621090; Annot_ID_55484
ttcttttgaagtcaaatcccgagcttttgttcagttctgggtcatcaccgcggttttggatgaatcaaccagttcctggttcgagtatttacgatcgagtcaatggctctatgagcgaggccctgaagtctgttgttgtcaaggaaagtgaaagactctatggagaagaattagcagtaactgttcttgttactggtaatgtggagaaattgaataggttagatgttgggaacaattgggattttctagatgtgtggttgcatataggtgcatactcgcctttaggcccgttaggtgttggagaaaatgccgcgagtttggctttggttggtcgtggacgagatgtagctgctgctaaatactcagactgggttaggtattgtgcttgttgtgctcatttagctgattcttgaggatactgatagctcaatttttcagggatttagcttgtggattacttgagttttgttgtttctttcttaatctcggtatggtttatgatttaggcaggcttaggaagcctctggagaagtttagacctcctttgaccactgaacttcttttgtcaaacgatggtgatcatttgcttgagggctgcatcacaaactttttcgtagtttgccgcagggtactaacaaaaatttgatttttttttgttcaagcacaagtcacctatgttgtgattaggatgtttattgtcttcatttatgttgcattttagaagtttgaatttcattttaccactgcatgatttactgtttgatctcattttaggtgaagtcatcagagaatctctacggcgggagtttgagcgagtttgaggtgcagaccgcgcctataactgatggtgtgctagcaggagttataagagaccttgtcatcgagtaatatgttagaccattaagaatgttgattatattcgtctgtgtttatggcctgatcaaccaataagatttgcttttctgtcagagtgtgtttaagcgaggggattccataccgcgagagagcaccttcgtggtctgagcgtgagctttgggaagaagccttcattacaagtagatctttccatatccataatctgttttttcatcttctcgcatatatattggcctgaacactttcaatgtgttgtgtgatgtttgtatattttaacatcccaagaactcactgggttcaggtagtctgaggattttgcagcatgtagggacgatcaaagtacccgttggttcaatggagggattggcttgtaacaaacctgaggagattcaatggaaggagaaaaggtttaaggaaagacctgggatgatcactgaattaatcaaggtaaagcttgttacttttattacccttagaatcattggttttgttcttgtcttttgagtcaaatcaaagatagaaatcactttaaagtttttgtttgtcactgttatgttggagtagaaagcgataatggagagaggtattaaagaagggttcccgttgaaggccttttagtgctcttcatgattttgccaaatagctgaaatgttgattcgtctatggtttgtaattgtattgacgccaatatcttcccaaatcatcactcattataattttaacgatctgatgtttaaaaggttctcagttatatatatctgtataattgatcagtagaacatattatttaacggattttatggagatactccggtaacttattaaacagatctcatgaaagtaatcagtgtcaagaaatgtcaagactgtatacatatgttaatatgctaaaccacaacgactatcacttcccaaaacatggttatgatgttgatatgaccctccaaatccacaagtgtgtatgtgtatcaacgtcaaagtattgaatataaagagttgtgagtactaaaaataaaagcaaactaaaaatatagtccgtatggaatgcctttaaaactgcttgtagtggaggaaaatagaaatttggaggacaccaaattttccccctttttttttcttttttttttctagtaaatcaaattaattaatatcataaaaaagattagatgatatataagcatcttttttttttccgtaaatcaaattaattgatattataaaaaagataatggggtgattgacatcgcattgtcaagactttaaaactatttaacaaatgataaatcacattaattgacaccatgtatgttttggatatgtttgataaaaatagtttactagtgaaaaaaaaaatatgatccacacccgagggagtagatttaatttttttttttcttcagaaaatcagctatacattaattatgtattctgacttaataattggtcgggtttgcaaatcttttatttttttggtaaacatgtgaagaaaaaaatagaaggtttgtaaatctttcaatattgtttgtacattttccataaatctttcaatattgtttgtgcttcatcaacatatagtcaacacaaacaatgctacgctcttatgaggttctgcaatatgagtagcttggacgaggtttctgatcaatagatctgttataatattataaaacatatcgattctaacagattttcaatggatatataatccgataactttttagacacatctgatgagtgatcactgtaaaaaaaaatacaaaaaaatcaaaaccatgtgtatatatgctaaactacaaatataaaattaccacacttgtacaatatataataaaaataaacatcataatactaataattacgacactattggtcttggtttggtttatatgcacgactccggctttaaacaataaatccaggagcatgacacttccacgtccttggctagatctaagtttaagtcaacgatgactcatagtggacacgtgtcactcgttcattcgagttatccacgtgacttcttattacagtcttcttgactctttttttttttttttttttttgctgaaaattataaaaacccaaaatccaacaaactttgattacacacacttacatacaacaatg

SEQ ID NO: 17830 - DNA, 3003 bp, Unknown
  misc_feature (1)..( 3003): 2750-1469P.txt file - cDNA_ID_1814178; gDNA_ID_1621090; Annot_ID_55483
tggtttgaattcgttctatgttttataaaattgacaaaaacagaaggcccttcttagtttctttacagaaagtctatagagtctccctctttcatgaataacaacatttatactacaaccgtgcaaaatgaaaagtgcacaccttaagcagtcatattatcggggtctcacgaaaagccaaagctaagtcatcagtcaataatgtggtctggttttggcagactacaaacttgctgcacgtacaggttggaggtttccgacttgcccactaactagaatatcaaatgtagcaccatcgggtaaaatacccttgtcaagcatctcatcgtgaagtctaaaagcctcatcgagatttccttctctataatgtccggcaatcaccgcgttgtagataaggacattcggagtgacattattcttcttcatctcctcaaacatcttaaccacttttacaaactgccccttcttgctaagaccgtttacaattactgtgtaaatgatttcatcagggacaagacccaccgcctgcatttctgtgtacaactcagaggccaggatcaaatttccatctttcaacaatccatcaatcagtgttgtatatgtacccagatcacatcgtagaccgtctttcaacattttcttgtacaaatcaagggctgctaccatgtttcccagattacgaaatccagaaatcaagctgttgtatataggttggcttggattcaatccttcttcaaggagttcagagaacagagcagatgcgctttccatgttactccttttgcagaacccatcgataagagcaccataggctggaatatcgagtttgacacctttgttcttcatttcgtctctcatttccaatgcttgatccattctgttatttttgcataacccattcatcaagctggtataagttatgacgtttggagaaataccattgccacacatctcttcgtatgctgcaaccgcagaatccatttcaccctctttgaaaaatccatctataatgctattgtaactcatgcaactaacacataaccgtttttcttcgatcatatttgccaacaattctcttgctttggatgtctgaccaactttgcataaaccattgataattgtttggtatacaaccccgttgacttcaatattggaagaagtcatatgattgacgacttccaaagcgttttgttcatcatgattcctgaaacatccatcaatcagaatggaatacgtgtagttattcggctttagacccttttccagtatatttgaaaaaacaatacgagccaagtccatgtttttctgtctgcagtggccaagcatcacgttattgtaagaaactacattcggtccaatacctctactttccatcttgcttaataactctgtagcttcgtctgtcttaccttgcttgcataaccaggataatatagtgttacatacaaacacgtttgcaagaccggtttcaaaagactcgtcaaagagtttcagtgcctcttcatgtttctgacctttcaaccacccttgaattatcgtgtggacatgaaagacagaaggagtaagacctaagacttccattttcttgtaaaattcaagcgccttttccatttccccgttcttacgaaaccattctatcagaaccgaaaaagtaacgctgttcggagaggggccttccttttccatcttatcaaacaaaaccaaagcactaaccaagtcattgttcttgcagtgtcccgtgatcagactcgtcgcagcaactacattcatcgatatcccatcactcaacatctcatccttcaatctaattgcatcatccatattaccttgcttcacagaagccaaaatcacagaagtataagtttcctgcgacgggacacacaacttcttctccttcatctctctcaataaactattagccatagccaaatcaagcgtcttgcaacaagcctgaacagcaagactatacagtaaactatccggttctgctcctctctcaatagctctacttaaaacctccaaagcctccgcaggcttttcttctctcaaactagctctcattaacaattgcgttgttacattatcaccatcaacaccaatggcaaccatcctactgtagagttccttagcttcagttaacgaattcctttgaactaaagcactcaaggtcctattcacatatggaaaaaatggaatcacatctagttccaacatctggttgacgatatccaccgcatgatccgtttgcctatctttagaataagcattcaataagtaattaaaagctcgtgaattgacttcaaacccaaatgatttcgccgaatccaccaatttactgaccaaaacacttgccattggagttggattgctcgtagaaacgtaccgtatgagcaaatcacttgcacgtccataggtctcaggagaactgaccagaatatgaatgagtacccagaagacgtcaccatcttcaaaacttccacgccatggtctagcccaattatagaaacgaagagcagcttctgggttgttcctgcgattgagaagaacatcgattacagatgcatcgtccttctgttcaggcttcgcagacaaaagactcactttggaggtaactgggttttcttcagaagtggatccgtaaactagtagtctctgctcttgacttggattctcagattctttgggaaactgagactgtgaacaaaagggtttattgtttctcaagttacgaagacgaatccgtgaagggatttttctaaaaaccaataaagatctcatctttcgaggttcttctctcaactatcttcagcagagaaaagatgatcggagaaataaataaaagagacaacttgaaatcccgaagatacaccaaaaaaaaaaaaaaagaagcttaaaccctaattatgtctattaaacggcgtcgttttggggattattcctttttaaaaacgttctcttttcccgttttatctaatttcctcaaggaagagagaagcaaaaatg

SEQ ID NO: 17831 - DNA, 3000 bp, Unknown
  misc_feature (1)..( 3000): 2750-1469P.txt file - cDNA_ID_1814194; gDNA_ID_1621091; Annot_ID_55527
tttgtgacaaccgaaatagtgtcaagaacttcatatcactcggtggattactttatttgattgaatcttagttgataacgaaatcctttctttttctatgtatttcgattattaatgtaatcagaaaattttaagtattttttcacgttatccaactttgagagtactgtccttgtgttggccaataagtggttgaatatatggtaaaagtataaaagctcccatcatgttggacctactagctttgctatatataaaatgtcctgtcattgcataacgtaccactttctgaatctgttttacgtgcctatcaatgatttgtctttaacacttaccgtaatattctacaattaagttcaagtgcctagattttctaaatgtgtataaagacattatatatggcaaatgatcctttagataaccatttcatttaaatcaagcattcgattcgcattcatagataaaatactattcaccggtccagttctaactagccatccagtctggttagaaagcaaaattgtttattttattttaggttcagttttcagatcggttttctaacactgttttggtttggttctcgtatcggttcaaccggattggatagtcataaagaatttgaagtccttaattaagcccaaaacaagtagagcccatatatatactaacaaagccgtgattagggtttttggttttcgtcagaagatttcaaggtttagggtttctgcaattcaaccatggcagagcaggtttggatctacattacattgtctttatgttataattggggattgctagttgttggattctcgttttctgggttctttgattttggcttttaatgatggattggtgtgtttgcagacggagaaggcgtttcttaagcaaccaaaagttttcttaaggtaattgtcacacctcaaaaattcaactgctttgtattttggctatggtctctttatgcttatgattcaaatgttctatcagctcgaagaaatctggtaagggaaagaggcctggtaaaggaggtaatcgtttctggaagaacattggccttggtttcaaaactccaagagaggctattgaaggtactgtttttatgtctcagctctcaattttgctttaccatgtctagaagaagcttcatttgttaaaaaagttggattctttagagaacttagaggattttggtttagtgtctctaatttggttgttgagacattttctgagtaatctgattttagagtaatgccgctttgttagtattctcattgatctaagacttgggtagtagattggtggtatttgcccaattttaggagctttggggaaattgtttgacatagctatgtttttcttgattttatttgcaggaacatacattgaccagaaatgtccctttactggtacggtttcaatcaggggtcgcatcttgtctggaacttgtcacagtgcaaagatgcagaggacgatcattgttcgtagggactatcttcattttgtgaagaagtatcgaaggtaaaaggatcggttttgttattgtgttcaaattctctcagcttatttgaaaccctccagctaaatgcttaatcctaccagatatgagaaaagacactcaaacattcctgctcatgtttccccgtgcttccgtgtcaaagaaggagatcgtgttaccattgggcaatgcaggttaggagcactaatatctatatacttggtttttcgttcaaaggaattcatgctattgtataatactgcctgaactttgataccatctttatttatcacgcaagtttctaaacttatcaagttaacgattcaggccattgtcaaagacggtgaggttcaatgtcctgaaggtcattccggctggaagctcttctatcgggaaaaaagcattcactggaatgtaaaagagattcagatttgttgaaaaggtgcgaactagtattctaagagtttagaatttttctagcagagttattggattcgtttcttaagatctatgatcaaaggaaaccagattttctgtttcatttagtgattcaagtatcaagatatgtctatggttatagttttactccaatatatctagtcatgagttgctatctactagtcatgatttcgatgaaaagtggaattatgcttttgctatcttgatatttatctttgtctaatcgatatttcttgcttccattacattaatttctgaaaatgatatttaagagaaaacaatacagaagttgcataactccagggaatgctatgaacgtgcagcctcattctatgccatacatttatataaaagctccgattgcaccccttaagcttattaagtcatcttcaaaattagaaaaagaggtgcctaagtcatggcgaaaattagtcgaatgaaaacgacacaaaagattcttcatgtataatatacaaaaatatgaccccgtatttcacatggtatagttttttattacatcacttttccaaacgtaaagttaattaaacgttgagaaatgtgatgttgcttggtaacagctcaattctcgaaaacacgtgaaacctggcgcacttgcttctgtttcacatttgcatacaatttcaaccactaacacgcaaccatctccaaacgcagggccacgtttatctgcgtttgcgttaccaaagtcaatgattgacaaacaaacaaactaacactccaaccaatgacgagttttagataaggtattcgtgattttatacaatgcatcaaacagaaatcgaaccaaacacctccttaagttgtttcacggttcgaccaaccgcatcgaacgccaaattaacgagaagaggttgttgttagttgaggaccacgcacgatgggtgaaataaaaaagtccgaatcttttgggttcgttgagtagcttctgacgtcatttcgcacattctaattctaatattcagtctttaaagtcttaaaggatcttcattgtactttgaagtatagtttctgtaacaacaatg

SEQ ID NO: 17832 - DNA, 3003 bp, Unknown
  misc_feature (1)..( 3003): 2750-1469P.txt file - cDNA_ID_1814194; gDNA_ID_2926198; Annot_ID_141394
ttgtttgtgacaaccgaaatagtgtcaagaacttcatatcactcggtggattactttatttgattgaatcttagttgataacgaaatcctttctttttctatgtatttcgattattaatgtaatcagaaaattttaagtattttttcacgttatccaactttgagagtactgtccttgtgttggccaataagtggttgaatatatggtaaaagtataaaagctcccatcatgttggacctactagctttgctatatataaaatgtcctgtcattgcataacgtaccactttctgaatctgttttacgtgcctatcaatgatttgtctttaacacttaccgtaatattctacaattaagttcaagtgcctagattttctaaatgtgtataaagacattatatatggcaaatgatcctttagataaccatttcatttaaatcaagcattcgattcgcattcatagataaaatactattcaccggtccagttctaactagccatccagtctggttagaaagcaaaattgtttattttattttaggttcagttttcagatcggttttctaacactgttttggtttggttctcgtatcggttcaaccggattggatagtcataaagaatttgaagtccttaattaagcccaaaacaagtagagcccatatatatactaacaaagccgtgattagggtttttggttttcgtcagaagatttcaaggtttagggtttctgcaattcaaccatggcagagcaggtttggatctacattacattgtctttatgttataattggggattgctagttgttggattctcgttttctgggttctttgattttggcttttaatgatggattggtgtgtttgcagacggagaaggcgtttcttaagcaaccaaaagttttcttaaggtaattgtcacacctcaaaaattcaactgctttgtattttggctatggtctctttatgcttatgattcaaatgttctatcagctcgaagaaatctggtaagggaaagaggcctggtaaaggaggtaatcgtttctggaagaacattggccttggtttcaaaactccaagagaggctattgaaggtactgtttttatgtctcagctctcaattttgctttaccatgtctagaagaagcttcatttgttaaaaaagttggattctttagagaacttagaggattttggtttagtgtctctaatttggttgttgagacattttctgagtaatctgattttagagtaatgccgctttgttagtattctcattgatctaagacttgggtagtagattggtggtatttgcccaattttaggagctttggggaaattgtttgacatagctatgtttttcttgattttatttgcaggaacatacattgaccagaaatgtccctttactggtacggtttcaatcaggggtcgcatcttgtctggaacttgtcacagtgcaaagatgcagaggacgatcattgttcgtagggactatcttcattttgtgaagaagtatcgaaggtaaaaggatcggttttgttattgtgttcaaattctctcagcttatttgaaaccctccagctaaatgcttaatcctaccagatatgagaaaagacactcaaacattcctgctcatgtttccccgtgcttccgtgtcaaagaaggagatcgtgttaccattgggcaatgcaggttaggagcactaatatctatatacttggtttttcgttcaaaggaattcatgctattgtataatactgcctgaactttgataccatctttatttatcacgcaagtttctaaacttatcaagttaacgattcaggccattgtcaaagacggtgaggttcaatgtcctgaaggtcattccggctggaagctcttctatcgggaaaaaagcattcactggaatgtaaaagagattcagatttgttgaaaaggtgcgaactagtattctaagagtttagaatttttctagcagagttattggattcgtttcttaagatctatgatcaaaggaaaccagattttctgtttcatttagtgattcaagtatcaagatatgtctatggttatagttttactccaatatatctagtcatgagttgctatctactagtcatgatttcgatgaaaagtggaattatgcttttgctatcttgatatttatctttgtctaatcgatatttcttgcttccattacattaatttctgaaaatgatatttaagagaaaacaatacagaagttgcataactccagggaatgctatgaacgtgcagcctcattctatgccatacatttatataaaagctccgattgcaccccttaagcttattaagtcatcttcaaaattagaaaaagaggtgcctaagtcatggcgaaaattagtcgaatgaaaacgacacaaaagattcttcatgtataatatacaaaaatatgaccccgtatttcacatggtatagttttttattacatcacttttccaaacgtaaagttaattaaacgttgagaaatgtgatgttgcttggtaacagctcaattctcgaaaacacgtgaaacctggcgcacttgcttctgtttcacatttgcatacaatttcaaccactaacacgcaaccatctccaaacgcagggccacgtttatctgcgtttgcgttaccaaagtcaatgattgacaaacaaacaaactaacactccaaccaatgacgagttttagataaggtattcgtgattttatacaatgcatcaaacagaaatcgaaccaaacacctccttaagttgtttcacggttcgaccaaccgcatcgaacgccaaattaacgagaagaggttgttgttagttgaggaccacgcacgatgggtgaaataaaaaagtccgaatcttttgggttcgttgagtagcttctgacgtcatttcgcacattctaattctaatattcagtctttaaagtcttaaaggatcttcattgtactttgaagtatagtttctgtaacaacaatg

SEQ ID NO: 17833 - DNA, 3000 bp, Unknown; identical to SEQ ID NO: 6404
  misc_feature (1)..( 3000): 2750-1469P.txt file - cDNA_ID_1814209; gDNA_ID_1621091; Annot_ID_55522

SEQ ID NO: 17834 - DNA, 3003 bp, Unknown
  misc_feature (1)..( 3003): 2750-1469P.txt file - cDNA_ID_1814209; gDNA_ID_2926198; Annot_ID_141399
agtggtgattggtcaagaataggtgtgatctccaaagaaacagaggaattgttgaagattgctgcttttcttgttgttcctctctgtatcttcctcgccctttcattttccaatgattcaactgattagaggttccttgattccttctatatatagctctgctttatctttcagaaagaatcaattagattagatctttgtatcatgaagcttgaacaatacttgtaggaaattgagtttttgtttacttttgaatatcttggatggtacattgcgtcttctatggggacaaacatacattgatacattgaatgaagtattactaaatgttttacaatgtgttttcgagttaaaaggcacaagaaggagaagcccgtcgaaaatccatgataagaagactggcaacactatgagcaagagctcctaagactacaaacacatggaatatctgatggctatgtcctgcaatatcaaaagccccaggcttccatctttcaggtatgcgggtaacataaaacgctgctcctgttgcatacaacacagccatcgcaagttcatatacgagagctataagcacgtttgggtgatccttatgaaggtaaagcacatgtgtggctggtattacgccagaaaatcccattgttaggaacagagctgctctgaaagatctgaaacgtggagctgagagtgatggagagaggagagtgaagatggcgaggagaccgaggattgagatcgatgagaggtagaagagtcgccagtaagtgtggcatgagaatgcatagtagataggtgcgaagaatgaacagacgatcatgagggagattccagcgtagtctagacgccagaagaagaggttgaaccgtctggagtgacaggcgaagaggtgtgacatggaactgcagatcaagcagcccattgctccggtcaagaacacaagccatggccatttcggaatggcttcgtagttaacatctccttgagaattcaggagcgagcgagtgtgtgtcacgtttaagtcctgccagtagacaccaccaaatcataagtttatgttgacaaaaaaacagcctttcttttcttaaacccgttgaaaaaatcatgttagttggaaagttaggtgagcacaaagaaaatctacagaaaactaaagtgagagaaacatcaaatagttggggcaggttacaagatttatgctaaactaaacaaatccaatcataaagtttgttccttaatttcggtaggaaatcacgtgatttcaaagtaggtgagcataaagagcaagtctagagaaactgaagtatccataaaaaccaaagttaaaaacagaaagatagaaaaaatccaaagagaacatgacatggtgggtgaaagttaccatttagcactactgctaattgcaatcagcacacaacaaaaatgggatttgttatttgaaagcacttatgttgcatgtctactacttaaattagaataaacaatgtcacagaataaaaaaggaagaatctttacgtgatgcagagtttgatcgctggagaagtaaacatcttttgacattgccattgacggccatggccagcgaattgttgctctgtcattaggacccacaaatcccccaaaaagattgaaatttgtttaattttcctcaaaacaaaaaatgacgattttgacctcgagatttttcttacccggagagaaggctaacaaagccggcgaggccaagctccgtcgtctccattgaactcacaaccatcatccaagtaaatatcgcaaatccacacaaatgcctgccaaatttcaaaaccccgtttacaaattttcaaccaagggaaaaaaaaatcagaagaaaacgaaaacatacgtccagatgttgagagtctcattgtgccatgagaaagcgctgaggaaagtttctttgattgaccactcacatcgataatgattgtgtatgaactcgttatctttcaaatacctaggtaactcctcgaacttcatcaatctcttctcagatctcttcttttcgccggaatccatacctttaccatttcttatcttcgtagattccttcaccgttctccgtttctgcatgattcccctccctctctcgcacagctcgtcggggggaaaaggaggagaaatctagctacgaaattgaactccggcgaatcacccaccaccgtagatttctctcttcttctttttattttcagtatttgagaatctgatttgttttttttcgatcttcgtggtatgcttcgtcgcctacttatacggagatgaaacctctttgaattttaaaaacgagcaagcttcgtgacttttatctacgtagcgtctttgaccggtcttttttacacgtgtctcttccttattagtatgttagtttcgccttagtgtgagggaggatacacctgattatttttacccgccgtgtcaatttgaaacaaatattaaagttacagttggaaggtgagaaatgcagaatttgtgggtctctgtttaaacctatagtctataattattaaatcgagaactttgtttttacccctcaagatttttttgttgcctgacccttaataacattgttgagtaactaaaacatatattttcgtttcatttatacgtttcctaaatgatttgataatatggggagtgttgatcaaaacagattaaacgaacgaggtaaattgaaagagtaggtaactttttattggctttatggcataagattctccaaggagggttgattcataagacaagacaacacgtacatacatatctatatttaattggtatgaacatggattatgttattgatttatttaaaacgcgtcaaacaattggatataataattaaaaactgaatgaatggttcgcttaccaaagcaaaatatagttggcccagaattcgatgttggcatgttacgactacattgctacattgttatcatcaatgtttcagattatttttaatttgtactttcatagtaattcaccgcaatg

SEQ ID NO: 17835 - DNA, 3003 bp, Unknown
  misc_feature (1)..( 3003): 2750-1469P.txt file - cDNA_ID_1814221; gDNA_ID_1621091; Annot_ID_55519
cttatgagagcgacgttttttcttactcgggcacttggccatgcgtctctcatatctcctaccacaccatgctctctgcaagttgaatgatgcccaaaagccattcatcagcagtcaaataagtaaatatgctttgatttgaaactagttgatcagtgtgtgaagaatggtttagccattcttgcattaactaggagccctgaaagaaaactctaggagattggtaaaaagcacaaaacttgtgaatgtgatattaaggtacctagatctgcccaacagaaaccgccctgttgttgattccttctgtgtgttgaatcctccacagtacacaaccggcaaagtgggaggtaatgatgctatgtgttgccatgtgagtaaagcacttcgcctacgggcacgagggctgatttcatccaagtttgtgttgactatctgaaacgaaaaaccaggcggctccgctcctttaagttggaatgtgtaggcagcttgtcaaagaaaaccaaaatactgatatataggacaaaaacaccaaaatcataaactaatctaattatagtttaactaaaatgaacccaactagtaaaaaggatatagcccatgtcgctatacaaggaactgcggaaccccatgccgtgcttccagggaccgagggagactctgacaaccaaaaagttccaccctctagcagctctaccttcaattagtataaagtatagtatcaagcagcgtattaattatttagagcgtagttatgtattgtcttatcaaccgaattaatactttttccttgttgaagaagatggtgcagtgttcatcattagcatccccaggtcctgttcttgatatgccaaattgatcataggctgcaagcaaagagtactaccatctatttaagttcaaagaaacaatgcaaactgaagtattattaaggcatgtgaaactagaagctaagctccatggttcacagtaacaaaaaccagataaacaataccaccatcatttcaaagaaagcacctgtaaatgtgagaatatcatgcattccattgccataaaacagatgcattaagtgcactagactccggcttttgtagcctaaaaacactaacttgaacttgatgcaaaaaaggatacggattgacaaattggctatcagatttaagcaataccaacatatactaaaaatagaattaaatctagtagatcacaaatagatttacatagtagattgagaacaagaagagtggtctacgattgataacaagattcacactagtctgtgaacttaagaagaagcagactgctgtatacaaacagggttcaattagacctaactcacaccatttaagtagagattagacttccataaatcaaagagaattcaattatacctggcaacccctgctgaagataatccaactgcgacttcacacctaaccaatgtaaacatgataacaaaagatcaaaacgaaaatcctatctctgttcaatatttcagaaggcaagaaaaagcacaagaatcaatctccagcattcaggaaaaagaagccttcttggagaaccaatataaagaaggaagcaagatctaacaagcattgaatcaccaatacgaagaaggaatcaaagatctaacaagcattgatccattgtggctaaagattattaccttgttgggtacagagaacaatgggggagtaactagtgatgacagtgagacacaaatctttccttttgagccatgaattagggctttcttcaggtagatcatcgtgaagattgaatgacatcacactcaaagacacactcattgttttgtctcctttcttcttcttcttcttcctctagttttctctcttctttctttatggtttggtaagacgaataaaaacaaaggtctctctcacatcagcagcagctcatcgtcgtcgtgacctacatgattttcaataataagtcaaaagcttatcaatttttatgtgaaaaaacagctcaggattcgaagaaagaaaatcaatcaacataatttattatattatattattgaggaatccaatacgaaccttgttgtttcagactcttatcaacaacaacagtggagaaaatgagtcttggacatttgacgacttttgctggaaaatctgtgaaagtcatgccctttgatcaccaaaagtctcttaaagccatttcctgatacatgtataaatcagcaacttcagaaacaaatcaaatcggaaacgggggaagaagaagaagaagagtaactaatcggaggagggaccggtgaagtcacggtggagggaccggtggagtcacggtggactaatcgtcggctttttggtctctctctagatttttttaaggtttaaaattaatttcagacaagcttcgaacccgagacatggaacccctacagacacgtgagtttttaataaccgttcagaccaaacaggagtaacaacaactgtttgagatagttttgttgaataaccgaattaaaccaaagtgaatacaaaaccgaaccgagatttatatttgtaaagatacgacgacgcctttgacgaaaaaggagacgaagaagatccaaacacggcgctaagctaagctccgttctcctcctcaaaactatccgacaaaagacagaagcagaaacctaaccctaatttccttttctcaaaatccccgaaaggtccgtctctctctctatctatctctctaacttagctctcctccaaattcggatgattacccattacgaatttgcagagaagaacaaatcctctctttcttcttcctccgtctctctacccctttcatgtcttctcaagtctacgactctcatccagggttgttggtgcatcaaaccctagtttttgatttcgcttttgagatttctcatgcttctttcgtttcggatctctctctgaatcagattacgtcttttgggctcttgttgttgttgtgctgctcttcaatctcttctccgttgcgttctatgtgccaaatatg

SEQ ID NO: 17836 - DNA, 3000 bp, Unknown
  misc_feature (1)..( 3000): 2750-1469P.txt file - cDNA_ID_1814221; gDNA_ID_2926198; Annot_ID_141402
atgagagcgacgttttttcttactcgggcacttggccatgcgtctctcatatctcctaccacaccatgctctctgcaagttgaatgatgcccaaaagccattcatcagcagtcaaataagtaaatatgctttgatttgaaactagttgatcagtgtgtgaagaatggtttagccattcttgcattaactaggagccctgaaagaaaactctaggagattggtaaaaagcacaaaacttgtgaatgtgatattaaggtacctagatctgcccaacagaaaccgccctgttgttgattccttctgtgtgttgaatcctccacagtacacaaccggcaaagtgggaggtaatgatgctatgtgttgccatgtgagtaaagcacttcgcctacgggcacgagggctgatttcatccaagtttgtgttgactatctgaaacgaaaaaccaggcggctccgctcctttaagttggaatgtgtaggcagcttgtcaaagaaaaccaaaatactgatatataggacaaaaacaccaaaatcataaactaatctaattatagtttaactaaaatgaacccaactagtaaaaaggatatagcccatgtcgctatacaaggaactgcggaaccccatgccgtgcttccagggaccgagggagactctgacaaccaaaaagttccaccctctagcagctctaccttcaattagtataaagtatagtatcaagcagcgtattaattatttagagcgtagttatgtattgtcttatcaaccgaattaatactttttccttgttgaagaagatggtgcagtgttcatcattagcatccccaggtcctgttcttgatatgccaaattgatcataggctgcaagcaaagagtactaccatctatttaagttcaaagaaacaatgcaaactgaagtattattaaggcatgtgaaactagaagctaagctccatggttcacagtaacaaaaaccagataaacaataccaccatcatttcaaagaaagcacctgtaaatgtgagaatatcatgcattccattgccataaaacagatgcattaagtgcactagactccggcttttgtagcctaaaaacactaacttgaacttgatgcaaaaaaggatacggattgacaaattggctatcagatttaagcaataccaacatatactaaaaatagaattaaatctagtagatcacaaatagatttacatagtagattgagaacaagaagagtggtctacgattgataacaagattcacactagtctgtgaacttaagaagaagcagactgctgtatacaaacagggttcaattagacctaactcacaccatttaagtagagattagacttccataaatcaaagagaattcaattatacctggcaacccctgctgaagataatccaactgcgacttcacacctaaccaatgtaaacatgataacaaaagatcaaaacgaaaatcctatctctgttcaatatttcagaaggcaagaaaaagcacaagaatcaatctccagcattcaggaaaaagaagccttcttggagaaccaatataaagaaggaagcaagatctaacaagcattgaatcaccaatacgaagaaggaatcaaagatctaacaagcattgatccattgtggctaaagattattaccttgttgggtacagagaacaatgggggagtaactagtgatgacagtgagacacaaatctttccttttgagccatgaattagggctttcttcaggtagatcatcgtgaagattgaatgacatcacactcaaagacacactcattgttttgtctcctttcttcttcttcttcttcctctagttttctctcttctttctttatggtttggtaagacgaataaaaacaaaggtctctctcacatcagcagcagctcatcgtcgtcgtgacctacatgattttcaataataagtcaaaagcttatcaatttttatgtgaaaaaacagctcaggattcgaagaaagaaaatcaatcaacataatttattatattatattattgaggaatccaatacgaaccttgttgtttcagactcttatcaacaacaacagtggagaaaatgagtcttggacatttgacgacttttgctggaaaatctgtgaaagtcatgccctttgatcaccaaaagtctcttaaagccatttcctgatacatgtataaatcagcaacttcagaaacaaatcaaatcggaaacgggggaagaagaagaagaagagtaactaatcggaggagggaccggtgaagtcacggtggagggaccggtggagtcacggtggactaatcgtcggctttttggtctctctctagatttttttaaggtttaaaattaatttcagacaagcttcgaacccgagacatggaacccctacagacacgtgagtttttaataaccgttcagaccaaacaggagtaacaacaactgtttgagatagttttgttgaataaccgaattaaaccaaagtgaatacaaaaccgaaccgagatttatatttgtaaagatacgacgacgcctttgacgaaaaaggagacgaagaagatccaaacacggcgctaagctaagctccgttctcctcctcaaaactatccgacaaaagacagaagcagaaacctaaccctaatttccttttctcaaaatccccgaaaggtccgtctctctctctatctatctctctaacttagctctcctccaaattcggatgattacccattacgaatttgcagagaagaacaaatcctctctttcttcttcctccgtctctctacccctttcatgtcttctcaagtctacgactctcatccagggttgttggtgcatcaaaccctagtttttgatttcgcttttgagatttctcatgcttctttcgtttcggatctctctctgaatcagattacgtcttttgggctcttgttgttgttgtgctgctcttcaatctcttctccgttgcgttctatgtgccaaatatg

SEQ ID NO: 17837 - DNA, 3003 bp, Unknown
  misc_feature (1)..( 3003): 2750-1469P.txt file - cDNA_ID_1814227; gDNA_ID_1621091; Annot_ID_55515
gagctacaatctccgtgcagctcatgagtctatacaagagaactggggaaaggtactaaccactttcttatctcgtaaatttgttgtgaataacatgacagtaatttgaaccacaacataataagtgttcctttgggaagttaataagacactaaaagtttcctgggctacttcttttggggtgttgttgcagtatacaaacttggctacatggaactggcgattgatgaagacgataatgactgtgtgtcatgtctatgacaaagaggagaactacattccttttgaccggttagcccctgaagaatctcagccaataaccttcctcaagaaagcaatgcctaactacacagcctgattcgccatggtctcaaactagtcttttgaaatctcaatatctttttgcagtcgccgatgttatatgtaagctttccaagcgatgagcttctctaacacttcaccaacgctttatactgttatcttctttccaatcttatcagaagagagaaactggtcaaattatctcagcgattgcaattcttttatcagtttcttagctataagaagattgaacagtctatatagtttgcaatgtactgtaatgtgatgaaaatttagttgatgagaatctttgaagatataaacatcatcttcttactgtgtctgcaatatttccgagaaagtcgtgggaaaaaagccaaaagaaaaagtgaagagagaaaagaaagctaaagcaaaattcttgggacttctttacggaaagtggaaagacaaagtcattcactgtccaacaaaagacactcacatgtccaaaataagggagcgaatcatcaaatctttagaaatctgagactgtggtcacagttcacaccaccatgaaaggagcttaaagctaaaggtcaaaagaggattaattctttacattgagaaagagtcatataaggacaaaacagaacacaacctgaaactggaaacttaaaatcgtattaatatcaatcctaacaaaagtctatgatcatgttctctatgtttatattctcttgactattgctatttctctcatcctatatattttctaacaaccctaaaacattaacaaaagaagcaaaccagaagcaacagaaacagaccagactaagctcaagatatcaaaatgtgaaatcagatgatgggaggaggaagagtctcccacacatcaaacacattctcctcactgtgcaatgcaaacaacctatccccaccaatagagaaatcacaaatggagccgccatagcttcttttcaacctagaagtcaaaacccagtctgatccacaaaacacagagatggaatcattcatagacgagaagagctggccttcatgcaaagcaagtttggggtaacaaggctcatcaggcatcttgcttttcatcaacctgctcctagaactccacctcacactactccctcctccatccatcctcagatcaataaaccctagatcttcaaactcattcaccacacatatcgaattgctctcttccattgctatcgcgtctctcactctcttctcttccgccattgtaagaaatccgatatcagaccaagaccagaccatgttcttctctcggaaatccaacaagctaatataacagttatctttccttggaaacaaagtagctacaagaagacaattcttaccactcaaccattgcaacttatcagcatctcctaaagaccaaccaggactctcgtaaaagaaatctacttgctttccagtactttgatcccaaactccaatcccatactcattacttcttcctttacagctcgtaaagatcttagaatcaggactaaaactcaaagctccagcactataactcttaacctgattatcatgactaacctgaaacttatacctaagctcaccagaagatgagctaaacaatcccattcctccatctcctcttcctaatctctcacaagcagagagtacaatgttaccagaatcaatccaaccaacatcgttcactctctggtaatcaagattaatcgttggatgctcctcaagcatccaatcaaagacatggacgacactcccatgagctatgcagcatccaccatccggaccagctcttatcgccgttccgtctccaggagctatgccggtgacggaacgagataggtggagtctgttaccgtcgaaaggtccccactttgcggttcgtaagtggtctattaagccgtagaacattgcttctttgtgaaggagacgctccgggatattaggcgggatgtttaagtctcctgttcggagaagatcgagaagaacagcgaagcaatctggattcctatcgatgaagagatccccgggttgtgaaagattccaattttcgtcgaataatgctccgaagaaggaatcgcgacctgcgttagcgagcgttgtcgctgtcgtttcgaagattctgccaccaacgttgaatttgatcctgtcatttgataaacccattatttctgatttctgaaaataggtgaaatcaatgatttttatggattcgaaccaaaagcattaatgacaagacaaggaagccatgaacgctcgaactcggattgaaaatattcgaaattcgatcggattcgaagaaattgaatcctgggaaaggataacgaaatgaaatctgatttatgattaatcaaattgaatacgatgatctggactctggatatttttttaaaaaaagctgagattcccagaagagaaaataaaacgatctgtcttggtctcggacatttttccgttgctcgggcatttaaaacgtaagaaacccaactggaacatggtgggacctactagagacaatactcgtgttactaccgtcagatgcttttagatattgtcgtctatcctgcggtcgagatttcgtgtaatttcaaagctaataccgtgatccatgataacgtttctaaagcccatatagatagatatcatcccattaacatatccttttttttgtatgctgaaatg

SEQ ID NO: 17838 - DNA, 3000 bp, Unknown
  misc_feature (1)..( 3000): 2750-1469P.txt file - cDNA_ID_1814227; gDNA_ID_2926199; Annot_ID_141405
ctacaatctccgtgcagctcatgagtctatacaagagaactggggaaaggtactaaccactttcttatctcgtaaatttgttgtgaataacatgacagtaatttgaaccacaacataataagtgttcctttgggaagttaataagacactaaaagtttcctgggctacttcttttggggtgttgttgcagtatacaaacttggctacatggaactggcgattgatgaagacgataatgactgtgtgtcatgtctatgacaaagaggagaactacattccttttgaccggttagcccctgaagaatctcagccaataaccttcctcaagaaagcaatgcctaactacacagcctgattcgccatggtctcaaactagtcttttgaaatctcaatatctttttgcagtcgccgatgttatatgtaagctttccaagcgatgagcttctctaacacttcaccaacgctttatactgttatcttctttccaatcttatcagaagagagaaactggtcaaattatctcagcgattgcaattcttttatcagtttcttagctataagaagattgaacagtctatatagtttgcaatgtactgtaatgtgatgaaaatttagttgatgagaatctttgaagatataaacatcatcttcttactgtgtctgcaatatttccgagaaagtcgtgggaaaaaagccaaaagaaaaagtgaagagagaaaagaaagctaaagcaaaattcttgggacttctttacggaaagtggaaagacaaagtcattcactgtccaacaaaagacactcacatgtccaaaataagggagcgaatcatcaaatctttagaaatctgagactgtggtcacagttcacaccaccatgaaaggagcttaaagctaaaggtcaaaagaggattaattctttacattgagaaagagtcatataaggacaaaacagaacacaacctgaaactggaaacttaaaatcgtattaatatcaatcctaacaaaagtctatgatcatgttctctatgtttatattctcttgactattgctatttctctcatcctatatattttctaacaaccctaaaacattaacaaaagaagcaaaccagaagcaacagaaacagaccagactaagctcaagatatcaaaatgtgaaatcagatgatgggaggaggaagagtctcccacacatcaaacacattctcctcactgtgcaatgcaaacaacctatccccaccaatagagaaatcacaaatggagccgccatagcttcttttcaacctagaagtcaaaacccagtctgatccacaaaacacagagatggaatcattcatagacgagaagagctggccttcatgcaaagcaagtttggggtaacaaggctcatcaggcatcttgcttttcatcaacctgctcctagaactccacctcacactactccctcctccatccatcctcagatcaataaaccctagatcttcaaactcattcaccacacatatcgaattgctctcttccattgctatcgcgtctctcactctcttctcttccgccattgtaagaaatccgatatcagaccaagaccagaccatgttcttctctcggaaatccaacaagctaatataacagttatctttccttggaaacaaagtagctacaagaagacaattcttaccactcaaccattgcaacttatcagcatctcctaaagaccaaccaggactctcgtaaaagaaatctacttgctttccagtactttgatcccaaactccaatcccatactcattacttcttcctttacagctcgtaaagatcttagaatcaggactaaaactcaaagctccagcactataactcttaacctgattatcatgactaacctgaaacttatacctaagctcaccagaagatgagctaaacaatcccattcctccatctcctcttcctaatctctcacaagcagagagtacaatgttaccagaatcaatccaaccaacatcgttcactctctggtaatcaagattaatcgttggatgctcctcaagcatccaatcaaagacatggacgacactcccatgagctatgcagcatccaccatccggaccagctcttatcgccgttccgtctccaggagctatgccggtgacggaacgagataggtggagtctgttaccgtcgaaaggtccccactttgcggttcgtaagtggtctattaagccgtagaacattgcttctttgtgaaggagacgctccgggatattaggcgggatgtttaagtctcctgttcggagaagatcgagaagaacagcgaagcaatctggattcctatcgatgaagagatccccgggttgtgaaagattccaattttcgtcgaataatgctccgaagaaggaatcgcgacctgcgttagcgagcgttgtcgctgtcgtttcgaagattctgccaccaacgttgaatttgatcctgtcatttgataaacccattatttctgatttctgaaaataggtgaaatcaatgatttttatggattcgaaccaaaagcattaatgacaagacaaggaagccatgaacgctcgaactcggattgaaaatattcgaaattcgatcggattcgaagaaattgaatcctgggaaaggataacgaaatgaaatctgatttatgattaatcaaattgaatacgatgatctggactctggatatttttttaaaaaaagctgagattcccagaagagaaaataaaacgatctgtcttggtctcggacatttttccgttgctcgggcatttaaaacgtaagaaacccaactggaacatggtgggacctactagagacaatactcgtgttactaccgtcagatgcttttagatattgtcgtctatcctgcggtcgagatttcgtgtaatttcaaagctaataccgtgatccatgataacgtttctaaagcccatatagatagatatcatcccattaacatatccttttttttgtatgctgaaatg

SEQ ID NO: 17839 - DNA, 3000 bp, Unknown; identical to SEQ ID NO: 6397
  misc_feature (1)..( 3000): 2750-1469P.txt file - cDNA_ID_1814246; gDNA_ID_1621091; Annot_ID_55509

SEQ ID NO: 17840 - DNA, 3003 bp, Unknown
  misc_feature (1)..( 3003): 2750-1469P.txt file - cDNA_ID_1814246; gDNA_ID_2926199; Annot_ID_141411
tttatggtgtttaaaagagggatggagattgtaatatttgagatttgaagggtttgactttgacatgttaaatacgtttaccaaatttaccattttttttatcatccttgcaaattaattatttcgtgttattttcataatttcttgatttttttaatcactaaaagaattcgatcactgaagtcatgatttcttcaattttataatcctttgttgataatatacttttcacaattttgtagtaactacaaaaagtaagtgaaacatatatttctaaaaatatcatagtcgatcgaatgacaggcttaaagtaataaaactaacttaaaattcggttgtactaaaaaaaaaaaaaaaaaaaaaaaattcggttgtactaacttcactcaaatgatttacgtatgtttaattatctttttttttttatttaagacagaatgtggttctaataccgtatattattaaatttctatatatataacataggtttttctattaatcatttttgaaaactcatgtttaagataattgtataagattttcattcggtaacattaaaattggtttatttgaatgctgaataaaattctttggatttatgttaaggatgccaactacaaaaataaaataaaatacaaatctctattgttgatcttttttattaaaatcagtcggagttttaaacttgtcccggcaactacgtaccacgagataaatatttgctagtccaaaaatgcaatagtctacaagataacaccagagccaacactttttcttgtgacaactattttagacatataatatttagacatgcagtataaatgcatacaattatactctattcatttgggtacattcattcattcatcaacggttcatgataatgttctcttcatatattactgtttacaatttgtccccaagattacaaacatgctatccctttagacgatactcgtgttcgataagaataagatcactttttatagattattcttgttttgttttctgattaatatgataccgatcgatgaaattgttgttttaaccgatctgattaacatttgggaaagaggatcctctcaaacgagaacataacataacagaacatcgtcatcatcatcatgtcatgttaccatgtattttttatacttgttaaatattttttggtctaataaattcatcatttaccttaaaaattcttttttaccatcgtatacagtttttcagctgtttgatagtatttgattaagattaatattaaattgacaaagataagtaaagaacattattatgcaatatgcatgattaagcacatgggacattctgagttttgcacaaactcacaagaggtagagatcggctttaatacacttcccatttattaattacaaatgttggtaagcattgatgtactacacaacagaaagagagatctatcatctcatgtattagtattatcaagagaatgcaataattatttttgtttttacttaataatcataatgtataccaaaataattaactaagggggtgtaaaataagttacgaatgataatttaaattccatatagaaaaaataaacagatagtaaagacaaaaatgctactatgttaaataaactattggtcccatctagtatactgatacattagttttatttcatattatcagtagttttttctattgtttatataaaacaatacgtttacaataggaaggcaggaaaataaaccatatggtgcacaaccattgtagactcaatcctgacaaaacccaataaatttgaggaactccctcaaaaattacggctttgttcaaattgaaaaactggctcttacgatcttagtttggtacacaatcacgtctgatttcccaagttctacttattcacctataatgaactataaatataatctgtaaatatcaaaaggtgggcttaactaggccttgggaaaatattgaattatttaaccttgtatgaatctgacaaactctgattaaagtcttggttcttactctattagtctaatacaaataaataaacatatcttatttccttaaatgtaatttcattctcttaaattatactaaaaaaactctacttgagaaacatgaaagcttaatttggcttgctgtgattgtagatgaagctgagtgctggacgtgctcgaaatgctattttaatttgagagaagaagatgttgatgagttaacgcgcgtctcaatattttgttggccagtgttacgattttcgaatgttaagattgggctaaaaagggaaataaaaatgtctaaaattatggatctcggttatggaaaaccagaaatatacgtcaaaacccgaacattcggttcgattaaacgataaaccaggataaaacctaaccgggtcgttaaacccaaccgcctccttgtttgagaacaaaaaagaagcttaaaccctttcttcctccgccgcgttctcaagctcaagctcaatctcaattctcaagctcaagccttttcgatttttctctttaaagacgcaattttgctttcgcaaccctctgtgtgatttcgtttccaaacgtaagctctacttttgttgtttaatttccaaggctttagcaattaagcaattaagcaattagattgatatacatagttgctcttagaagcttctctttttttttttttagcctggatttaattgtaaagtttggggattttggaatcgaaattgactgttttggagattgatgtgtttaggaaacacggctctctgaatcatggcgacatcagctgatgctcgggcagtaaagtcgctcaacacttccgaggggcgtaagagatttgtggtacgtgtttgtttaattatatagcacatgtcttttcctttcctttgtaaaacttcctctacacctatcatagagtccactgtttctcctcattagtaagctcacttatctgttttcgttgtgctctctaatatggctgtttgtgctttattatttctggatg

SEQ ID NO: 17841 - DNA, 3000 bp, Unknown; identical to SEQ ID NO: 6395
  misc_feature (1)..( 3000): 2750-1469P.txt file - cDNA_ID_1814254; gDNA_ID_1621091; Annot_ID_55507

SEQ ID NO: 17842 - DNA, 3003 bp, Unknown
  misc_feature (1)..( 3003): 2750-1469P.txt file - cDNA_ID_1814254; gDNA_ID_2926199; Annot_ID_141413
aaaaaaactgtcttacagtgtcatagtggaagctgtcaaggtagatagtctgcagaggctatgctcgtctttggaaccattatttcgaagaattgtgagtatgatactattccgaagtttaacttccacatagaccaaatcttgagaagcctgtaagagcgataaacttggtaatgatgtcgatcaatggacaggtcagtgaagaggtggaacgtgccatatcaaggttggagaactcgaaatctacttcaaggtattttatctagctatatacgatatcattttctggactggttccatgatctttacatcaatttgagttttcagatctacagaaccgaataagattcaaggcctcgatggaagaaatctgcaacttcggttcagaacacgaatgcctcctcatttattcacaggtgggaaagtcgagggagagcaaggctcagccattcacgtggttcttatagatgcaaacaccggaaatgtaatccaaacaggagaagaatcaatgacaaagctgaatattgtcgtgttagatggagacttcaatgatgaagacgacaaagattggacgagagaacattttgagagctttgaagtgaaggaacgcgaaggaaaacgtcccatcttgactggtgacagacatgtgataattaaagaaggtgtaggaactcttggaaaacttactttcactgacaattcgagctggattaggagcagaaagtttagacttggtgttaagcctgcaacgggatttcacatccgtgaagctaaaacagaaccatttgctgttaaagatcacagaggagaacatgagtatcttaaaactttggactgacttgataagcagagagagatagagtttcttggattgtctaccttaatcttggattattttttggcggtgttttttgcagtatacaagaaacattatccaccggttttacatgatgaagtctggagattggataaaatagcgaaagatggagcgctacacaagaagctactaaaatctaacattgtgactgttgaagacttcctacagatactcatgaaggatccgcagaaactaagaagcgtatgtgcatctttaatattgtgagtatctacacaagaaaatgattgtttcttgcttatgttctttctttgtgtgtatttaacagttacttgggagtggaatgtcaaatagaatgtgggataacacggtagagcacgcaaagacttgtgtcttaggtgggaaactttacgcctattacacagatcaaacacaccagacagctgttgtctttaatcatatatatgaatttcaaggcctaattgccaatggccacttcttgtcttcggaatctcttaaccatgaccaaaaggtaactcatctctctgtaaagctagcttcttttttttattcttccctttagagtctgcagtctctaaggatcctactcaaaagtggtgaaaacttttgaacttttttggaattcaacagatttctgcagacactttggtgaagactgcttacgagaactggcataaagtggttgagtatggcggtaagctcttgaattgcttaccagttgctaagaagggaataaaaagcttgccagagccaaaaatggctcagaaccatcaaacgcagcagaaggctctgcaatgccaacagactgtgaatggctactcatcagatcctcagcatctgatagagtatccttttgtccaacaaccttgctatcagttacgagactacacatcgatggagagttcttcagtttcaggctcatataatggaggccttgaagatattttcacggaggaaattcgagcgaggagttctgagatgctcgagacggataacatgcagagattgctcaagacatttgggatatcaggcgggtttggtaacagggatgagtccatttacggtttcagtgatcagtacgaagctcagatagacaagggttatatgagagaaggaggtagaggcgcagggaaagctgtagtgggatggcttaagctcaaagctgcattgagatggggtatctttatacgcaagaaagctgcagagaggaggcctcaaattgtggagatcgactaagaaagtactacaaaaaaattccgagagcttttcttttgtataaataaacttgaagcaattacttttttaaagaggatcaaccagtatatccttccatatctaagcattggagaaaaaggttaaacgactggttatcagtcagacaaagagtcttaataccgaaagtctcagtattcgtcctctttaagataatctccacaccaaatacatacgaatggagtgaaggttcctatatatattgacaaagaaaaattaaggatttatgaacagaatgaatttaacattgcatcaacttacttagcttaccattaaattacggagtaaaatctgaagacgtggaaaatcgaggtgagatggctggactggactagaccatcatcgagatatctccagcactcatatcaagaacataggtttcggttataaaagcctcccatgcacttttttttagagatctttctttgtgattgcttgatcggccgtatcaaaagcggttgtggattgctcaatatcaacaagagaggtaggagttgtagatggccgccggagcacagcagtttcaggagcggttgtggattgctcatcttcagagatatcaacaagagaggttggggttgtagatggccggactccagcagtttcagagaagccagctccttcgttaggcaaactcattctcgcagacgtggccctagttagtagcgcgccaaggcactatataagtgacacggcagggataagtcaaacttaaaggccgacttgactaatgggccctataatgttaggcccatgttttgagagagcaagtagagagaagaaacaagcaacaagaagttccttcctcagcctctttccgatttcttcttcagtctctctccactggttcgtcgacttcgtagaagcaaaaaatg

SEQ ID NO: 17843 - DNA, 3003 bp, Unknown
  misc_feature (1)..( 3003): 2750-1469P.txt file - cDNA_ID_1814257; gDNA_ID_1621091; Annot_ID_55506
ctcattccatgggcattagactttttggctcatgattatctacttatgcccttcttagacaggtgattttcttcatttttgctgttaattccccaggttatgtctctatttacgttgtgttagtccccagtttgattatttagtctgtgcctttacttaaagatatgtgaagactgtaccacttgctgcccagacgcttgatgtgagacgaaatcagaagctagaaatggttaaggaacttaatagagaaaaagctaggtaccgtcttgaagttgagattggcaaatctccgccgctttctgacgatgatttatggtgggagatgcggggtaaagcgtaagactcgactccacatttttagtttcttttgatgtcaaaggtcgtaaacccatcttgatcgtgtaccagatagtttcttttgatagcctcactgtgtttctttttgtgttcctcccattggtttcttcaacagtttggaactgcgtgatgagtggagactagagaaccggaaagcatttgccaacatatggtctgatatggtgtttgggatctccttgtttgttcttttgtacgccaatcagggtagagtaagtttccgtttccaaccgtgattaagcccacctaaaatggcattctaagtttcctttcaagctgctatgttgttaacatgtacctttttgggttacttcatgaacttttttcaggtagccttgttgaaatttacaggatataaaatcataaacaacatttcagacacgggaaaggcatttctcatcatcctgatcaccgacatattcttggggtaaatgtccaaatctttgctttcattaagagcaaccaccagaactgaagctcataacaaacgttaaatcaaagctgttactgttccaataacctgatattagcgatagatctaccaatagtccattaatgcttctctttataggtaccattctgaatctggatgggagacattgttagagataataatggaacattatggtcttgaagttgagcaatctactattaccatttttatctgcctagttcccgttattatggacgcttgtgttaagctctgggtatcttcttttctccttttttatgctcttttgatttctatgtctctgctttgtttcgtcttctttgctcattatctcgtctgcatttctcaactgtttttttctgcttcttatgtagctgtttaagttccttccaagactgtctccgcgagtttccaacatattccaggagatgaaacgtcactgagtagtacccaccattgaaaccctccacttgagttctgtgtctctatcacacaaaccattcttcagctttatttacgttcagatagacataagagaaacataggctatttttttggtcactcatcttgatcttaaaatatattttttggttgaatttttggtgaacgattgagagagcactaatctgttggctctctcaccagtacttggtcatgtacacaataaacaaacctacaaaagaagccctttcggatatgggctttgggccttggaatttgggctttgggtgtatgtttacttgtgaaatagtagtaatcttctttacggtaagttacaagtctcgtcactttttacttgtgtcttgggttatcttttttgcttttttatggttgatttgatgattaagatttaagagctcaaacttccacacaaagctctctcatgcctttgttgaatgaagacacttttctctcttttggaccaagctctcaatgtcttaaaagctgaccatgcaaataaatgtacaatgttttgattagcaaagacatttactaggttaccctctctctactagacctctaagcggatcagttagattcctttgtagaaaaagttatctacaatgaaaacgaactgtctgcaaatagtgttattaattgatataattgtaattgcccccatttaacatggcggattttacgggccattgcacagttaaaacctcaaataatcatcattttataagcaaaaccaataaattaaactgaatcatcattagtttaactttacaccatttgctaatagttttggtcaaaatctgaagctgacgaagtccaaagcacacagaatcgtgtcagaaattaaaagcatacttgtccaaacaagacaatgtctccttttttgttattgtacttaaaaaaaaaaggaattggaacaagaaattgcaaagtgaaaacgagaccaaattgaaaaaaacagagcaagtggtattaaagataatttaggtaaataagaaggaggaatgtctgacaagacttcccattaaaagccattccttgcagcctttgaccaaatcttagcccttcgttgtgtaactctcttttcaagacacaagcacaataaatatgaacatcatcacctaaagatgaacacaagtttttaaaaacttaacccaaatattttacttgttacatacaacagaatttcattttgaccaaaacaaaaggattttttttgtattacgccatcagaatttaccaaaccatggacgaggccattcaaatattgtgtgacattaccatttctatttgaaaaaaaatctagactggcttctttcttatttatcatcatagactcatagtcatatatattcaatcctaagaatctaaagattaattatgattctataaaaacccctttaataaaacatcaactctaaaaagaaagaagagaggtgtagaagttgtttttttataaaacagctcatatcttcttctttcccccgacaagttcggttcccttcttctctcctcctccaccttctctccattttcttacctctcaacaagtttacacaaacaaaaaaccaaaaaaaaacaaaaaaaaaaacaattttttaaaattcttttcttagacaaagacagagacagagagaggggaagattttgggtttggtgtttttctccttttcttcattgaaagttgtcttcttttttaatcttctttgattaaaatg

SEQ ID NO: 17844 - DNA, 3000 bp, Unknown
  misc_feature (1)..( 3000): 2750-1469P.txt file - cDNA_ID_1814257; gDNA_ID_2926199; Annot_ID_141414
attccatgggcattagactttttggctcatgattatctacttatgcccttcttagacaggtgattttcttcatttttgctgttaattccccaggttatgtctctatttacgttgtgttagtccccagtttgattatttagtctgtgcctttacttaaagatatgtgaagactgtaccacttgctgcccagacgcttgatgtgagacgaaatcagaagctagaaatggttaaggaacttaatagagaaaaagctaggtaccgtcttgaagttgagattggcaaatctccgccgctttctgacgatgatttatggtgggagatgcggggtaaagcgtaagactcgactccacatttttagtttcttttgatgtcaaaggtcgtaaacccatcttgatcgtgtaccagatagtttcttttgatagcctcactgtgtttctttttgtgttcctcccattggtttcttcaacagtttggaactgcgtgatgagtggagactagagaaccggaaagcatttgccaacatatggtctgatatggtgtttgggatctccttgtttgttcttttgtacgccaatcagggtagagtaagtttccgtttccaaccgtgattaagcccacctaaaatggcattctaagtttcctttcaagctgctatgttgttaacatgtacctttttgggttacttcatgaacttttttcaggtagccttgttgaaatttacaggatataaaatcataaacaacatttcagacacgggaaaggcatttctcatcatcctgatcaccgacatattcttggggtaaatgtccaaatctttgctttcattaagagcaaccaccagaactgaagctcataacaaacgttaaatcaaagctgttactgttccaataacctgatattagcgatagatctaccaatagtccattaatgcttctctttataggtaccattctgaatctggatgggagacattgttagagataataatggaacattatggtcttgaagttgagcaatctactattaccatttttatctgcctagttcccgttattatggacgcttgtgttaagctctgggtatcttcttttctccttttttatgctcttttgatttctatgtctctgctttgtttcgtcttctttgctcattatctcgtctgcatttctcaactgtttttttctgcttcttatgtagctgtttaagttccttccaagactgtctccgcgagtttccaacatattccaggagatgaaacgtcactgagtagtacccaccattgaaaccctccacttgagttctgtgtctctatcacacaaaccattcttcagctttatttacgttcagatagacataagagaaacataggctatttttttggtcactcatcttgatcttaaaatatattttttggttgaatttttggtgaacgattgagagagcactaatctgttggctctctcaccagtacttggtcatgtacacaataaacaaacctacaaaagaagccctttcggatatgggctttgggccttggaatttgggctttgggtgtatgtttacttgtgaaatagtagtaatcttctttacggtaagttacaagtctcgtcactttttacttgtgtcttgggttatcttttttgcttttttatggttgatttgatgattaagatttaagagctcaaacttccacacaaagctctctcatgcctttgttgaatgaagacacttttctctcttttggaccaagctctcaatgtcttaaaagctgaccatgcaaataaatgtacaatgttttgattagcaaagacatttactaggttaccctctctctactagacctctaagcggatcagttagattcctttgtagaaaaagttatctacaatgaaaacgaactgtctgcaaatagtgttattaattgatataattgtaattgcccccatttaacatggcggattttacgggccattgcacagttaaaacctcaaataatcatcattttataagcaaaaccaataaattaaactgaatcatcattagtttaactttacaccatttgctaatagttttggtcaaaatctgaagctgacgaagtccaaagcacacagaatcgtgtcagaaattaaaagcatacttgtccaaacaagacaatgtctccttttttgttattgtacttaaaaaaaaaaggaattggaacaagaaattgcaaagtgaaaacgagaccaaattgaaaaaaacagagcaagtggtattaaagataatttaggtaaataagaaggaggaatgtctgacaagacttcccattaaaagccattccttgcagcctttgaccaaatcttagcccttcgttgtgtaactctcttttcaagacacaagcacaataaatatgaacatcatcacctaaagatgaacacaagtttttaaaaacttaacccaaatattttacttgttacatacaacagaatttcattttgaccaaaacaaaaggattttttttgtattacgccatcagaatttaccaaaccatggacgaggccattcaaatattgtgtgacattaccatttctatttgaaaaaaaatctagactggcttctttcttatttatcatcatagactcatagtcatatatattcaatcctaagaatctaaagattaattatgattctataaaaacccctttaataaaacatcaactctaaaaagaaagaagagaggtgtagaagttgtttttttataaaacagctcatatcttcttctttcccccgacaagttcggttcccttcttctctcctcctccaccttctctccattttcttacctctcaacaagtttacacaaacaaaaaaccaaaaaaaaacaaaaaaaaaaacaattttttaaaattcttttcttagacaaagacagagacagagagaggggaagattttgggtttggtgtttttctccttttcttcattgaaagttgtcttcttttttaatcttctttgattaaaatg

SEQ ID NO: 17845 - DNA, 3000 bp, Unknown; identical to SEQ ID NO: 6385
  misc_feature (1)..( 3000): 2750-1469P.txt file - cDNA_ID_1814264; gDNA_ID_1621091; Annot_ID_55503

SEQ ID NO: 17846 - DNA, 3003 bp, Unknown
  misc_feature (1)..( 3003): 2750-1469P.txt file - cDNA_ID_1814264; gDNA_ID_2926199; Annot_ID_141417
aaagtgtcttcattcaacaaaggcatgagagagctttgtgtggaagtttgagctcttaaatcttaatcatcaaatcaaccataaaaaagcaaaaaagataacccaagacacaagtaaaaagtgacgagacttgtaacttaccgtaaagaagattactactatttcacaagtaaacatacacccaaagcccaaattccaaggcccaaagcccatatccgaaagggcttcttttgtaggtttgtttattgtgtacatgaccaagtactggtgagagagccaacagattagtgctctctcaatcgttcaccaaaaattcaaccaaaaaatatattttaagatcaagatgagtgaccaaaaaaatagcctatgtttctcttatgtctatctgaacgtaaataaagctgaagaatggtttgtgtgatagagacacagaactcaagtggagggtttcaatggtgggtactactcagtgacgtttcatctcctggaatatgttggaaactcgcggagacagtcttggaaggaacttaaacagctacataagaagcagaaaaaaacagttgagaaatgcagacgagataatgagcaaagaagacgaaacaaagcagagacatagaaatcaaaagagcataaaaaaggagaaaagaagatacccagagcttaacacaagcgtccataataacgggaactaggcagataaaaatggtaatagtagattgctcaacttcaagaccataatgttccattattatctctaacaatgtctcccatccagattcagaatggtacctataaagagaagcattaatggactattggtagatctatcgctaatatcaggttattggaacagtaacagctttgatttaacgtttgttatgagcttcagttctggtggttgctcttaatgaaagcaaagatttggacatttaccccaagaatatgtcggtgatcaggatgatgagaaatgcctttcccgtgtctgaaatgttgtttatgattttatatcctgtaaatttcaacaaggctacctgaaaaaagttcatgaagtaacccaaaaaggtacatgttaacaacatagcagcttgaaaggaaacttagaatgccattttaggtgggcttaatcacggttggaaacggaaacttactctaccctgattggcgtacaaaagaacaaacaaggagatcccaaacaccatatcagaccatatgttggcaaatgctttccggttctctagtctccactcatcacgcagttccaaactgttgaagaaaccaatgggaggaacacaaaaagaaacacagtgaggctatcaaaagaaactatctggtacacgatcaagatgggtttacgacctttgacatcaaaagaaactaaaaatgtggagtcgagtcttacgctttaccccgcatctcccaccataaatcatcgtcagaaagcggcggagatttgccaatctcaacttcaagacggtacctagctttttctctattaagttccttaaccatttctagcttctgatttcgtctcacatcaagcgtctgggcagcaagtggtacagtcttcacatatctttaagtaaaggcacagactaaataatcaaactggggactaacacaacgtaaatagagacataacctggggaattaacagcaaaaatgaagaaaatcacctgtctaagaagggcataagtagataatcatgagccaaaaagtctaatgcccatggaatgagaattaagaccgccaaaaactttgcctgtaaagagttacaacgtcaatgagcattgatcaatcatctggaagaacattacaatcactaacaaatgaactaagaatcacacatatcatcaattaaggaacaagatcaacagagagagctatgtagcataactcaccgattttgaagaagcgtaacgaaaaatacggtcttcgtaaagaatatcttcctcttctgcacctaaaaccatatccctcaccattttaaccaaccctccatctggaattgtcaattcatcaagctctaaattgtcgtcactaccagcagagtctcgggtccaagactcaacaaaactatcatctgaatccacaatccaatcctcccatttcttggtcacatcagcaacaacaccactatccccaatctcctcctgaccttcccgtagctcgacaatcgcctctgctcgtctcttccaagtctcgaatttctcttcatcagacatctcatcatcctttgcaagctcagtagtctcatcaacaatgtcgtcgtctctcaaaccaagccaattcccatcatcatcaaagaaaaacctctgccaccagcttcttctcctcttattattattacccgtatgactgttattcttctccgcactgggaacaaatctccaaagcttcttccttctcttaccccacaacgaaatcgaatcacaaggcttataacgaagaagagaagatgatgatgattcaggatctgggttttgactactgaatgataagcagtggcataagaccattgacgagctcatcaaggacatgaatcaaacccaacattgttcggactttaatctcaaagcaacaacacagattcttctacaaaacccagacaaaccagcatatctttctttgtaaattcaacaactttacaaagccctatacccggaatccggtgaagataagaattagggttcttcagctcagaaagttaccgagagagagaaccagaagctgaccccagttgtggatagtggataccagatgatagataaagccacgctcttttttttgttttgttatcttcttcttcaaattaagcttgtaaaatatctgttatccataaagattgcttttttggtttcaaataattaattacatttacatattattttgtagagtcaaaattgttgtttccgtcgtttttgattggctaaaaattgaatgactgtatatttacagaaataaattttaagtaaattccactttcttctttagtacagagttatg

SEQ ID NO: 17847 - DNA, 3000 bp, Unknown; identical to SEQ ID NO: 6377
  misc_feature (1)..( 3000): 2750-1469P.txt file - cDNA_ID_1814266; gDNA_ID_1621091; Annot_ID_55502

SEQ ID NO: 17848 - DNA, 3003 bp, Unknown
  misc_feature (1)..( 3003): 2750-1469P.txt file - cDNA_ID_1814266; gDNA_ID_2926199; Annot_ID_141418
gagaagcattaatggactattggtagatctatcgctaatatcaggttattggaacagtaacagctttgatttaacgtttgttatgagcttcagttctggtggttgctcttaatgaaagcaaagatttggacatttaccccaagaatatgtcggtgatcaggatgatgagaaatgcctttcccgtgtctgaaatgttgtttatgattttatatcctgtaaatttcaacaaggctacctgaaaaaagttcatgaagtaacccaaaaaggtacatgttaacaacatagcagcttgaaaggaaacttagaatgccattttaggtgggcttaatcacggttggaaacggaaacttactctaccctgattggcgtacaaaagaacaaacaaggagatcccaaacaccatatcagaccatatgttggcaaatgctttccggttctctagtctccactcatcacgcagttccaaactgttgaagaaaccaatgggaggaacacaaaaagaaacacagtgaggctatcaaaagaaactatctggtacacgatcaagatgggtttacgacctttgacatcaaaagaaactaaaaatgtggagtcgagtcttacgctttaccccgcatctcccaccataaatcatcgtcagaaagcggcggagatttgccaatctcaacttcaagacggtacctagctttttctctattaagttccttaaccatttctagcttctgatttcgtctcacatcaagcgtctgggcagcaagtggtacagtcttcacatatctttaagtaaaggcacagactaaataatcaaactggggactaacacaacgtaaatagagacataacctggggaattaacagcaaaaatgaagaaaatcacctgtctaagaagggcataagtagataatcatgagccaaaaagtctaatgcccatggaatgagaattaagaccgccaaaaactttgcctgtaaagagttacaacgtcaatgagcattgatcaatcatctggaagaacattacaatcactaacaaatgaactaagaatcacacatatcatcaattaaggaacaagatcaacagagagagctatgtagcataactcaccgattttgaagaagcgtaacgaaaaatacggtcttcgtaaagaatatcttcctcttctgcacctaaaaccatatccctcaccattttaaccaaccctccatctggaattgtcaattcatcaagctctaaattgtcgtcactaccagcagagtctcgggtccaagactcaacaaaactatcatctgaatccacaatccaatcctcccatttcttggtcacatcagcaacaacaccactatccccaatctcctcctgaccttcccgtagctcgacaatcgcctctgctcgtctcttccaagtctcgaatttctcttcatcagacatctcatcatcctttgcaagctcagtagtctcatcaacaatgtcgtcgtctctcaaaccaagccaattcccatcatcatcaaagaaaaacctctgccaccagcttcttctcctcttattattattacccgtatgactgttattcttctccgcactgggaacaaatctccaaagcttcttccttctcttaccccacaacgaaatcgaatcacaaggcttataacgaagaagagaagatgatgatgattcaggatctgggttttgactactgaatgataagcagtggcataagaccattgacgagctcatcaaggacatgaatcaaacccaacattgttcggactttaatctcaaagcaacaacacagattcttctacaaaacccagacaaaccagcatatctttctttgtaaattcaacaactttacaaagccctatacccggaatccggtgaagataagaattagggttcttcagctcagaaagttaccgagagagagaaccagaagctgaccccagttgtggatagtggataccagatgatagataaagccacgctcttttttttgttttgttatcttcttcttcaaattaagcttgtaaaatatctgttatccataaagattgcttttttggtttcaaataattaattacatttacatattattttgtagagtcaaaattgttgtttccgtcgtttttgattggctaaaaattgaatgactgtatatttacagaaataaattttaagtaaattccactttcttctttagtacagagttatggagttgctgaatggagtagaaactctagtttcgggaattcatcatcaccatcgtactaacgcgaagagaaacagattagttagatctgtcaagatcttaaactccgggaatcatgaaatccccagaaagtaaagtttccttttttgtgctctctattttctgtttgaggcattttaacgaacaccttccgtgcaatcactatcaattttgcaggtgcctgtgttttgatctttacgacaaattggttccatacaagaaagcttggtcatggcagaagagcattgtcgaggagaaaaagacattgattgatagaaaccaagactgcgctgatacagtgattttgttacaacactctcctgtttacacaatgggaactgctagtacagaggattatctcaatttcgatataaaggatgctcctttcaatgtttatcgaactgaacgtggtggcgaagtcacttaccatggccctggtcaggtaataatgtcaacaatgcattggaagtttctgtgtgttttctaatgagctcttcaagctgattataggaatgtttgaaaatgtagctagttatgtatcctataatcaatcttcgaaatcacgagatggatcttcattggtacctcaggatgcttgaagagattgtcatccgtgtgctttcctcaactttctccattaaagcttctcgtcttgacggtttaactggagtttgggttggtatgtctcatatttcaaatggatgattttgtaagtgatctaatatatattccgagattgatttctttttgtttgcaaatg

SEQ ID NO: 17849 - DNA, 3003 bp, Unknown
  misc_feature (1)..( 3003): 2750-1469P.txt file - cDNA_ID_1814276; gDNA_ID_1971823; Annot_ID_58373
ctattatcacttagagaaaaagtttcacgagtttgtttagctctcatacatatgtcgcagacactgtccaaaaaatctctactactagacaaaaaatcagtaggaatcaagctaattgctttttatgatgcgtgtcccaaacgtttgtgccatagatcatatgaacctttgacacttgtgctcacaactgctgccaactccatacttttaaacaaaaaacttccattctctcttttaccaactccagtcaccgtcctcgtaatgcggtcctgtatcacaagaaagtgatcagcaagctgcacaacacagtaattctcatcaatcatctgtccaacagagatcaaatctgaagtcaattccttgacatagaaaacggatttcagaaccaaactggaaccaaggcgcactgttccttcactcacagcaactcgcttattcccatcagccaatataatcaaaaccggagagatcttgcgcatatcagtcaacagatgtaactttccagtcatatggtgagctgcacctatatctaggatccaagaagagaaattagaacacgtacccgttagagtctcatgtccttgttcgttgggtttgatgttggcttcatcactttttccagcgttcaagagcttgagtacaccacgccactgctcatctgtaagaccattcaccgcatctcgatctctatcagtgataactcgattagcccgttccacagtggttaagccagttgtgacagcattcacataagaggttggagtgcgattttgtcctccattaaagcctagaccgggtttgcctctgcctcgaccagattgtcctcgcggtctatcgccccaccactctgggtatccaatgatcacaaagcagttctccggcgagtgaccgccacgattgcagtgcttacaaacgttcttgttggggaactttgcagaactaggatcaatctgtggacgagactgagtagcaaaagcagtgacatctagcttttcttccttagagtatctattgctcaacatgtcctcttcttgtctcacaatgttgtagacttcttcgagtccaggaagaggaacacgtgatgttaagctagaccgaattgtatgaaattgagtttcatcaagtccatacagaaattgttgaaccatgtcatcttctctacctttctcctgctcagcttcaagattacacacacatcttccacatttgcaggttcgaagaggacgatagttgttgatattatcccaaatcttgttgagttttccataatatccttcaacagtcataccctcttgtttacaagtagcaagatctgccttcatcttctgattctttggaccactagaaacagagaagcgtttacgagtgtgttcccaaagatctctagccacgtcacggtgggagatattcgtcaagagcgccgggtcaatcgtcatcttcatccaagacactagcaaagcattaatcgttaaccagtcctcgaggtccagagattctgacggcggttgtggaatggagccgtcaagaaaaccaaacttcttccgtgagcgcagtgctgttttgaagccacatgcccattcatcataattagtcgacttcaagatcgggtgggagatcacagctccagagttatcagcgaccgttaagtcatacggcgagatcgttcgccggacttcagttacaagaggaattaccggaggagcagccattactccaaaagaaactcaaactttatcgatttcaaatgaaaaaccccagctttagctctgataccatgacaaaatcaagagacaagagataaagataaggttttgtcttgatagcagcttaagtgtttctcagacacttatacaaagagaaagcgtttcagacctaaagggacaagaagggaaaagaccaaaaggggttacaaacagtacataaagcaacattaagcttaagagcaactaattgatgtgctctaaataagataagtagcaatatcttcaacagagagatctttgcttcgttttgttaatctttttgttgggtttgatttggtctttggttagttgcagagtgggaataagctccgcgtgttttggtgtcaacttgttgtcctagtttttagttttgtttcagttagttcctgcaatttctctttcacgtatttgtaagaagactgagtcttcatctttaggctatttaaagccaaacaactatgataataaaacatcgaagcattcagttttagtctctttgttctctcagatcaacacttttgtatgtttatgtagcaaatatgtcatagagatttgaagattgagaaaacactgcttgatggtagtcttgcaccgcttttgaaaatctgtgattacttggctttgatctcataggtcattcattcattagtctctttttcttcttttgtttcagttttggttcccattattacttggctttgatctcataagttttttttttaaggaaacccatttaaggattctacctttggagaagagaatttataaaaacttgacaaaaactctaaccttcaaaattattaatatttgttattaagaaatttaaaggattccttataaaaaacccaccaatggatttgctttaagatccattaagatacttattggaacctggaaccaaatcaaaactcttttttttttttttggttcggttcggttcagttccagttttatggcaaaacctaagtttaggggtaaattggaaaatattcaaaagttttagccaaatatcaaagtttttactaattatcaaaagacacactcgagaaattcataaatgggctaacttttatcagagagcccactaaacaatcggcccgttagccaagaaaatcgtcaccggcgtcttccattccaacatttctccgtcatcgtctctctctctcttttttttttgtgtgtgcaaaacgtctctctctctgtctcataaaatctcagagaagaaacatcgtcgggtcaggtcgaagaaaggagagaaatg

SEQ ID NO: 17850 - DNA, 3003 bp, Unknown; identical to SEQ ID NO: 17849
  misc_feature (1)..( 3003): 2750-1469P.txt file - cDNA_ID_1814276; gDNA_ID_1971823; Annot_ID_176274

SEQ ID NO: 17851 - DNA, 3003 bp, Unknown; identical to SEQ ID NO: 17849
  misc_feature (1)..( 3003): 2750-1469P.txt file - cDNA_ID_1814276; gDNA_ID_2926152; Annot_ID_139369

SEQ ID NO: 17852 - DNA, 3003 bp, Unknown; identical to SEQ ID NO: 17849
  misc_feature (1)..( 3003): 2750-1469P.txt file - cDNA_ID_1814276; gDNA_ID_2926152; Annot_ID_198169

SEQ ID NO: 17853 - DNA, 3003 bp, Unknown
  misc_feature (1)..( 3003): 2750-1469P.txt file - cDNA_ID_1814288; gDNA_ID_1971823; Annot_ID_58368
acaattgaattttttttagatttaatcggaactagacctatgccactaacgatgtttagttaatgttaactgagtgccgtcttggcattgtttgaaacaaatttggtattcaaatcttcaatgagatagtatcatactactaaaaaattgaaacttaggtcttttttggcattgtttccttatatggttaaacattaaatacttacatttcttcttcttgatatatcgtatggtggaggttatatcacctcatttatgttttgtatttaaggatcggtggtggagatctataacatcattcatgtttggttcgtgtctttgtagggagctgttgggagttctcgacacgatggtgacaaggagaatttaacactttgactgagcaagacttgattgattcattctaataaagaaaattatggttgtggaggaggcaaaatcgagaccgcggatgagttcatatataagtagcaatggtggtcttggtatcgacaagtattatccatataaggctgttactggagcttgcgacggcccctcaagattggtagttacaaacttacaatcatagagattaggtatcatgtctaacaaaaaacaaaagtaattcttgaaaaaataaaaataaattgtaagtagcatataataccaagaatgttatgagtgatagtatgagaaccagcctgtgactgttgtcattgattcaagcgatcggaaatttcactttatttatcaataatatatataacattcatatttttcaaaataactatatcttaatagaagtctcacgattcgatacttcgatcgaccacaaccagacgtagtctcgtgtgattgtgtgactaactttaaaaacaacaataatgaaatcaaaacacgaaaatctaattcttacgtccttgttttttaaattctcttacgtcaattcttacctttgcgaccaaaagaacatgttaaatttaaacctactaatttccgatttaaatttcttaatcttgttactatgaaccaaaaattacacaatcttttcccacggaacaaagattatttattagtatccatatacatacaaatatacaatacactcaagccactcatatttcgtacttgatcaagatattttcccccggtaaaatccaatttagaattgtacaacatatatattggaagttccgttgtgtcataccgtcacactaataatacagcataccaataatagagcgcaaacgtttcacattgaatagttcaccacatatcaacttgagtaaattattatgcttagagttgttgtctttttgtttttttattttttttgaatatctggaaattcaaactcaaagaccttacattttctagaggcgggatccacaccagattaaattcatatcctttgggaaagaaatctcttccaacatgcctcaaacccagtatttctaactgagagatttacctacataattcaacaatcatgtctattatgttttcaatttaggatatctaaaaatattgtgaagataaacgaaacaaaacttgagggaaaaaaaacagtcacgtgagtcatgagttataaagcatggataatgttggagatctaattaatctaattgaatgccacatcaaattaagccaatcagtggagaagatcaataataaaagtgaattggatctgccactacacttttagcatgaatatggctaaaagagattggtattggtaatggtatcgttgtcggagattgtcgtaccaattaaataacatgtaattattggatatatattatattgtgtcggcctagtcatatttgatgtgtaagtgcgagtgatttgagttagatatggggtattttacgaggaaaatattgaacaatttagggtattttaagggttgtagtttgagcatcacaagttaattatatttaggttctgcgtaaatttgactcaaaagattaagttatcaaaagaaacctcgtataatatgatccatattaattttcttttttttatatagaaaagttgaagattatgagtaaattggtaaactcgcgatattccagagttcaaaacgtaattttaatgacaatttggtgaatagtataaattaatatattaagtaaaagataacattctattcgatattggtttaatatgtcaactgttatatgtacatataagatgttactgatatattaagtgaataatatgatattcaccaaaaaaaattgtataatgaatgtgactttgagttgaaagtttgaaaacgaagagactataacatttgaaggaatctatggaatacgggtgtggaaccaatagtggaggccctcttcataaaccgagtttcccgagatccaaattgtgctgatggagcggtttctaacgttcttgtcgataatacttgcaagcttggccgaaggaacagaagagttaccatgacgtctaccattacgctcgcaccacaaagtatgaattgattatatggaatacataccttagaatgaaagtatgtagttttggatgagaatcatcaagtagaagaggagagattaaactccaacttgtattgtatctcagtatctgttgcgaagaattcctttagtgagagatgtgtattgataggtgaaaaggaaaaggtctcttactttcatattacgtgggcctcataacatagaccagagctgatagcatacctctctctatattaaatagatgggccaggcccaaacgtttacccatctgtatttattacaaagtacacgtggctgatggacatgtgacgatacgttttgacctattcaaaatattcaaactaatgaaaaagagtcgttgtcctctgacgcgtctctctctatctccttagattttcaaagttttcaacattcaacaaaatcattattttaattttgcagagacgaatcgaatcgatctcatctccaaaaatcttgtattcaaagtttgattttctgggtttcttctgtattatctcgatatttgaaaaaaatg

SEQ ID NO: 17854 - DNA, 3003 bp, Unknown; identical to SEQ ID NO: 17853
  misc_feature (1)..( 3003): 2750-1469P.txt file - cDNA_ID_1814288; gDNA_ID_1971823; Annot_ID_176264

SEQ ID NO: 17855 - DNA, 3003 bp, Unknown; identical to SEQ ID NO: 17853
  misc_feature (1)..( 3003): 2750-1469P.txt file - cDNA_ID_1814288; gDNA_ID_2926152; Annot_ID_139364

SEQ ID NO: 17856 - DNA, 3003 bp, Unknown; identical to SEQ ID NO: 17853
  misc_feature (1)..( 3003): 2750-1469P.txt file - cDNA_ID_1814288; gDNA_ID_2926152; Annot_ID_198160

SEQ ID NO: 17857 - DNA, 3000 bp, Unknown; identical to SEQ ID NO: 6409
  misc_feature (1)..( 3000): 2750-1469P.txt file - cDNA_ID_1814306; gDNA_ID_1621093; Annot_ID_55586

SEQ ID NO: 17858 - DNA, 3000 bp, Unknown; identical to SEQ ID NO: 6409
  misc_feature (1)..( 3000): 2750-1469P.txt file - cDNA_ID_1814306; gDNA_ID_2926160; Annot_ID_139696

SEQ ID NO: 17859 - DNA, 3000 bp, Unknown; identical to SEQ ID NO: 6445
  misc_feature (1)..( 3000): 2750-1469P.txt file - cDNA_ID_1814309; gDNA_ID_1621093; Annot_ID_55585

SEQ ID NO: 17860 - DNA, 3000 bp, Unknown; identical to SEQ ID NO: 6445
  misc_feature (1)..( 3000): 2750-1469P.txt file - cDNA_ID_1814309; gDNA_ID_2926160; Annot_ID_139695

SEQ ID NO: 17861 - DNA, 3003 bp, Unknown
  misc_feature (1)..( 3003): 2750-1469P.txt file - cDNA_ID_1814317; gDNA_ID_1621093; Annot_ID_55583
agagaatgagaatcttcgaaagttcgaattttgaagtggaagatgaagtgtgagtgggcttttatagaccaatgtgattagtttcgtaagaatattgatattagaattaggaccagttcaaaaatcgaacattatccaagaatacgtcgatgttcgaccagcactttgctcatgagtcatgacgatatcaacttggcaaattaatattgtaatcacgtgaaggaccatgcgacatcatcatcatcatttgtggggtaataacataaaactaatgccggcttaagaaaagtgtgttcatttcttaaacttaaatcacatttggaggactcattatagagctcatcacctttgacctgactttatcttgacctgaagctaccaggaatttatatctgaacttttgtttcctttttgacggcgaaataatttgtttagtataagttttgtccattctttacaggtcaaaaacataattaatactaataacgacgatattttaatgtttcctcttgcatgaaaaagcattgaaaatgacggagttgattcactttattggtggctgctttgggctcacattcaacatgtgccaattaagaattctgagggtcgacctacccatcctcattcactcatagcgacaattcaaaacagatctactggggctttaaataagggtaaggccttgttccgaactgggctttagtaagatattataacatttctgttccaaatacagtacatcaaaacttgaatctaacttatatcaacttcaataatcatcaattcatcagttaaaaaaactccttctttcatggtttagtttatcaaagatatgcatttgatttataagaaaacccaaagagtatttgttacctagtcgtccccgggtttcacggggttacaataagagaaacaaaatgggccacataatatttatttatttagtgattctgtcgtttaaaaaaaaattagtttaacacattgtcaaagtttgaactaaggaacttgtaactcaaatactgaaactttaaccattagactacatttttatgcaaattcggccaaaactaaataataatatgattagcggccgcaagcttatgttttgcttgcttggccttgtggccggctaaataacctaagtatataatcaataaattacataaacgaccggataaatcagaacttaattataatgttaaaagtaattaaatgaatgatgaccctcgtcgtctctcctcttaaaacacaataatctcataaatacaatttttatatgaagtcttcacaaactactataaatttcccaaagttgttctctctctttgtccactcgaagactcatggggataagaaggcactcgtgttatgggcttcggggctttttattgttcgccctttcgaggaccttctcacatgtttggacttttgagtctaaatgccttatttcctcacgaatgacgtgaacattttttcgtcctgaactcaaaagtatcaattacacacttcacactactaatggtcaagttttttcgtatttgaaactacaaatgtaagtaatatatgcgataaatttattatcctctgctagtaaaatccattaaaaaaaactaccaatgtgggtgtatgttttctttcagtatatataaagagttttcgcagagagcacatatcgatggtggtacatcaaatctgatcattcatatctaaataattgttgttgagttttctatatgtgtggaacgttagattgcttaagctagaaattgacacaagagtttgatcaccgagttcctgcctcctggcctctaaccggtacgtctcgggtgggaactgtctcccacaacttttcactatcaagcaaaaagtattacaagcactaatagaggtttctcttctccttgttacaaatttagaaattaactcacacacaaaagacaatagaaaaggagactataccgacacgaagactatgcccatatcttcacaattgtgctattatttaccgttctaatctggaaaaaaaaacagcgcacgtaggagaattgggcacgaagacatgaatgggacacataaaggatcaaaagagtcatcatgggtctgccatgatgaaagttaagaaagttccaatacgcgcgaaacaagattgaatgcgacttctctctataccaaaaacgaatctcccaagtcccaagtgaatattgtgagccactaacttgttattaacattttgagacaaaaaaaaaatttgtacgtgtttttgccaaacccacttggccatgaccaatcagaaaaagacaaggaagatgtgtatctatgtgtaatgaggaggccacgccatcagtttacttgcacttttccaactagacgtggcctctcaccgatctcaacctcactttcctctcatttctcaaattttattggctacgtgtttttgtgtttagcgttcaacccaaatatcgatatattcttctttttttttcacatttttaacgatttcgagcaaaataattcgatttatttgtataattttaatatggtagttttacaaataatgaaacgaatgaccaactgatttgttaggtgttacaataaatatggaaaaaatctcataagtttgaaaacatttattctgaggaaactttttcttccccaaaagaaaaaaaaagtttaaagtggaaaaaagaaaaaaaaggaataaaaagtttgaattcagtttttttcttttctttgatagatttctttctacttatttattactctactacacaccacacaaaaacaaaaataaaataagtaatcatagtatcccataaatcagtaaagataaataaaatccagaaaatactgggcctatcattttccttcaccaactctataaatgaagagataatcctacagttacacctcaaaccaactccatctcacttctcaagtcttataatttattcatttctctcttcttcatcgatcttcggcttttagaaaacctaatcagaaatg

SEQ ID NO: 17862 - DNA, 3003 bp, Unknown
  misc_feature (1)..( 3003): 2750-1469P.txt file - cDNA_ID_1814317; gDNA_ID_1621093; Annot_ID_170807
acgtgaacattttttcgtcctgaactcaaaagtatcaattacacacttcacactactaatggtcaagttttttcgtatttgaaactacaaatgtaagtaatatatgcgataaatttattatcctctgctagtaaaatccattaaaaaaaactaccaatgtgggtgtatgttttctttcagtatatataaagagttttcgcagagagcacatatcgatggtggtacatcaaatctgatcattcatatctaaataattgttgttgagttttctatatgtgtggaacgttagattgcttaagctagaaattgacacaagagtttgatcaccgagttcctgcctcctggcctctaaccggtacgtctcgggtgggaactgtctcccacaacttttcactatcaagcaaaaagtattacaagcactaatagaggtttctcttctccttgttacaaatttagaaattaactcacacacaaaagacaatagaaaaggagactataccgacacgaagactatgcccatatcttcacaattgtgctattatttaccgttctaatctggaaaaaaaaacagcgcacgtaggagaattgggcacgaagacatgaatgggacacataaaggatcaaaagagtcatcatgggtctgccatgatgaaagttaagaaagttccaatacgcgcgaaacaagattgaatgcgacttctctctataccaaaaacgaatctcccaagtcccaagtgaatattgtgagccactaacttgttattaacattttgagacaaaaaaaaaatttgtacgtgtttttgccaaacccacttggccatgaccaatcagaaaaagacaaggaagatgtgtatctatgtgtaatgaggaggccacgccatcagtttacttgcacttttccaactagacgtggcctctcaccgatctcaacctcactttcctctcatttctcaaattttattggctacgtgtttttgtgtttagcgttcaacccaaatatcgatatattcttctttttttttcacatttttaacgatttcgagcaaaataattcgatttatttgtataattttaatatggtagttttacaaataatgaaacgaatgaccaactgatttgttaggtgttacaataaatatggaaaaaatctcataagtttgaaaacatttattctgaggaaactttttcttccccaaaagaaaaaaaaagtttaaagtggaaaaaagaaaaaaaaggaataaaaagtttgaattcagtttttttcttttctttgatagatttctttctacttatttattactctactacacaccacacaaaaacaaaaataaaataagtaatcatagtatcccataaatcagtaaagataaataaaatccagaaaatactgggcctatcattttccttcaccaactctataaatgaagagataatcctacagttacacctcaaaccaactccatctcacttctcaagtcttataatttattcatttctctcttcttcatcgatcttcggcttttagaaaacctaatcagaaatggcaacggcgtcgtttaacatgcagtcagtgttcgctgctccttccggtgtattgactacacgcaacatcagaaacacaaaccaactcttcttcaagaggattgctccggtaggagtcagatgcatggctcaggtatatatacactaacctcatagtccttccacttccctacgttacttatttgacttttaatcctgaccgttccttacattgactatttttttagggcgatcctatcaaggaagatccttctgtgccctcgacctcgacttcggccactccaccacaaatgccacagtctcctcctccaccagttagcaagcctaaggtatgatctaatgatcaaagtcattaatatatatcactagctaaaaaaatgaagctaatgaataattttcttattgtctaggtgagtacgaagtttggagatttgctagcgtttagcggtccagcacccgagaggatcaacgggagactagcaatggttggattcgtggcggccatcgccatggagttatcaaagggagaaaacgtgtttgctcagatctctgacggtggtgtcgggtggtttctaggaacaacagcgttgttgacgttggcatcgatggttccgttgttcaagggaataagggcagaggcaaagtcaaaagggttcatgacttcagacgccgagctatggaacggtcggtttgcgatgctcggtctcgttgcgttggccttcaccgagtacgtcactggtgggactctagtctaaagctaaagctttttgtttgctagtttaaggacaaatttggagaatgattatgtaacgcatagattgatttaatactatgagttttaaacagtgtgtcaacatgaatcaaaatttaaaaccatgaaaaaaacattataaaaatttatttgaaaaagtacttcaaaagttttcttataagataatgtgaatggagaagaagaagtaaaaaataaattttagcttctatccaaggtttgagagtttatgcattcttttgaaatgaatcaagagccaagaataattaattatgctcttccttgttattatcgaccaatagagtcatcatgtgtctgccataatgaaagtaaagcaagttccaagacgaaacgaaattgaatgcgatttctctctaacaaatcacctcatctcaattctcaagcccatgggttagtctcatcaaagcccaatcaaagcgtcaatgcttcccaagaacaaaaaaaaatatattaagatgaacaaacaaaaaaacacttaaaagaggaaagatctggccactacaacactacacgatagtacgatcgatgaatataatcggaaagatttgagtggctcaattacatattgcttatacgacgtcgttttgagtagcatcatttcgttaatatttatgtaggagactgaaacaagacagagaaaagagaatctccgaggaaaacaaaagttgatg

SEQ ID NO: 17863 - DNA, 3003 bp, Unknown; identical to SEQ ID NO: 17861
  misc_feature (1)..( 3003): 2750-1469P.txt file - cDNA_ID_1814317; gDNA_ID_2926160; Annot_ID_139693

SEQ ID NO: 17864 - DNA, 3003 bp, Unknown; identical to SEQ ID NO: 17861
  misc_feature (1)..( 3003): 2750-1469P.txt file - cDNA_ID_1814317; gDNA_ID_2926160; Annot_ID_198714

SEQ ID NO: 17865 - DNA, 3000 bp, Unknown; identical to SEQ ID NO: 6441
  misc_feature (1)..( 3000): 2750-1469P.txt file - cDNA_ID_1814334; gDNA_ID_1621093; Annot_ID_55576

SEQ ID NO: 17866 - DNA, 3000 bp, Unknown; identical to SEQ ID NO: 6441
  misc_feature (1)..( 3000): 2750-1469P.txt file - cDNA_ID_1814334; gDNA_ID_2926160; Annot_ID_139686

SEQ ID NO: 17867 - DNA, 3003 bp, Unknown
  misc_feature (1)..( 3003): 2750-1469P.txt file - cDNA_ID_1814342; gDNA_ID_1621093; Annot_ID_55574
tctcagagaaaacgacagataagtaaaacattaaatgtttttctttttcttgacgcccaacatcagctgtgtttttgtatttaggttaaaatgttacatgtatttataggatataaacgataacttaaaacatgtgattttgtgcaaggttttccgaaaattctgtttttatgtttacgaaaaaaaaataaaatctcatatttaaaaagttttctgtttttatcattgtatttacttgatcttgttgacaaaataactattttacttattatttataaaatttaagttaattaatttgtttaagtagtgattaacttactgatatgaatatgattgccactagtatgcttttcttctcaagtcaatatgaaaaatgtgaaattgttagccctaagcatctaacggatactgggaagcatacggttcatgtttgtcactacaacaacaatttttattagtcccttataacatatctcttttactgatcttaagcatcatccatagacaattgcaggatcacaccagttttggatcatctaaattttttttaattttactaaaattcctccagatctaaatttcattaaatcctaagtctaatacattcggtatttgagaaccccgcctttgttttaagatttttaatcataactcataagcgcgtatgaattcggattatccaaaggctaaactacagaaccaaaacgacatagttttttgtcgtttagaatctataagcgcagacaaaagtcaactttagaatcaacccaaaaatagaagtcaaaattaaaaaccaaaaccctaagattttagagtagactctcttcgaatggagaaccactttgttacatcgaaactgatccgtgtctctctacacgaagttgagaaccagctcgaactatcactacgtcaagccttcgagaatctccagccgaaactacgaccaccgttctccttagaactcccagacccacaagagtatcttgagctcaataaagccatcgtctatggagttttatgcgaaccaaattcctctaaaacccacatcaagcacttacatgctctcgtcactgatgggtacgcgtttttcactagtttacttattggaatcgttgttgaattgtatgttaagcttgttgattccgctaagattcagcttatttgggtaactaaggagatgattgatgtttcaagtgtggggattgaggatttggttgtgtcgttgttgcgacgaattggaagtggggattatggtgatcataatgtttggctttgttctgaattagttagtttgtttcttgagaaatgggaatgcttgcttgatgattctccattggtgttgactagtgctctgtatagttttcttcggttattagcggatcattatagggttttaggcgttgtgaaactggagaatgtgaagagattggagatcaaattctgtgttaaaatgtttagagagcagcttcatttaagtttgaagattggacgggaccttatcctgttgttgcaggatctgtctcatgtctctgagttcagagagatatggaacgatttggtgtcgaaccattgctctgagatataccagttgaagacttctagtagatacttccttcttcgaatcactcctgagatggaaacacaattaaggtttttgctaggaaatgttaaattgggaagtcataagcggcatcagatatggttcttgaagaagtttcttttgggtccggagaaagaaacacttttgatagatatagtgagattcgtttgctgtgttattcatccaactaacgaaatcatcagatcagagatcatgccaagatgggctattataggttggcttttggaactgtgtaggcaaaatcatcacatcgagcgaagcgttatgctggctctgttttacgactggctcttctttgacgaaagaatcgataatattatgaatgttgaacctgctgctctcttgatggtatggtcaataccgcagtatccacacatcactcactccttacttgaattcttacttcatcttgtcgaaacttatgacataacccgtcgcgatacgattgtaagaggtttgacgtcagcattcagagaaattgagcgaaaaggagttattcggtcgctggatatattcctagcaaatcctgcacttgcaccagatttgaagaagaagctagcaaatctgttgtcatgtcatcaggagaagacggttcatgtgaatctcaatcaagttagtgttctttctaagcaaacagttctttcttcggaagctaatttaaaagattgcagcaccaaaattgttgatactcctgaccagaagttggacaattccgttgaaaatccagcaaaaaaccataaggttgaactgttcaaagagtttataagaccctcacggtgaacaaaacccttagtctatgttgtgaatcttctataaatcttcagccggaatcgaagctggactctctctactaacgatcaagagactcacactcgagaaaaccatacaatcaaacacttggaacgaagacggagaagaatgacacccacgtgattcagtgattgatcctatgtctcggcgagaacagagactagcaatccactatctcaagtttacaagatcatcaagagttctaccagaggttcacgactaagtgttctcactccaaagataatagaatgaacacagcttagagatgatctttctctattatagttgtaacaaactctcgataaaccaatataatctttaaccattaccggttcaattaaatttttggttaaaagaatctttaaccgtcgatagctctccttactgatatgatccaacggttaaataaaacgtcattgtgtttacggatataactagactaaaacgcagcgttttaaattaaacgactagacccattaacccgacattttgacccgtctttgttcttcctcaatttcaattcgcgttcgatttcaaacctcagcagattccgattagattttgcgtcgatg

SEQ ID NO: 17868 - DNA, 3003 bp, Unknown; identical to SEQ ID NO: 17867
  misc_feature (1)..( 3003): 2750-1469P.txt file - cDNA_ID_1814342; gDNA_ID_2926160; Annot_ID_139684

SEQ ID NO: 17869 - DNA, 3003 bp, Unknown
  misc_feature (1)..( 3003): 2750-1469P.txt file - cDNA_ID_1814354; gDNA_ID_1621093; Annot_ID_55571
ttttgattaataatagttcaataatatgagtactaattattaatttaaaacacaaatgttgtatggaaaaacaaaaacaacaactaaaatgacaaaaaattgttcaaccatcttataaactttaaacgtagggagcattactttatacttgttgtaaaaacgataatgcttattggtaaaataacccatatacattttgatttgtcaatatgttcatatatgatctagtttttgttctcgttgtcgctagatagacaataaaatttcttagtggacagtgattgtggaatgaatatacgcccaacacaaatataaacatcaaattaaggtgcatgcggtatgggaattgcaagttaaatgaacatagttatgcgtaatttcgagaagggattaattgtattaccttgctcgaaataccacatgggccgtgtccccaaaagcccatttaaaatggtttttttttttttttaaatcatctctttagatatttttttcaactctttttcaacaaaatatatagtttcatatagatatttgtatttataataaatgttaaaatgaaattttacacaataattaaaataaaataaatagaaaaaatgttatttgagacagcatatcacatggccttaccatacttcctgcatccattattccattaagaacactcttcaccctcatccacatgcatctccctccccaatttatttactattgatcataattgtacaaacctatacttacaatttatatatgtgtctacgagaaaataaataatattttacagtgttttgtctattattttgttctatagtttcttgcaaacaaaacattacttttcacgcaaaaactgtcgaaatatttataaaaggaaattgttaattcttcgatacaaattgaccattaatatttgatcatctattctagacatctactctaccatataccaaacctttacacaaaaatgaaatattttcatgaaaactaccccacaactggggtgatcgaaaaagcttgatctatatgatcaacatgtccaacactagtttcattttttctactatgatatccgatgatccaatctgaactatacaaaatgtatctagatattttcttgaatcaatccgaataacgaatagttgcaaaacataaacctagcgtgatcgtgtggtagaaggacgaaggtcgagaagttctcttactcttatgattttctctttactcatttgaccgtaagagaaagaaacggctaggatctcgcgtacgcaactggcggagacaaatcaggaccgttgaaaataagaaagaagccgcgtccaaaatctttgtgtcccacctttgtccccttgcctctaacttgcctcctcatgctccccgacaacgtcataattcatatctctctctctctctcgttaaccctaatttcaaagcatctttccttatataaatctctctctctccctcaccattacacaacacacacaagcattttcaaggatatcaaatcacaatcccaagaagagcaataacaagagaagaagaagtagttcaagaattaaggaagagagcttctccgttaaagtatagtgagagaatatggaagtcaccaatgggcttaaccttaaggacacagagcttcgtttgggattacccggagcacaagaagaacaacaactagaactttcttgcgtcagaagcaacaacaagcgcaagaacaacgactcaacagaagaatctgctcctcctcctgcaaagtaagttgagatctgaaagttatagttttaatatccaaacttcttgatatcaatcggtgtactaataatgaatcttgatttgtaaacttcagaacacaaatcgttggatggcctccagtgagatctaaccgtaagaacaacaacaacaaaaacgtgagttatgtgaaagtgagtatggacggagctccatatctccgtaagatagatctcaagatgtacaaaaactatccagagcttctcaaagcactagagaacatgttcaagttcacagtaggtgaatattccgagagagaaggctacaaaggatctggatttgtacctacttatgaagacaaagatggagattggatgttggtcggtgatgttccatgggacatgttctcttcatcttgtcaaaaactcagaatcatgaaaggatccgaagctcctactgccttatgatccattgtctcaaaacaccttttggtcgaggcaaaaacaaattctactttgtttagataaaaaaaagtttggtgtaaagaaagaaaaagcaatagggttacaaatacgttatatagatgtaaactagctttggttaattctgtaaaagatgagttttgattatacgaagtttatatgtatgctcaagatatttgatactaacataaccaataaagtttagtatttgatactaacataagtttgggacatagtgaaagatataaaattttggattaagaaatgggcaatgtaatggatatcactatcgaaagttttcaacttttttttgttttgtttaatattagatggcgagaatctttagtcactacccaataacttgctccaccaatttgggatttgacttgagctcttctcatcgtcatcttcgtcgccttcttttccgatctactttcatcactccttcactcactcagtctccgtaagctcttcttcttcttctctcagtctctgtttttcaatccgaaaattcattactttgatggtgttaccacgaattgagaatcattgatggtattgctttgatgggtatcgtttatatgacagtttttaatccgaaagtttattactttgattggttttttgtttgttctgttttaacgaatttgaagccaatcatatctactaagaacttgattggtttagagttatggatgatgaatctgattaatggaattgttttgcaatcattagtgatttatgagatacttgtttcagttacaagaattggattcgaagatttgtagctatg

SEQ ID NO: 17870 - DNA, 3003 bp, Unknown; identical to SEQ ID NO: 17869
  misc_feature (1)..( 3003): 2750-1469P.txt file - cDNA_ID_1814354; gDNA_ID_2926160; Annot_ID_139681

SEQ ID NO: 17871 - DNA, 3000 bp, Unknown; identical to SEQ ID NO: 6438
  misc_feature (1)..( 3000): 2750-1469P.txt file - cDNA_ID_1814358; gDNA_ID_1621093; Annot_ID_55569

SEQ ID NO: 17872 - DNA, 3000 bp, Unknown; identical to SEQ ID NO: 6438
  misc_feature (1)..( 3000): 2750-1469P.txt file - cDNA_ID_1814358; gDNA_ID_2926160; Annot_ID_139679

SEQ ID NO: 17873 - DNA, 3000 bp, Unknown; identical to SEQ ID NO: 6437
  misc_feature (1)..( 3000): 2750-1469P.txt file - cDNA_ID_1814371; gDNA_ID_1621093; Annot_ID_55565

SEQ ID NO: 17874 - DNA, 3000 bp, Unknown; identical to SEQ ID NO: 6437
  misc_feature (1)..( 3000): 2750-1469P.txt file - cDNA_ID_1814371; gDNA_ID_2926160; Annot_ID_139675

SEQ ID NO: 17875 - DNA, 3003 bp, Unknown
  misc_feature (1)..( 3003): 2750-1469P.txt file - cDNA_ID_1814397; gDNA_ID_1621093; Annot_ID_55555
atgataaagatacgaaacatctgggtgttgggcaagatgtggacgggaatacacctttgcaccttgccgtcatgaactgggactttgactccattacttgtcttgctagccgtaaccacgagatactgaaattacgaaacaaaagcggcttaagagctagggatattgccgagtcagaggtgaaacccaactacatctttcatgaggtatttctgattccgtttcatacaacacatttgatccctcataaatgatttatagcttgacctccatatttttggaattacagaggtggacactggcgctcttattatacgctattcactcaagtggtttcgaatctgttaagtcattaacaatacagtcagtgccactagaccctaagaaaaacagacattacgtcaacgctcttctcgtggtagcggctcttgtagccacagtgacgtttgctgcaggctttacaataccaggtggttatatcagcgatagcaaaaaaccaaacttgggcagggcaactttggccactaacccaactctcttcatttttctgctttttgacatcttggcaatgcaaagttctgttgcaacaatatgtactcttatttgggcgcagttgggtgatctagcactcatcctcaaatccttacatgtggccttgcccttactacttttttcattactatgcatgcccgtagcattcctttttggcgtgatcactgcaattgcccatgtgaaatggcttttagtcaccattagcattatatctggtggattcttccttttcgcaatctttatccttggccctcacgtcatgctacagcgctcacaccttccgcccagttctggtatatttctcaagacttttatgctgactatagacatatctgagttgtttgtgattttgatcaaagcttgttttggttgtgtggcgtgttccgaataaatcatcaaaagtttatagatcaaaggatatttttcttctcttttttttttctttcaaaaagctacgagatatgctggtctctagctctgagaagcggcatcttgatcatacaactcattcgaagtcctatcagaattatctgtagttgtaataaagcgtgaaaagtatatcattcgaagagattttcctctaaaataatcgagtgatattttattattcggtttagtggataccagtttactaatctctcgaatttatgaaccacattcaaaggagatgagtttaacaaaaaaaaaaggtaaattgttttttattctcgtcgtgcgttccacatgagtcgttttcaagagcaatatagacgatacttcacaagaattattatttttgttggggtataaaaatttgaagatacgtttggcaacgacaatacgacgttagattgttccaagaggtgcaaaaacttagggaccctctttattcgttcactgtaaccactgaccacaacatgactaggtagactcttctttttgtcaatgttgatgtttatacgattttgatgagactggctctatcaagatatgaatctctgatcatatctccactaatctttcatcttgttattccctcatttacttttgatttccttctctctctctcttttttatgtatacaaatttttctttatttcgcttcactaaaccccaccatgtaattgtgtgagttttggcgaagtggcgcaacaccgtagagcacaccaacactaacccaatccattttatgaccgtaaattttgttgttgattagtgtatttttttcttgtttagttattctgagaagtaaattttttttttacaattagtttttaaacatagtaaaataaatttatgacagattataatattattttaaaaatcaataatatctaacaaattaaataaacaaatcacaaattactatattttaaataaatattgataattttaattatattattttgtttattggttaactcgcaggatatgcgagttaattcatttgagattgtaatccgccatatactaactcgataaccctgactttttagaaatctaaaagtataaccctataataaaatagattatgtccaactcgcggattctaaacctgaattgacatggcggaaccattcataaaaccataccaattcttgcgttttggaaagttggtttccttttcatttctttgaatttgatcctagattgtgtagttctcaagctcatgctcttgctcgtcaaaaacgtatcaacgatttgcttttcctttagacgttcttgcatcggattggtttactcaactccactcgatgaaaaagttactatcttaaaaagaacaaatgcaaattcaataaaattccccaatatctacgcatgaaaatatgattctgtcttttttttgtttgtctatctttcaatactttaaaaagtgtatttctagaggcgatttgtcatttcccgaataggaatttgagtaaaaaaaaacactctgttttttatttccactaatatcaaatcggcgaatatagttcccaccattcttatctccttgtcgtcactcggaattttttaaataataggatcgctttaataatataatctctataatttatagttccttttccaatattggcgtctccgttgaagctttccacaaatctcaaatttgtttggagactctcaaatgtatccttctctcgacgatgatttcgtctctgatttgttttgcttcgatcaaaggttcgtcctttcgcactcttctcttccttcaccttcctctgttttctctatctctttcgattcagttgttttatcgaatttgatcccttttttcaattgcaaaatcatatctttaatgttcaattcgatttctgtgaaaagtgttgttgtttttttcgcatttcagggggaaaggttgtgtcttttgatgataatttgacgaaccctaatgtatctgaaagctgttaaattgaataggagaagaagtagctttatggatgttgttgtttatatttactcctattgatg

SEQ ID NO: 17876 - DNA, 3003 bp, Unknown; identical to SEQ ID NO: 17875
  misc_feature (1)..( 3003): 2750-1469P.txt file - cDNA_ID_1814397; gDNA_ID_2926159; Annot_ID_139665

SEQ ID NO: 17877 - DNA, 3003 bp, Unknown
  misc_feature (1)..( 3003): 2750-1469P.txt file - cDNA_ID_1814399; gDNA_ID_1621093; Annot_ID_55554
ggtagctgctcttgtagccacaatgacgtttgctgcaggttttacaataccaggtgggtttaacagctctgctccacacttgggcagggcaactttggccactaatccaactctcttcatttttctggtacttgacatcttggccatgcaaagttccgttgcaacaataggtattcttatttgggcgcagttaggtgatccagtgctcattcgctcatccttacatgtggctttgcccttactgctttttgctttactctgcatgcccttggcattcctttttggcgtggtcactgcagttgggcatgtgaaatggcttgtagtcatcatttgcattatatctgttttattcttttcttgggcgatctttgtccttggccctcacgtcatgctacaacggtcatacgtttctcccaagtacgctggtgactttctcgtgacttttatgcagtataaagacataattgggctttttgtgtctttgataaagtttcttttttgtggttgttattaagagtttgtagcctattcaaaggcattcttcgtatgaaaaaatcatcaaaagtttattgatgaaaggagatttttgttctctttcaaaataaaaataaaaagctagatatgatggtctctctgagaagcggtatcttggtagctttaactgatagctcaactcactcaatccgtagtcatcgaacaccgacttcacaagcttgtcgtgcgttatttccgtatctatttgcacaactctacaccatttatcgacggtgttaaatacaaattctttacccaatcgtatcgagagaaggatgaaagaagaatgaggaagacggtgatgaattggaaattccgatgatgtgaaaaactcatgtgaagaagacgagttgaaaaaaaaaacgtttcgtatttcctttgatgatgatgacatggactgttgcatccgacatcatttttttaattgatgaagtgacaagtaagccaccaaacaaacatgaaaatttgcctaaataaatcagccaaataaagttatatgttagtcgcaacatgaatactattacagtaattaaaaacgaaaaaacggcaagttacttcagccgtttagcaaacaaaataaaacacacacacatgattcgattgctaaccaacacaagaaacaaaacaaacacatctttgcctataagataatgtgtataaaccatacaactagtgatgtgacggaggacaatgagaagactatttcattatgctgaaccgtccttgacgtcttagcagttagcactgtaaaatgggttcatatcatagtaaacgaatcactctacacaacaattacatgctaaaaactaagaagctaagttaccaaattctctatagaaatagcaatcacttacaataaccaatgctacataacaacttttgagtccataactgataaattgatagaaactgtttgaatttgcaaacccaaaaccgtttcttaggatggagaaatgggtttgtatttttctatttccgatcaaggaaaaatatatcaggcaacaactgcggaagatagggcattttgggatgaaggaggaaaccatagttaacaagcggaaacaatttcaaaggttgatttcaaagatcataaagtcaaagtcaaatccccatagagagactcggttacggaagtgttggtatccgaatatccgatagtcatagcctcagaacttatgttagaatcaataggtttaaccatgcagtgtgcactttggaaatcaagccaagaaaagctatccacgcaaacaatttgcgttagagcgaaatcggataaagagaaagaaaatataggatttaaaaatcttatagcgagtaagacttatttgaaacatcgtcaaatttacttcttttggtgtatatttctcattatatggcgtatatatctgtttatgtaagaaattgtttccaaaaattactgtatactgactttgtaatcttgttttgatatcaatgaatttataaggaaaaaaataaaataaaaatataaagtatgatgtacatgtaaaaaaagttgtttcaagcgtaattgttttttggctagagaatgaatatacagcaacagtaaactaataaacttgcgatgaactaaaatttctggtattcctacaatcaatgaatcactaatttatctataagttttagctatatccgcttaaaccccgcctcaacttgctctctggtctgggtatagttgggctacaacagtgaaaccgtaattaggaaagaaatgataaaaacccaatccagaagcttactgcaagataaagagaaagatcatgaagaggtaggagtgattcatataacaaacagggtcacgttgtcactttctcccagaaaaatacaaatttagactaactatataaggagacgacttcagagtcttctaatgggttagtataactcgggtcatcttttaatctctggctttaaagacatggtaagattccatatatatgaaaactctgtgtgtggtggattgcttttttcatttaaggcaaagataggttttaaggcagaagacaagaacgacctttggcttatttataggagaccaccactttcacttgagtcgagacagtaacgacatttagaatttgcattactcatcttgtcactttctcccaggaaaaaaaaatacaaatttagaccaactatattaggagacgacttcaaagtcttctaatgagttagtaactggggtcatcttttaatcgccggctttcaagacatgtacaatttcatatgaaaactctgtgtgtggtggattgcatccaagacagttttaagacagaagataagaacggcctttgcttatttataggagaccaccactcctctcgataaccatgactcgagacattaacgacttttaaaactaagggacgaaccttaagcaaaagctcttgcattactcaaattcttctgccacttggtaagtctttttctctgccccttctgcatgcaatg

SEQ ID NO: 17878 - DNA, 3003 bp, Unknown; identical to SEQ ID NO: 17877
  misc_feature (1)..( 3003): 2750-1469P.txt file - cDNA_ID_1814399; gDNA_ID_2926159; Annot_ID_139664

SEQ ID NO: 17879 - DNA, 3000 bp, Unknown; identical to SEQ ID NO: 6421
  misc_feature (1)..( 3000): 2750-1469P.txt file - cDNA_ID_1814415; gDNA_ID_1621093; Annot_ID_55550

SEQ ID NO: 17880 - DNA, 3000 bp, Unknown; identical to SEQ ID NO: 6421
  misc_feature (1)..( 3000): 2750-1469P.txt file - cDNA_ID_1814415; gDNA_ID_2926159; Annot_ID_139660

SEQ ID NO: 17881 - DNA, 3000 bp, Unknown; identical to SEQ ID NO: 6428
  misc_feature (1)..( 3000): 2750-1469P.txt file - cDNA_ID_1814419; gDNA_ID_1621093; Annot_ID_55549

SEQ ID NO: 17882 - DNA, 3000 bp, Unknown; identical to SEQ ID NO: 6428
  misc_feature (1)..( 3000): 2750-1469P.txt file - cDNA_ID_1814419; gDNA_ID_2926159; Annot_ID_139659

SEQ ID NO: 17883 - DNA, 3000 bp, Unknown; identical to SEQ ID NO: 6427
  misc_feature (1)..( 3000): 2750-1469P.txt file - cDNA_ID_1814423; gDNA_ID_1621093; Annot_ID_55548

SEQ ID NO: 17884 - DNA, 3000 bp, Unknown; identical to SEQ ID NO: 6423
  misc_feature (1)..( 3000): 2750-1469P.txt file - cDNA_ID_1814423; gDNA_ID_1621093; Annot_ID_170757

SEQ ID NO: 17885 - DNA, 3000 bp, Unknown; identical to SEQ ID NO: 6427
  misc_feature (1)..( 3000): 2750-1469P.txt file - cDNA_ID_1814423; gDNA_ID_2926159; Annot_ID_139658

SEQ ID NO: 17886 - DNA, 3000 bp, Unknown; identical to SEQ ID NO: 6423
  misc_feature (1)..( 3000): 2750-1469P.txt file - cDNA_ID_1814423; gDNA_ID_2926159; Annot_ID_198658

SEQ ID NO: 17887 - DNA, 2231 bp, Unknown; identical to SEQ ID NO: 6424
  misc_feature (1)..( 2231): 2750-1469P.txt file - cDNA_ID_1814427; gDNA_ID_1621093; Annot_ID_55547

SEQ ID NO: 17888 - DNA, 3003 bp, Unknown
  misc_feature (1)..( 3003): 2750-1469P.txt file - cDNA_ID_1814427; gDNA_ID_2926159; Annot_ID_139657
ttcgatagtattgctcttacgtttttggttatacatttataaaaacaaaaattgtatttgttctattatatacaatatatcaattgactaacgcatgcgcagttggtttggatctctattgatttgcaagtaaattttttggatttatctttctttctcacttcgtttcttacattattagagaatttgacttacatcgcgatgtatgttttacaagcaagtagaatcgatgccactttccttagatattagcgtagtagacaatgtcaatgatcgagaaatatacacaaaagtacctaacttttgtcagcatgaacagatttgaatgatattacgtaattgtagagaagaaacttaccttaaaattaacacctctaaaaggtaagaatgtgttagtagaaaatggctattcatattgtaaaattaaaaggccgtataattagtacagaggaattcgacttggaaacagaaaattagagattaaataaaacacgaattttaaataacggaaataaaactttagtgtaaattatctatacccataatatatatagtaccagaatctaagtataataaagtaaaaaaagaaaaactgaagtagcatccttgaccgtcaccacatcttccgccgctggctgcctggctccaccaccaccactactacattcaccggttcattgtcaataccaccaccaacaggtccttctcctctatcaccacagcagccaggaccaccacagcagacacaagagaatatcatctcatctaccattttgcccgcacagctctcaattaaaactaacacaaaggccaaaacacataggactatcatggtaatataaaaagagttgttcatgttctcttttgtgcaataaggagccaggaaacatgttcttctatttatataatttggttttattgtaacacattagtttcgggtcagctaatggcatgattatcatatagccaaaatagaaccttcattttccattcacgttgcggggaatatagaaccaccaatataccgaggagaaacttctgtatgctcttaagaaatttagtgaaagttagtatggctgaagttaaaagaagaaaacaaataatatttagtattatcaattcatttctatacgtatatgtcattttaatttgccaagctcatatataacactgatttgcagcacaaaacgataaatgatttttcgagatccgaaaatagaaagtggtttttagaacttaaagagtgttatgtctactttgtcgcaagttatagagaatactcaagggcagcctaatgaagaaagattggttaaccaaattaaaagacatccataagaccaagtcctatttaaattaaaaaccaggaccatttctggtagattcaaagtatatcacagtattgaagcaggacaggtaccaaacaaaacaaaaaaaagtagatagatgaaacaacaacttaaaagagagatgttccctttcccttcttgtctccaccgatctcaaagtgcttgcacctctgcaaaaaccacacacaaagtgtaagaaacagaactgagactaaagagtgattaacaaaggtaaagaatgtcgcagacattaccttaatcgggcgttgcgagaaatgcttgcagctttggcattgaagcctcagcacaatcttcttagttgtcttagcctgttccaaagaaagacaaataatgagcaaggtccaattaacaaatcattcctataagacatatttcacagagtcaattctgaaatcctaaattggttctcacatagaagacagtaattagagatcaagacaaggaaaagcgagtataccttcttgtggaagacgggcttggtctgacctccataaccagattgtttacgatcataacgacgctttccttgggcagcaaggctatctttacctttcttatactgcgtcaccttgtgcaaggtatgcttcttgcactccttgttcttgcagtaagtgttcttagttttcggaatgttcacctacagaaaaccaagtttaaaactaccacaagatacagtttcaacagcatacagaattaattacgatcatagaagtgaatctaaatacgcccttcagaacaaaccctaaaacttgttaataaaatttcctgcttctcctaaatcattcagaattaattgctaccatacgatctgactactcaactagtcaatattgataaccattttgtgaatcctacaagtccctgaagtacaaatccttcttaattctcctaaaaatcagaacagaattgcagcaacacaaatgaagatacataacactatatcattttgaatctctggtagattggagctaaaactcttcacagagacgaagtgaactgaatcttcgaatttacaacacagaatgcaacataacagattctaaaaatcacaattagactctaataattctcgatttaagatgcaaaatcagaaataaacaacttaaagaagaagaaaaatcacacagcagatctataatcaataatctcgttcttcaatagtaaccaaggagaaatttagcagaaataaagaaagagaagagagtcaccattttcgctcttcggtgaagctcgtgccgtcgtcttccactgccgcaaaacctttaataaaaacctaaagtaacagagcttataagagagacatttgagaaaaccctaatactacaaacattgggcctctataaacacaaaaagcccattaacttaatcaaaaagtcaggcccatctcacttcccttttttaaaagaaagtaaatatattctagttgccgaaaataaaaattgttaataatcagtggcccgtggacaaaaactagccgtttagagatacaacacaacggttatgtttgtttctttgtttcaaacttcaaacctcgtgaatcactcacaaaccctaatccccttttttattttctctctctctaacgctctctgaatctcaatttcaatttcactctttcgaaacttcttcaacaatg

SEQ ID NO: 17889 - DNA, 3000 bp, Unknown; identical to SEQ ID NO: 6472
  misc_feature (1)..( 3000): 2750-1469P.txt file - cDNA_ID_1814431; gDNA_ID_1621094; Annot_ID_55625

SEQ ID NO: 17890 - DNA, 3000 bp, Unknown; identical to SEQ ID NO: 6472
  misc_feature (1)..( 3000): 2750-1469P.txt file - cDNA_ID_1814431; gDNA_ID_1621094; Annot_ID_170904

SEQ ID NO: 17891 - DNA, 3000 bp, Unknown; identical to SEQ ID NO: 6472
  misc_feature (1)..( 3000): 2750-1469P.txt file - cDNA_ID_1814431; gDNA_ID_2926162; Annot_ID_139772

SEQ ID NO: 17892 - DNA, 3000 bp, Unknown; identical to SEQ ID NO: 6472
  misc_feature (1)..( 3000): 2750-1469P.txt file - cDNA_ID_1814431; gDNA_ID_2926162; Annot_ID_198851

SEQ ID NO: 17893 - DNA, 3003 bp, Unknown
  misc_feature (1)..( 3003): 2750-1469P.txt file - cDNA_ID_1814438; gDNA_ID_1621094; Annot_ID_55623
gattcctggatcagcaggattgattgcagtacaacgaacataaagaacgaaaacaataagagcctgcaaaacaaacacatgacacaagaagcaaaagggtatcagatatgcaaaactaccatgtacctacctagctcttatcaattccttatcattctctaaagcgattctagtacataccacaggagagtaaacaccgagaagaatatactcccagatgcgtcctccaacaaaaggagcgaaaaacgcatagtatgctacactcaataagcagaacaccgtaatcgcaaccacctgtttcatgaccaaacgaaacaaatgaactaaaacccaaatgttagaaattggagaaaatcagagaaaggttgaaataaaagacctgaaatttgtgagcaggaagttgccaaccatgtttcctcaccatttttgcttcctcccaaagcttgaacacactcacgaatcacaaaatctaaacgaaaccctaacgccgccgcaaatcgtaaaaagagacaattttgcttgcagttttgcgaaacccagaaggatataagagaaaccaagctgagaaaatatcttcttggtcttcgtatctctccctatctaactaactatggtaggtcagtcatagtcaagtgacgaaagaggaaagtaaactcctgtaatatattaaattgaaaataaaagaaaaataacgaatgtgaaattagagatgacctaagcgaattcaaagttagcaaatttagagtcgaatagcgaagaaaaagcttactgtgtagccatggcggagaccaaagtaactggagaaggaagaagagagagagaaatggaagaaggaataaaagagagaatttttagaagaaagaaaaaagacaaaatagaaaagcgttgacaggctaaaagagcgagacggacaaatgaaagtggttactggttactattagtaccaacgctggatttttagcttacgtgtctatttcacctctttgatattttctttttttccgtagcaaattttaattatttttaaattatataaccattattaatgataatatggtagcttaaagtattaattaaataatataatttttatataatattaaaaagttctcagtaatacttaaatatatatatattagaaagttatttaatgtctaaatttcagatttttagaagaatttagccaaattaaatcaaatattaaaagattttgctgtttaaaaaggaattaaatcaaaaaatattaaatgaattaaaaacaattatcttccactccacataaaaaaaaagatatgtgagtagaaaagaaaaaaaatattaaaagataagatgcaaaccctgcatttgtaactccataactaaatctaaaagcaagtgactcagagcacaactctcgtacaatttgccctacagttttatttatatttggtggcaaatgtcagctctgttttgatgtgaaagccatcaacatcatgtaattgattagcatattacatatagaatatgagatacccacatatatatagaaaaaatgacggtaaagattaaaaaaaaaagtatacttgatttgtcataataagaataagcatgtatctcatatgtacaaaaatagatttaatgttatttattttaatattcttgtattttttgttttatttgaacttataataaaaaaaaaactgtagatattaatagttatgtaaaaatcataaaaatagatgtaaaaatcatattaaaagttatgataaatttagtttactacataactcttttgaaaaatgtggaaaaattatagtaaactgtatgaaaagaagattatcatacagttaaaattaaaatcttttagaacatgtgtagtggtggtttctaaccaaagtttttaatttactaaagtaataataataaaaaaaatatttaatttgaagagttttttaaaatagttttttcaaatcttttaaattaaaaactttctcatattttcttagaaattgttttaattaaaaaaatattgtttattattttattattattaatgtaggcgagagattttggtaaaaaatcacaatgctgatgcttttaaaataatcaatttttctaagaatacataaatcagcaatgcttctcacacgccaaacgtaaatatagacgcgattatgaaaaaaaatcgcgtcgaaaacaaacgtcattatgtcattacacgtgttaccaatcaaaaagcctttatgtttaattagtaaaggctagtaagagatttacaacaaatgaaaaaaataaaaataaaaacataatccaagatccctaaaaattcccaaaaagaaccctagattttctcctctcacgctccttggttcctcactcgcttttgcttccccactcgcctgcttcgtgttcttctttgctttgctcttttcacgtcagaattttgccttccctccctttgtctctctctgggtggccgagaaaatacagtaaaaagccctcaccaatccaaaagtttgacatttcctgaattttgtagtctcttcatttgaattctcaggttttctcttaagatacattaaagtctctgtcttttatgctgatactaatgaaagttcagttctttcactgaaattttagaaccagaacttttctactactagaagtatgttgtctctgactctcttagtttgagttctcaggtctccttctcttatttgtgtgaaattttactcttttttggctttagaaacagaacttttctactattagaagttatgttgttgaaagttcttcactttcatttgattccattgatttcatattgctttgtgtgtttcaagtttgatgtttttaggtagaagatgtcgcgctggttcttatgaagtttggttgtgacatttttcaggtgctaaggtggattatctagtagaaagatttcagtttccaatttcatggaagcccatagtggggtagttgcttttgagtgtgttagtgaatccatatgtggctaaggttaggatg

SEQ ID NO: 17894 - DNA, 3003 bp, Unknown
  misc_feature (1)..( 3003): 2750-1469P.txt file - cDNA_ID_1814438; gDNA_ID_1621094; Annot_ID_170900
aggtatctagctttggaagaaggagattctcaagtactgcttgagtacttcaagcgtatcaagaaagaaaaccctaaattcttttatgctatagacctgaacgaggaccaacgtttaagaaatctgttttgggctgatgccaagagcagagatgactatttgagtttcaatgatgttgtatcctttgatactacttatgtcaagtttaacgataagttgccactagctttatttattggggtgaaccatcactcccaacctatgttactaggctgtgcattggttgctgatgagtctatggagacttttgtgtggctgataaaaacatggctacgagcaatgggtggtcgagctcctaaagttatactcactgaccaagataaattcttgatgtctgctgtttcagagctcctaccaaacactcgtcattgctttgcgttatggcatgttttagaaaagattcctgaatatttctcacatgtgatgaaacggcacgagaatttcttactgaaattcaacaaatgcattttcagatcttggacagatgatgagtttgatatgaggtggtggaaaatggtcagccagtttggacttgagaatgatgaatggctgctatggttgcatgaacatcgccaaaagtgggtgcccacatttatgagcgatgtgtttctggcaggcatgtcgacatctcaacgttcagaaagtgtgaactctttcttcgataagtacatccataagaaaatcacgctgaaagagttcttgaggcaatacggtgtgattctgcagaataggtacgaagaggaatctgttgcagatttcgatacttgccacaagcaacctgcattgaagtccccctcgccctgggagaagcaaatggcaacaacttacacccacacaatatttaagaaatttcaagtcgaggtcttgggggttgtcgcttgccatcctagaaaggaaaaagaagatgaaaatatggcgacgtttagagttcaagactgtgaaaaagacgatgactttcttgtaacgtggagcaaaactaagtcagaactttgctgcttctgtcgtatgtttgaatacaaagggtttctttgtcggcatgctttgatgattctgcagatgtgtggtttcgccagcatcccgcctcagtatatattgaaaaggtggacaaaagatgctaagagtggagtattagctggtgaaggagcagaccagatacagacccgagttcagcgctataacgatttgtgtagtcgagccactgaattgagtgaggaaggttgtgtgtcagaagaaaactacaacatcgcattgcgcacactagtcgagaccctgaaaaattgtgttgatatgaataatgctagaaacaacatcactgagtctaatagccagcttaataatggtactcacgaagaagaaaaccaggtaatggctggggtaaaagcaacaaaaaagaagactgtatataggaaaagaaaggtatgcttttactgaagcttctcgccaatctaaacctacgtacattttcttagcttcaaaggttaaaaagaagatactcaaattgatcttatgcagggacaacaagaggctagccaaatgcttgaatctcaacagagcttgcaaccaatggtttgtgctttgatttgatcttctctaattagtttgatcattgtaactgcacattgctttatgagattaagagtaggatgtcttggatatatggccttatagttttaacattttgtgcaggaaactataagttcagaggcgatggacatgaatggttactatggtcctcaacagaacgttcaaggactggtatgctatgttagttgattaatacaaacctggttaagccattcgacatctattataaaccctaatactaaacctgtttaaactgtggatatagttaaatttaatggagccacctcatgaaggctactatgtagatcaacgaaccatccaaggcctggtaggttacatatagtttaaatgcttgaatctcccaaatctgtgctagagtataagtcaacgacatgaattttggttcttttgactcttcagggacaactgaattcgatagcaccggcgcaggatagcttcttcacgaatcagcaagccatgtctgggatggtggtacattataaaatccttcaaactgattttaaaaactgtgttatgaatgatcgtgttgttaacatcttttgtttattgtccggtccagggtcaaatcgatttcagacctcctcccaatttcacttacactttacaggtctcagctgcctggataaagtctttactttagtatcattttgtactcgaaccacacgtgttgatatcgttaaatcttttcgttattccaggaagagcatttgagttctgcccaattacctggtagttcatcaaggcagctatagtagcaacacgttttgattactttggagagaagttttgtctcaggaaacatttgcaagaagctgttccaaacatgagaaaaacacaagatctttcatggagctgagttgcaatgacaagatgtaatcttttcttaaattggtttctgtatattatgggattgccttatgatgtattaatgtgggatgaaatattgtgttatctgattgaatgtcttgagatttaatagatgcacttgtaacaacatctttatctaaacacatagaaatctatcctctgtgtattagtcaaacaagtaattttgagatcacattaaatcaaaattgttaaaacaggtttcaacttatttagtagaaacaaaaagttatttttagattaaatgtggttaatttggttaaatacacattccctggtcgttgtcgtatgtaggtgtgtcccttttgacaaaacaaacaaacagaaaaggtttctttattcagacaacatcaaaactggggaagaaccaaaactaatagagttggtcaaaagaaacatttgcaaaaaaaaaaaaagagaggcaaagatctcgagagatttcaattttcaatg

SEQ ID NO: 17895 - DNA, 3003 bp, Unknown; identical to SEQ ID NO: 17893
  misc_feature (1)..( 3003): 2750-1469P.txt file - cDNA_ID_1814438; gDNA_ID_2926162; Annot_ID_139770

SEQ ID NO: 17896 - DNA, 3000 bp, Unknown; identical to SEQ ID NO: 6483
  misc_feature (1)..( 3000): 2750-1469P.txt file - cDNA_ID_1814442; gDNA_ID_1621094; Annot_ID_55622

SEQ ID NO: 17897 - DNA, 3000 bp, Unknown; identical to SEQ ID NO: 6483
  misc_feature (1)..( 3000): 2750-1469P.txt file - cDNA_ID_1814442; gDNA_ID_2926162; Annot_ID_139769

SEQ ID NO: 17898 - DNA, 3000 bp, Unknown; identical to SEQ ID NO: 6463
  misc_feature (1)..( 3000): 2750-1469P.txt file - cDNA_ID_1814446; gDNA_ID_1621094; Annot_ID_55621

SEQ ID NO: 17899 - DNA, 3000 bp, Unknown; identical to SEQ ID NO: 6463
  misc_feature (1)..( 3000): 2750-1469P.txt file - cDNA_ID_1814446; gDNA_ID_2926162; Annot_ID_139768

SEQ ID NO: 17900 - DNA, 3003 bp, Unknown
  misc_feature (1)..( 3003): 2750-1469P.txt file - cDNA_ID_1814462; gDNA_ID_1621094; Annot_ID_55617
ttgaggagatggcgaaagagattgatgaatgcaaagcgatgtggaagaggactggctgttctattttggttgaggaactgaactctgataaaggctttaaagttcttaactttttggtttattgccctgaaaaggtagtgtttctgaaatctgtggacgcatctgaggttttatcttctgctgataaattgtttgagctacttagcgaactggttgaagaagttggcagtaccaatgttgttcaagtgattacaaaatgtgatgattactacgttgatgctgggaaaaggttgatgcttgtgtatccttctctatattgggttccttgcgctgcacattgcatagaccagatgctcgaggagtttgggaaacttggctggataagtgagactattgaacaggctcaagctatcacaagatttgtttataaccatagtggtgttttaatctgatgtggaaatttacttctggtaatgatattctgctaccagcatttagctcttctgccacaaattttgctacattgggaagaatagccgagctcaaatccaatctgcaggctatggttacttcggccgagtggaatgaatgttcatattcggaagaaccaagtggattggtgatgaatgctctcactgatgaagccttttggaaggcagtagctttggtaaaccatttaactagtcctcttttgcgggctttgagaatagtttgttctgaaaagagacctgcaatggggtatgtctatgcagcattgtaccgagcaaaggatgcaatcaagacacatctggttaatagggaggattacataatatactggaaaattatagatcatggtgggagcaacaacagcatattcctttgcttgctgctgggtttctttcttaatccaaaactcttttataataccaacgaagaaaatccgtagttagcttattctatcggtgcccgattgcatttgagagattggttcctgacgacaagattcaagataaaatcatcaaggagttaacctcccacaaaactgctggtggagtttttggaaaaaacttggcaataagagctcgggatacaatgcctcctggtatggttaattttcctgattttcttgtataaatcttttcgcttgtacttctcttacttgactctcgttacattcttgtttcttagctgagtggtggtctacgtatggagaaagctgcttgacctctcacgttttgcgatacgcattcttagtcagacgtgcagttctcagttagctgcaggagaaaccagatacctgtcgaacacatataccaatcaaagaactccattgagcaaaaacgactcagcgatcttgtatttgttcagtacaacatgcgcctcagacaactgtaagtcttagatcttgtcccatctcagccaactgcattgtttccaaggaataagaaagtatagaaataatggttctatgtcttctctaggggtcctggaagcggagatgacacactagacccgttgtcacacaacaggatagatgttctgaaagaatgggtttctggagaccaagcttgtgtagaaggaaatggaagcgcggactggaagtcgcttgagtctattcataggaaccaagtagcaccaatcattgatgatactgaagacttgggttcaggtaaaaagatttagcatcctcggacaactttttttgtgtgtttcgaagattttagattttaaaagttgaaatgaatgtgtacaggtttcgatgatattgagatattcaaggtagaaaaagaagtgagagatgaaggttattatacaaacacatcggagaagttattcacgtaagattgatcatggttggtttaagcttcttcgtcgatgctttctgacttacatgaagctgttgtagtcataggtgtcgatttgtaacattagagtcttccctttagaattatctcttctacaagacgtttcagtattcttattcttcttactctgcattgtcctattaggtttccatagagtttgggttttataatcaggttctgtccagatttttaagttgtttgacaaatatatttaatatggtcatgaaatctaaatgcctattttctttcatatatatatttgatggctttgttagaccatctgttttattactagcataattactccttaattcttgtcaagtttttgaccgatatctaagcatacacaacagaaggacctctcacaatgtatgatccattcgaccaaaccatagaaactggaaggtcattgtcagagattgtaatggtgagaccttgaatttcatcagtttagaaaccaaagacatttcagtggcccatattatatgcccatacggcccagcccattaagaaacaattggagcaatcggagaaaaaagagccagagataagctaaaaggtctacgatagttccatcggacatcggcggcgacatgacttcttcggcggcgatcagatctgacatctacgacagagaagaacgcaagcagttaatcttccttctttcgattcttcttcttcttcattctcttgttcactgtgttcgaattctgtcttctttctcttgattgctcagtcgtgtgtgcaggcaataccaagcacatattcgtggcctgaatgcttacgagcggcataagaagttcttgaaagactacggtactacacgtctttcaatctccttgtaaatgtctttggatttgttagctcgataattaggttttaataatggacaaaaagtttgggaaatagggtaaataagtggctttctatttatccaaaatccatattgtcccaaatcaaaactggttgatgaacagtcttctcctctgagctaggaaggagggctatagtcagccttacatgtcttatttgtggttccattagaaagagtattctttaccctggagttagctactatttgaggagctgttggtgttcttgtttaagattttgtagtttcattctttgttttgcaactttacagttcgattttatg

SEQ ID NO: 17901 - DNA, 3003 bp, Unknown; identical to SEQ ID NO: 17900
  misc_feature (1)..( 3003): 2750-1469P.txt file - cDNA_ID_1814462; gDNA_ID_2926162; Annot_ID_139764

SEQ ID NO: 17902 - DNA, 3000 bp, Unknown; identical to SEQ ID NO: 6460
  misc_feature (1)..( 3000): 2750-1469P.txt file - cDNA_ID_1814470; gDNA_ID_1621094; Annot_ID_55615

SEQ ID NO: 17903 - DNA, 3000 bp, Unknown; identical to SEQ ID NO: 6460
  misc_feature (1)..( 3000): 2750-1469P.txt file - cDNA_ID_1814470; gDNA_ID_2926162; Annot_ID_139762

SEQ ID NO: 17904 - DNA, 3000 bp, Unknown; identical to SEQ ID NO: 6459
  misc_feature (1)..( 3000): 2750-1469P.txt file - cDNA_ID_1814474; gDNA_ID_1621094; Annot_ID_55613

SEQ ID NO: 17905 - DNA, 3000 bp, Unknown; identical to SEQ ID NO: 6459
  misc_feature (1)..( 3000): 2750-1469P.txt file - cDNA_ID_1814474; gDNA_ID_2926162; Annot_ID_139760

SEQ ID NO: 17906 - DNA, 3000 bp, Unknown; identical to SEQ ID NO: 6469
  misc_feature (1)..( 3000): 2750-1469P.txt file - cDNA_ID_1814498; gDNA_ID_1621094; Annot_ID_55606

SEQ ID NO: 17907 - DNA, 3000 bp, Unknown; identical to SEQ ID NO: 6469
  misc_feature (1)..( 3000): 2750-1469P.txt file - cDNA_ID_1814498; gDNA_ID_2926162; Annot_ID_139754

SEQ ID NO: 17908 - DNA, 3000 bp, Unknown
  misc_feature (1)..( 3000): 2750-1469P.txt file - cDNA_ID_1814502; gDNA_ID_1621094; Annot_ID_55605
tctcttaacccttgcaaatttctttgaatttataaaaatgtggtttaccttcacaacgtccattaaaaagttctaggtgactgatccatattttgttacctagtattttctgctgataaaaaaagacgtctattatgattgccattagattagtggatgttacatgctccacttagaaccttgtacctttttttacccaagttagacatgttgtggccggaatcctggtatgaagcgtcaacatacagtgacttgttgacgggcataactgaattctaaaagacaatgagtataatgtcctgtgtgattcccaagtatttatgtcgtttaccaaagcattctgtttaagataatttcttgttgatttcagctctccgaaggtgtcaagaagtatgttggtgtcaaacatgagttggaagctggattttcatggtctctagttcatagggaatgcacaaattcagatttatccttaagtggacaccctcatattgtggaaaacaattccaagcttgcattagctttgacagtcatggatgaatgctttctgcccattattgacaggaggagtggggtgaatatagtacaaaatgtcctttacaattgtgggtaagcttttcagcactgcaaaaaattttgtctgcgtaattttactacagtgattttctttggtatttctttgtgttggttcgtttgcttatacattgcttttcgtaggtccaacttcaatcggctgaactttggtggattctatactgctcttcttgaaagaggcgacgaaatagttgcttcagcatctattaggttattcccctccttataatcctttgttttagtttcaatcctatatgtgagatggcaacaatatggcagagataaagctagtgtcaagatatatttgtctgtgcatgcttatcttatacacttgatttcgtttactttgatgcatttttttcctgtttaagggatctactgcttagtgatgatatttgcttttctctttagatttcatggtaaccgtctagctgagatgccgttcattggaactcggcatgtctacagacaccaagggatgtgccggcggcttttcagcgtagttgaatcagtaagttcaaccgctgatgtagcgaagttaactgactctttctgtataactctgctaatttgttttctggttctctgtgtcttttgatgtgaaggctcttcaacatctcaaagtcaaattactaattatccctgcaactgccgactttagccatgtttggatatccaaattcgggtttcgacaagtcgaggattctctgaagaaagaaatgcggtccatgaatctgctaaccttccctggcattgatgtgttacagaaagagctgttagcaccacgacataccgagtctgctgtcgacacaggttttactttaagaacaatttagcttcttcttcttcttcttcttcttcttcttcttctttttcgttcctatcgatattcttactttggctccattgtttgtcaagaagactgtgacccatgcaatgaaggcactaattcagcgatcaagactaatgaagtttccgtcttggagaccacatcaccgtcaagagataaaccggtatcagattatttggtcgaacaccaaccatatgaggatgtaagttctgcttcccgggatagtctagtccacgatggttaccccaaaatgctagagactgcgttcaaaacttcaaccatggcgagatcatcagatatggagaagcacatggactgcaaaacttcctatagtcgatttgatggagaagatgaggaagatagtttaattgagtctcctcctcaacgaaacagcgacatggctttcttagatcacatcatccgctctccggtagacactggtgcaacggaaaacagagatgtctatggttcaggggatgacgattctccggaaacgcaatgaaacagagttgaaatgttgatcttgtctttttaagcattttggtgtctagttcaaacaccggaatcgctttttgcgaatagaatttgttaataatgtctatatatatgttttatgcataatatgtaaatgttcatggccttgagccttctctcgccgccaagcttcacgacggtgaggcttttttgccctctttattgcgctgatcttctgtgttatcatctcgttggttcctcttactaattgtttttatgaagcattgatctaatgactcgagacaatttcttacatatgtctttttttaatctttcttttctatctaaaaaaagagatattttagaatacctcaaatgattatcgtcaaagcctagtttcatctctctctctcaatgccttgctcgagcatcgatcacgtcaagcgttacactatcagtgcctcgctgaccaaacaagctacgagagaaggcgaacgatgtcacgtttcaaatttttgtagtgtcgtagcaaattgagtttattaagaaaaacgctgatgtcactaatggaatttgctggaagtttgtgaaaaaaactgatatttgatcaactctatattcaaaaacaaatagttcatttgaaaaaattcagccaattcttcgctactcacccaaatgatatatcaatatacaactcccttttcaactaatgcagactatgcagtcaacattttacatttccatcttttctgtggctatatgaagaaaaaaagagaggtattttagaatacctcatatgatttttatacacagtaaaacctctataaattaatactcaattaagaggtagcactgctttgttctcttctctgtctctctctcagtgcctttgcccgaagcatcgaacacgtcacgcgttacacttcacagtgccttcgcagaccatcaagctactagagcaaaggcaatcacttgttctcatattttttttaacgacacttgaggttatacgacgtcgttatagtttaagtaacaaaatcaaaatcaagtggtctttctctactcttcctaaccatcgcatg

SEQ ID NO: 17909 - DNA, 3000 bp, Unknown; identical to SEQ ID NO: 17908
  misc_feature (1)..( 3000): 2750-1469P.txt file - cDNA_ID_1814502; gDNA_ID_2926162; Annot_ID_139753

SEQ ID NO: 17910 - DNA, 3000 bp, Unknown; identical to SEQ ID NO: 6455
  misc_feature (1)..( 3000): 2750-1469P.txt file - cDNA_ID_1814506; gDNA_ID_1621094; Annot_ID_55604

SEQ ID NO: 17911 - DNA, 3000 bp, Unknown; identical to SEQ ID NO: 6455
  misc_feature (1)..( 3000): 2750-1469P.txt file - cDNA_ID_1814506; gDNA_ID_2926162; Annot_ID_139752

SEQ ID NO: 17912 - DNA, 3003 bp, Unknown
  misc_feature (1)..( 3003): 2750-1469P.txt file - cDNA_ID_1814512; gDNA_ID_1621094; Annot_ID_55599
cgtgttctagagctgcccttgaagtcagacgctgacgtggctgttgaagagagtcatgactgcttcaggttcgtcgcggaaacagacgggggaggaggaggaggtgtgagggcttacatggttgagattcatcctggtgtgaccaagattcttgtgagaaccaatggttcatcgtctcttggtttgtcgcttgatgagcttgagcttgacgtgtggcgtttcaggctaccggaatcaactaggcctgagctcgttaccgtggattgcgacggcgatggagaattgattgtcactgtgcctaagattgaagacaatggtagagatttgatagtgcttgtacagtaatctaatgtgtttgtgatcaaatgagaaaaatcttgactttttttatctaatggttatcaaagttaagatctttttgtttctttatgaaaatatggatacagagtaggttttgccttatgtaacgtaacatcaattggttttagttttagagataaaatcctttgagaggggcaaatttattgaggatctctgattcacgtttaagagcattgtctttcttcatttcccattcaggtttcttcaagttagctgcttgaacttcttgaaccactttagggattgagttcgctaccatcttctgaccaaagattagatcaaccttctctttccccttgttactgatgcagcgggtaagctcggttcgtttagcttgaagctgagcgatttgctcgtcaatttgacggattgtctctgagtttctatcgacttccgtttggatattgcctagcttgtcctttaagtcgctgtattcgtacttgagagatgcgaccttcgctttgttaagctcgagagcggagaagaacctatctgcttctactatcatgctttggttctcttgaaaaacttcgctgaaagttggaatttcttcgattagcttcaacctcactatttcttcagctgataggcttggatctttcttgagtttagctgccaagcttgccatctccgtagcttcattagacatgaacaaggaagagaaatctttctccagaagcgatgaaagcttcattcgagcttctgtccattcgtaatctctcactggagagcttgcactaacgggaagtgatgatgaagactcctgtcctgcttctgaaggctgttgctgaagaagattctctagagagttcagataactgtcaaactcttctgggtttatatccacaggagggtgagagactgcaatgacaccgttcatagaagaaacatagatatgcggaacaaaagcctcttcttcttcttcttcgtctgcatagttacctctgcgtttcttcatcctcttgctgcctttctttgcatctgattccttgttttcttcagtcaagtcaaacacatcaccttgttgctgtcttgtgtaacgtttcgaggaagattcccgagctgacttatgttcagcagctggtgttgttgtggctgtctttttcctgttgctagctcgcggagttgctttaggttcattagtctgtatctgcacctgttttctcttcctctggctgtaacgcgaagttgatccttctttttttacatcctcagcatcctcatcttgattctgtccttctttggatgtctcttcaaacagagacgcagcatcaactacagaaaaaaagaaacatcattcatgtgttgcagatagagttttatggctgacgcaacagaagagtgttagttgctacctctttctgcaggctgaaacaaagccggaatgttccaggtaaaagatgcaaagaatgcattagcatccatatcagggaaactagtttcgagataacgcgaaagagtgtttttgcttgcaaaagatttgggtacattcttgcccttaagcctctccgggagaatgagtaagcgatccttatggaacccggcattattcactctcctcccaactctccaagtccaaacatcgccggggctcgggaaatcgacaggtgcaaacggcaaaccttgaccactagaagctggcggaatcgccgggagttgattcaaatcagtgaaggagcttctgtcaccattaaccttcacatcatcaccatcaccatcactgttgaatccgttttcccgataatagtcattctcaaccgggactggttcagtctccttgcttctattactcattgacactactgattcaccatcaaatctgtgcagattcataaatgtgattgaatcaaataacataacttaactaattgctttgcagttataatcacatatattcattactctattcccaataacaaaacaaaatcgatcatgactcaaagtttcctagaatcaatgcagagaaacctatacagaagtgtaaacatattgatagttcttaatgaattgaatttacccaggagaattttgacctatctcttgatccatatccatcgaagcagaccaaaaaccctaattcctgcgatagataaacacccaaataaacaaagcaaaggatgaattctaatctataacaatgttaagggaacaaacccacacaaattaaaagttaagttgattagaaatttctccagaatgcagataaagatacgaactttggagagtcaagaacagagtagccgatcttatgcttcaactacaacagattacaaatttatcaaactcattcgtttcttatatatcctcttttcgatcagattagtcctacaaacagaggtggaataacagttatacccttttagtttgtttttgtttacacagatgaagattgaaattacgattataccgttcaatgtttcttcttcaccgacttgaaagctatgacctttccgatcaccggcgttagttatgagcctcctctccgcggacgcacttgggttacttctcaagaatgcaatctccgcgagttccatgcgtttgggtcgcgtcgttcacgcaagaatcgtcaaaaccctcgattcaccaccacctccgtttctcgcgaactatctcatcaacatg

SEQ ID NO: 17913 - DNA, 3003 bp, Unknown; identical to SEQ ID NO: 17912
  misc_feature (1)..( 3003): 2750-1469P.txt file - cDNA_ID_1814512; gDNA_ID_2926162; Annot_ID_139747

SEQ ID NO: 17914 - DNA, 3000 bp, Unknown; identical to SEQ ID NO: 6452
  misc_feature (1)..( 3000): 2750-1469P.txt file - cDNA_ID_1814522; gDNA_ID_1621094; Annot_ID_55596

SEQ ID NO: 17915 - DNA, 3000 bp, Unknown; identical to SEQ ID NO: 6452
  misc_feature (1)..( 3000): 2750-1469P.txt file - cDNA_ID_1814522; gDNA_ID_1621094; Annot_ID_170858

SEQ ID NO: 17916 - DNA, 3000 bp, Unknown; identical to SEQ ID NO: 6452
  misc_feature (1)..( 3000): 2750-1469P.txt file - cDNA_ID_1814522; gDNA_ID_2926162; Annot_ID_139744

SEQ ID NO: 17917 - DNA, 3000 bp, Unknown; identical to SEQ ID NO: 6452
  misc_feature (1)..( 3000): 2750-1469P.txt file - cDNA_ID_1814522; gDNA_ID_2926162; Annot_ID_198815

SEQ ID NO: 17918 - DNA, 3003 bp, Unknown
  misc_feature (1)..( 3003): 2750-1469P.txt file - cDNA_ID_1814533; gDNA_ID_1621094; Annot_ID_55592
atgttttgatgaaacatatatcgggtacttcatgcttcatgcttgagcgtttgaatgcatgaaagctagactcgttcggcctaagtgcgggactagccgatcttggatttttttaaaaaaataattaataacaagtttatatgaattatattgcatattatgattttttctaagtgtcttttgattgcgagatgtctacgtatcgttttgtgattcacaatcctaactcaatcaagatttctgtgtcgattttttacgcatgtatgaattagataagtttgtagttgacaattattttttgaaaaacggtattttctcgtaataatttttttgtccattcctcttagattgatgtgaataattgtaatatatatttttgggctgaccttggactttgcaagtctctcgtcttttctctttaagtacaaaaaagttggtatgcaattcttttgacttatgtactcacgaatcaaggtgaatttcaactttttcattttttcatatcaatatattgatttcaatataacaaagtggagccacgccgatatatataatattaagacttgtttttctttatcaccaatgtccggctccttgaagagataaacaaaccatgttataaaaagaggatgtctatttgagctttttagatgataatatatgttttctaatagctagtgttcgaaggtgagaatgttatgtttatatatatcacatcatccccgatttctactttggatcttaaagaaataataccgttcactcataaccggataagtggaagctgttattcactagatatggtatattggtattactattaaccttttgaagtcaagtggagatttaactgcaataaattttggtcataccagatacaatgctagataataaaagcttgacatggttttctaaatgttaatggttttgagagcgcgtacatatgtagattgatgaatggaagcttgacatgctttggtcaaagaaagaactgcaactaataatttgatattggctattatattaaggtgtttagaccaactatactacttataggtttatgaagtcaaatgtttttgacttttcagtaagatatacatgtacatgtcaatcttacgtatagatgtgtattgcgacacaaaacaatatatttaagattgggtttgatcacatcttggaccgggctccttcaaaacaatttatgtttgtttgtattgtattttcaactttttaaaaaaaaaatagttcaaaaaaacttgggaaccccgggaaaacatgtacacacgggttcgtggtaagattttttagaaattacctaaacataatagtttgaatggtttctatatgttaaatgtatttcagtatgaacccaagtgataaggcgcaatggtaagttgggatacattatgtagacacttcagtgtgtacgttggatttctctacgtactaaaatctttagtataaagatatttatttcgtagacttactggtttgtcaaagtcttaagtaccgtttgaaccgatcaagcaggcgactaaatcttctgccttaagtttttatgggtcttagtttgggccatccatgtaaattgggcctcaagatctcagtttgtagtatatgacaagccttaacatttgataacatatgtactcaatttaaaagaaaactattttgtttttgttcaatggctaataatatgtatttcctgccaaattataattttatatgtatgcattatcatacattatatatgcatttaatatttctatattatatagacatatttttcttttttaaaatgttaaaatattacaaaactgaagatataaatgtttaattctgtttagatatatatttcaaacacaatagatatatacattatcaaatagtggatatacactttaatatcctacgcgatatagttggaaaaaatatagaaaacaagaagataaagattaccatagatttaatctcttagatctttagagattaaaacctaattgaaaattcaaacaattagaaggtattgaatttaatattttcaatatctctaagaacaggtctaccaatagcaaaacacataatccaatttttgtttttaattcagttttttggatatgatttagatgggaacgattcaatttatcagatagattaaaaaaataaatgtttttatgatatttacttcctattttaaaaaatccaaaaaccaaagatatgttttgatgatatttctttaagaaatatttgagagaaaaaaacaaataaatacgtatccttaaaagaagcctgaaagaaacagcttctgttccgtctttcactctccatctctcttccgtcgtttcctaagtccttttctcttatttagagattctctcttttcatccaaaaaaaaggagagatatttcagaaacaatcctctgcttctggagataaatctcgctcttttagcctcataatccaaaacccaccattaaaaatcctctctttcgttccctttgaacccatcaatttcagtttgcttattacgtctctgttctctgcatgtccttgtggttgatacagctgacttttggttttgtcgtttatgttaattgaattttaatatttgatcatcgttgtgctatattagtggttaacgagtcgttttcttaaggtttactttttcgtattgtcacgttagattttttaggctacaattgtagagaaattcattatctgaatgtcaaaccatgtgcatgatctttgagaaagtttggtgattaatagtttcttcattattaaagctgcctttgtttaacttagcaatcataagattgtttttgataacttttgtgtgatttaactattcactagtaataatctgaaaaaattagtactagatttcatgatgatgatgaaaagattgatgatttgagtcacaaaatcttgttttttgaaagttgtgtgatcttcttgtttgcatagtgaattagttttgatttgaaaagattttaagtaatg

SEQ ID NO: 17919 - DNA, 3003 bp, Unknown; identical to SEQ ID NO: 17918
  misc_feature (1)..( 3003): 2750-1469P.txt file - cDNA_ID_1814533; gDNA_ID_1621094; Annot_ID_170852

SEQ ID NO: 17920 - DNA, 3003 bp, Unknown; identical to SEQ ID NO: 17918
  misc_feature (1)..( 3003): 2750-1469P.txt file - cDNA_ID_1814533; gDNA_ID_2926160; Annot_ID_139702

SEQ ID NO: 17921 - DNA, 3003 bp, Unknown; identical to SEQ ID NO: 17918
  misc_feature (1)..( 3003): 2750-1469P.txt file - cDNA_ID_1814533; gDNA_ID_2926160; Annot_ID_198729

SEQ ID NO: 17922 - DNA, 3003 bp, Unknown; identical to SEQ ID NO: 17918
  misc_feature (1)..( 3003): 2750-1469P.txt file - cDNA_ID_1814533; gDNA_ID_2926162; Annot_ID_198810

SEQ ID NO: 17923 - DNA, 3003 bp, Unknown
  misc_feature (1)..( 3003): 2750-1469P.txt file - cDNA_ID_1814544; gDNA_ID_1621094; Annot_ID_55589
aagagttaaattgaagtaagaaaaaaaagtcatgaccaataatgcactaattactaaagcacaagaagaagaaaaatcatcaaaatcatcttttatagaaaaacaaagaacttttattgttttcgaccaattaaacggtgcgagtgaaatatcattatttgattagtccattgtcgtattctctagcaactccacctctagtttacttcctcaagaaagagtcatatcatacgttaagtctatatcggcaaatcttgaccaaaagaatatatcaaatagaataaaatatattgagatcgaaaggaatagactcttattccaaagattagaaatcagaatgaaaatggatcggcaaacggcgccgtatttgttgccggccgccgggaataaacaagaaaagtaatggcaacaaacatcaaagtaatggtttggatagatcgatgaaaccataattgaggacgctagtcaacgtattgtagtaacatgccatgtgattgccagcttcatgcacagacaccgacatgtattatcatgctactattcatatattaatatcaatatattagtcttatgtaggaattttttagttaactattaatgcacgataattaaggagtgatgatgacaaatcctcatgcatatatagttggaacaaagttccaattcatgcactaaccactagttaatcgtcaatgacagagcgagaggcagcaataatcttctctgatgattggcttccagattcaacaacttaattatatcaatgttttttttgggtgcaatttgatttatatatatactagttatttagcatctcaagacattcttatcatatttaagttgataacttgatattgtaatcagaatcatcaaatattgacattgtacgatgcatgcatttcattagatccacactgtctgatccgcttcttccatttggagtttttgtatactaatccctgatactaatataactatttaattcattttttgtttgtttaagatatcattttttacgagatttgagtgagacattgcattggttgaactaattcaccacaaaaacctaattcattacatacggaccatttctgattgttttaaacttaatttcaactaactcttatttattgtggtacctaaatttcctatataataataagcacatttaagaaaatttgtcgatctcaagtttcaacaactgtctattaaacccaaattgtctagaagcagcatccatcttctcaagctaaacaattgaatttagacctatcatatatgcatcatatctaattatcatttatggatctatgggaaacaaataagcaagaaatattgtggtatagggtctaattactatcaaaacgtgtcctacattttgagggggtcctccgaccaagaaaataaatactttggaattaatctttaatgctgtgaagacataaaagataagtataccaattttattagcaagcgtcacttactgaaaaacaatccctataagatttctatttctgcacaaaagaagaaaaaacatgaaaggttatatagtacttatatatccatcgaatttatacgcccacaaatgactaatgcctgattcacatgcaggcaattcaaaactagctcaattttcttctgttaaccagctctgattactcattttatctaatagtgttggattatatatagggataaaatgtgatgtatagatatctcttgaatagtctcattcgactgaccacaaactaaactactaacatcattttctcatacatttcagcgtgggccaataaagccaacgtgtttttattattccaaatgttgacataagatataatctattatatggtaatggtaatatgtgtctcattctcatgctaaaatccatgaacgcagaacgtctctcatcataaaatactagaagttaatgataaattatgtcacacggattctgcatgttcttatacccttttttcacatggctcacccatcacaaatctcactatctaatgacttattcacccctttctaagtccatgtccaagtccaaaactctaggtgtctatttcttttggatgagcagtgatgtatcaatatctcattatgttacgtagctatcttagctaggttcatcacatacgccgtcctacatatattaagtgttgaatagaaagttaattccatctatctcaattatcaaccaacgtaactatcgtatttagatatcaatcacacacacacacacacacacacaaaagtttatgtgattaattaggagtaggattcggagctacatttaaatgcaagttcaaactctacaatatcgataacaatattaactcaattgtttaattagtctacttatcttttattgagtaaactcgaaggatatgtatgagttgcataagagggtattctagtactttgtgatatccaacgaataaggcaaggaatctaatctgagctaatcataattattgagattgtgtgtagttggccttcgagtggataaatcgtggctatggagcttccgttctgcttcttcttctcccaaattattaagtcatcctccaaatcatatttcactaaacttgcaaaaaatataaaaaagtatatatcttcataattaatgaatggtaattaacctactaaattttcattgatttatgtataatggttatgtgtttttatattacatatatagtttactagagtttaaacattccaacataattccactaaaactcaaccaaaaagggggtacaaaaaaagagaaaaaaaaaattaaatgttattgagtgatgggtagttaaagaacttatggtgttaggctgtccaaaaagagaagcagttaaagagtttggagtacaatgtcttaaacaagaaaatgtctgtcccattataacatctcgaaaccaaacacacacacacacacatataacaatctcttcttctctgacattacacaatggtggtttgagtttacagaagataataatg

SEQ ID NO: 17924 - DNA, 3003 bp, Unknown; identical to SEQ ID NO: 17923
  misc_feature (1)..( 3003): 2750-1469P.txt file - cDNA_ID_1814544; gDNA_ID_2926160; Annot_ID_139699

SEQ ID NO: 17925 - DNA, 3000 bp, Unknown; identical to SEQ ID NO: 6447
  misc_feature (1)..( 3000): 2750-1469P.txt file - cDNA_ID_1814548; gDNA_ID_1621094; Annot_ID_55588

SEQ ID NO: 17926 - DNA, 3000 bp, Unknown; identical to SEQ ID NO: 6447
  misc_feature (1)..( 3000): 2750-1469P.txt file - cDNA_ID_1814548; gDNA_ID_2926160; Annot_ID_139698

SEQ ID NO: 17927 - DNA, 3003 bp, Unknown
  misc_feature (1)..( 3003): 2750-1469P.txt file - cDNA_ID_1814559; gDNA_ID_1621095; Annot_ID_55656
cattgttcagtttgtagagaaagacttcaagcttgctgatacggtcattagaggacttctaaagtattggcctgtgactaatagttcaaaggaagttatgtttcttggagagttggaagaagttttggaagcaactcaagcagctgagtttcagcgatgtatggttcctttatttcgtcaaatcgctagatgcctcaacagttcacattttcaggtgcgactctcgataagttgttcatatagtctcgcaattttgcaggttatattcaaagttgcttcttttgtcaggtggctgaaagggctctatttctatggaacaacgatcacataagaaacctgattactcaaaaccataaagtgataatgcccattgtgttcccggctatggagagaaacacacgggggcattggaaccaagcagttcagagtctgactttgaatgtgagaaaggtaatggcagagacagaccaaattctgtttgatgaatgcttagccaagttccaagaagatgaagcgaatgaaaccgaggttgtagccaaacgagaagcaacatggaagcttttggaagagttagcagcttcgaaatccgtaagcaacgaggcagtgctcgtcccccgattttcatcttcagttactcttgcaaccggtaaaacttcgggtagttgaacactttctgctctctatcaccgagacatactttcaaacaatccagcagaattgtatcgatccgttcgagcatcaggatcagtccttgaagaagattaagcacgatgattaagaagggcaatatcatcagtgaatacttaattataacatttttttcaggtttatggaatcatgggttcaattgtttgttgcttctgatcctttttttttcttactcagctcttagttgaataacaatctgaggtgtaagaaatatggcttatagatatagttcttgagaggacgactaaacaattattcgtatttgtattgtggaatgaattgtattttatgctttgaagttcattaatttagctcccctactaaccaaatcataaccgaagttatcgaatctcggtttggttcggtatatatgcaacggcattttcgtaaacaagtcatgttttttttcgtgtgagttttagaaaatacaaaaatcatatataacactagattttaatttaaagttagtataattttttttttgcaaattgtatctatctataatatatttttattttatagtttacaattgttattaagtaacgtcctgccaaacccgtcccgccaaacctgtcctgtaaaaaaatcatttatttatattaatattgatcttatttatgatatgtttataaatcattctctaaatatttttgtcgatgcaggacattgaacccacacattgtttgccaattggttaatatatgttcatttttaaaattttgaatcataaaatgtgacagaaaaaattaagatttttttaaactctatatattatataatgatgttaaaaaattgtgatatatcaaactttttataagtttaaatattaataatgttttataaattttaaatatataaataataatatttaaaaaattaatatttttgcttataaggtaatgacataataactctaaaagcaaggatttagaagatttaaatctttaattaaatattttcattaataaataattaatgtcagtgacatgacattgtaaataagtttaaatacaaaatttatttatttaaacaaaaaacggttagtaagaataatatttatttaacaaaaaactttgttttaaaatattgttaacaaatgtctatgctaattttaagggattgatttgaattttgttgggattaaatttgattgataatgtgattgactatttaaatcaaaaatttaaaataaaattaattattttggaaaaaagatttaatgctaatggcattagattgtaaataagttcaagtccaggatttatttgctaaaatggttgcaaaaatgtatatatagatagtgtaaaaataaattgaattaccgatgtatttttaaaaaaaatcgtgaaatctaatttatttacggaaaaatattaccacattatttttgcaaatattgtgtatggtaatgaatccaatccattattctaatttgttcttagtcaatgagtggtattcaatttcattgtcccggtcccacggactgactactcagcaacccaatcttacaaagtcaaagtcaacttttattttgtttctctttttttccgtttccatcccaaattcatttctttataaattatttattcctaaaaggatttgtaaattaacctaatttgcatttcaaaatatttttatctattttagtattaaattggaataattgttatttttgtattaaaaaaacactaatatccaaaattgttatattgctttttattttgcttttttctatttttaatttctattttttaatagcatcgccgtatcgtcgcatcgatactcggatttagtaaataagtgttttttagcaagagtttatgcaagtccgcttcgattaaagtatctaaaccaaaatccaaacacgtgggagtttccgttttaatttctagttatattatacccttcgttatttaagatataaaacagcaatttattatcactaattgataaaaccttcattgcaaatataaactagattttaaaaataaaatttgacttttaaaatacaatgtaatattattaatgatataaaaacaaaaaacctaaaatggtattgaagtgtcaaacagaggaagtatatgatatatatgtaattaactagtcaaaatctgctgtgataacgaccaattctaaacaattataaaatcttctaaaaattaatgagaatctactatatttaataactaaaataatagaaggatgacaattgacaactataacaatattgaagaagtcataccaaatatattaagacgtgtataaaaagggtatcataaccgaagacttaagatg

SEQ ID NO: 17928 - DNA, 3003 bp, Unknown; identical to SEQ ID NO: 17927
  misc_feature (1)..( 3003): 2750-1469P.txt file - cDNA_ID_1814559; gDNA_ID_2926163; Annot_ID_139800

SEQ ID NO: 17929 - DNA, 3003 bp, Unknown
  misc_feature (1)..( 3003): 2750-1469P.txt file - cDNA_ID_1814614; gDNA_ID_1621095; Annot_ID_55640
aatcgtctaattcctggagcagggtatcagaaaatggagagaccaaacttgtgacagaaggttctaaagttgaagaccagatcttgccgaaatctgatggagaaggacaatcagagtaagggttcagactctgaagtctgtgtcctaaaccagtgcagttactagcggtccactgacatccttggcaaagagaaacattttcgttcatacagtgtactgccgtgggttgtaaggaacatttctcgcagagtagagatcgcgtgtgtctttgagacagaggattcgctgagtgtacattaacgtcacagtttaaacaaagtttagccgaatcagatttgcagtagattaatgctttttcggttccacaaaagtcacatcgagcctccatacttcttcgaagacaaaactccaaagaaataacgatttctcaatcccaatcgctacacacacctaaaatcctatagcatagaaggatcgtgagacaaaaacagaacattcagagatcaaacaaaattacgattcattataggttcatgtatctttttaatgtgtgactgtgactgtgactaatacatggttgtgtttgaatgttagagaaacactcacaaactaagaaaatgtggattctcgagaccgaatcagtactaaaatcacaatgtctagaaactcataaccagttaattacagagttttttctaaacaagagtataacaataatcgtgtaaaattgtttatgtttcagggttccagagattagaagctttacaagggtgtgtgagagtccagtgagaaggagatgagaaagaacagagaagaaaaggttttgctctgtttttatcctgtgtggggtccaccttgttaagcgggtttgccacgcggggtatcttttgtcacgtgtggttttattgttccttagattttgttgatgtcataatgtggttgaccatacaattcggagtttttgtttgattctttaggtactttctgtggctcgcaagaatttcgagaattgttaataaaaaaacgtgtaaatgtcattaattttgaacacgtttttcttgttattcaaaacatccgagtaataagactagttcgaagcaatttattccgagtgttggtttaatggatctaggagtttgcagcatactagtccggtttcattaacctgtggttatggatagttattgtatctatttctcactaattttactaagtgtgttttcacaacttaaaatatgagatgttagaagcacttaaatgattgaaattctagtgagcgatcatgttttaagagagaaaactttgtgacaacgattgatattcgtttacgattttttaccagcctcagtaaaaaggctaaatgtactatttttgaaacatctcccaatgcattccatgccaaaaaaggctaaatgtacttgtaaacaattcaacagacagtaactgctggcattagctgaaaaggtcgctcatggcatgaccagtctggttgtcattgtttgtttgccaaaagatttcattagatgtccaaaaagcagctcattcgaccaaacaattgtttcctgataagtcaattgttttgttaatcaattctataggaacgctaaatccattattcgtccaaaaatcagctcatagttttcaattgttttgttaaccacttattttgcaaaagtagtgaagaaaacataacatttaaacacaccaattgttttcataaagcccttccaccaactgaaaatcaaagaataactagctaatctcttccggtattaaaaaagaggaaaaacaaaaccaattgatataatgtgcgaggcatttccaggatcaaaaggcatggaaaaaagcaaaaagatcaggatataccacaaccaatatagcgtcacaagccattatacctgaaggaactgtttttatccttcagaattggtaatggacgccaatacaaaaacaaaaaacactaaaactctttcttcaatagggcaaaatttttgataaaaaatgctcagtggaaggagaagtcgttttaaaggagagctcacggtaaacccactgctcttctcacactcttcgtgctttcatctcatcattgcatcatcatcatcaaacccataacagtaatccaacaaaacaaaacaaaaaacattgaaagaacaaataagcttcagtgtgtgtaacaaattcagttcattgattcaaaaacctcactgaaatccgctaagataattgtttttatcatcatcagctttataacccaaaacaagtacatacaaacatcaatcaaacctattaacaataatccaactaaacaaaagccaaacattaaaaaaaaaaaaaagcctcagtgtgtgtaacaaattcagatcattgattgaaaaacctcactgaaatccgctaagataattgttttctatcatcataagcttataagtggaaaaacatcaaccaacaaaaaaaaacaataacagagaaatttgtcttcaaaccaatcaaaagataagattttgggtgaaaggggaattaatactcagacagccaagggttaatcttcaacttctgggagaagaatcccagatctgaaactctagtccacaatactcttgtatcatcaccatattcaaccccttccacatcccataaaactaagacatcacaaatctctttcacaaaaaccttaaatatcaccaatttcaacatatatacacaaacgaaaatagtcacagacctaaccctaaaatcacctaacatatcattcagacatgaaaagaaagagagttcctatgatttgcattagacgaaaccttataaatacacagacacagcagacaattagggtttacttcggtcggcggctaccatatctattttaggttctcggcccaattatactaaatgggccagctttcgtgacccaacaaacaacttacatttattttactttattaacacattcactttacaaacccaatcaacgaaaagtccaaaaacgtaaaaacagaaatg

SEQ ID NO: 17930 - DNA, 3003 bp, Unknown; identical to SEQ ID NO: 17929
  misc_feature (1)..( 3003): 2750-1469P.txt file - cDNA_ID_1814614; gDNA_ID_1621095; Annot_ID_170946

SEQ ID NO: 17931 - DNA, 3003 bp, Unknown; identical to SEQ ID NO: 17929
  misc_feature (1)..( 3003): 2750-1469P.txt file - cDNA_ID_1814614; gDNA_ID_2926163; Annot_ID_139785

SEQ ID NO: 17932 - DNA, 3003 bp, Unknown; identical to SEQ ID NO: 17929
  misc_feature (1)..( 3003): 2750-1469P.txt file - cDNA_ID_1814614; gDNA_ID_2926163; Annot_ID_198895

SEQ ID NO: 17933 - DNA, 3003 bp, Unknown
  misc_feature (1)..( 3003): 2750-1469P.txt file - cDNA_ID_1814625; gDNA_ID_1621095; Annot_ID_55637
catggaaatgagaaaaatgtaatgttttccgcagaaaatcccaaaatggtggatatggatgtactacctgagccctacatcgtgggtgttggaaggattactgagttcgcagtatggagatgtcgagaaagagataacagtatttggagagaagaagagtgtttcagctttcttggaggattacttcggctacaaacatgactccttggctgttgtagcgtttgtcctcattgcttttcctatcatcgttgcttctctttttgccttcttcatgagcaaactcaattttcaaaagaaatagttctttttatttttgtcagttaggcttttctttctcttatgatatcatcataaacgttttacattttctctatctggtctcaaaaatgggcaattgtgaagcacacaaagaacaagttttgagaattgattccagcagcaaaagatgatcttttattacatataacaacataactagaaaattcttgagaggtggcttggttttgttgtttattcaaaatgcggtatggaccataccgtatggtctaaaatgttcgacgtaacgattccaacggaattggctcgagaaagcaacccctatttgtttattgattacttggcctgtgttattcagttgcaccatgcctataaggacggacttgtctaacttttttttttttttttaattttattttgtaaagttgaatctttttatttttctaatgtggtttccaataatgaaaatgcatcaagacggatgaaatttagtatgatgacttgatgatgagattaccaaattttaggtaatttgtcatcggaaaaacgtgttttcttttctcaaaagaattttaaatttgtgtgttgctctcccaaaaaaataaaacattccttacactgttacacataccaaataggcaaataaaaccgaactctgctgtgtaagatttggttttaaccaaaaaaacaacaaagaaaaaactatttcttggtggaatttgaagattccattggttaaatgatctactaactatcctcatccatattttactaataaagtaataatcatgttaatttatgaaagaactaaaaattgtcactgtttggaggattaaactcctctgacatgtttttaaaaaactatatacacacagttatttgaaagttaagttttgttgcgtcaccacttctcatattgtaaacgcgtttgcaagctaaggttttttgattaaacaaaaccttatctcattaaattctgacaacgaatcaaatattcaatcttcgtgctgatgttgaagataatatcacgtctctctcactgcagattcgatctcagggaaatataatacttttacagagttacgtggtcaaagtgttcgacgaaatgcctcacagaaagccaataagttgcgttcaagtatgaatactcttgcagatagtgggatcattgtcaataagctgattttcgaaaagatttcgtcttgataacattttgtcaacgcttaccagatttgtattagtttattcgatctttttctcccggattctatggatatgatcacgtgaagcatgggagatgataatgtatgcgtaatgtttgttaaagttattataattacaaacattcttccttcaatagttcttcattcatttgacgtttgcttcttcttgttcttgttaagtttgttttttgttgttgagttccgttggcattttaactgaaaatgatccaaacaggtgaagaagatgaagaaaaggcaacgtcccttgaagttgagtttgcttctggaaatggtgttgatgatgaggaagagcttcggttgcagtgggcaacagttgagagattaccaacttttaaaagggttactactgctttgttggcaagagatgaagtgtcagggaaagggcgagtcattgatgttactagacttgagggtgctgagagacgcttgttgattgaaatgctcgttaaacaaatcgaggatgataatctccgtttactcagaaaaataaggaagagaattgacaagtaagtcactgcacgactctactgtgtttttttatgtcaagtagagcaacatttgttttgtaaattgtatgtgcatgttagcaactattgaaccttcatgtaattgtagagttggtatagagttgccaacggtggaagtgaggttcaataacctttctgttgaggcggaatgccaagtaattcatggaaagcctatcccaactctttggaatactatcaagggcttactatctgtaagtactcaaatttatttgctgcatcgatctgaatatggagcgcttttctgctctcaatgttctttattcatgtttttctgctttccatgttacaggagttcatttgttctaagaaagaaaccaagataggcatcttgaaaggagtgagtggaatcgtaaggcctggaaggtaaagtattcaagaggttattctctagtccctttagttgcacggaagaagaaatgaagggtgactggttattttgtgcatgtagtgtttttttataggttttcattacagagttcaaaagaggtgttggttttcttgcagaatgacgttgttgctcggtcctcctggttgcggtaaaactactctgttacaagcactttctggaaaattttccgattctgtaaaggtttgactaacagagtaaaaacataagcctgttgaactaatataaaataatatattggagatcattaaggttgtcttcactttacaggttggaggagaagtatgttacaatggttgctcactctcagagtttattccggagaaaacgtcgagttatataagtcaaaacgatctgcatattcctgagctgagtgtaagagagacacttgacttctctgcgtgttgtcagggcatcggaagccgtatgggtgaggatcagatttctgaaagtttgaactgaaggatacttttgtgtgtttgaactcagttcacattaacaagcaatggtttattaaacagaaattatg

SEQ ID NO: 17934 - DNA, 3003 bp, Unknown; identical to SEQ ID NO: 17933
  misc_feature (1)..( 3003): 2750-1469P.txt file - cDNA_ID_1814625; gDNA_ID_2926162; Annot_ID_139782

SEQ ID NO: 17935 - DNA, 3003 bp, Unknown
  misc_feature (1)..( 3003): 2750-1469P.txt file - cDNA_ID_1814641; gDNA_ID_1621095; Annot_ID_55632
tttcgtatgctcctaaaatctgggcaattcattagatttcgttgcgtagataaacttaagcttgatgtattctttggtacaatgtaattctgtttagttctataacttggaatcactctaagtgtaatgtatattgatgcgaagtcaaatgttgctgaatttttgctctcctgcattttccccaattttttctgagccagtattgtgaaaaattggagtctgagaaaactgaaaagtttaatggattctcatttaatcagtgttcatagattcactagttgtttgaccagggcttaggcttaatcattcttgtgacacttggttttcttttaaatctgttttgatgttcagttttctttggaagctatatacccataaacttaaaatgaataaagatggaagctttagctgatataatttgggtgtttctttctttcttccttggtgtgaagctgtttcaaaatgtctcggaggtatgatagtcgcaccacgatcttctcaccggaaggtcgtctctaccaggttgaatatgctatggaagctattggcaatgctggttctgccattggaattcttggcaaaagacggagtggtgttggttggtgagaagaaagtcacttctaaacttcttcaaacctcttcatccatggagaaaatgtacaagatcgatgaccatgtggcttgtgcagttgctggtataatgtctgatgccaacattctgattaacactgctcgagttcaagctcagcgttacacctttatgtaccaagagccaatgcccgtttagcagctggttcagtctctttgtgacaccaagcaaggatacacccagtttggtggtctccgcccgtttggagtttcctttctttttgcaggctgggacaggaaccacgggtttcagctgtatatgagtgacccaagtggaaactatggtggatggcaagctgcagctgttggagcaaataatcaagcggctcagtctattcttaagcaagactataaggatgatgcaacgagggaagaagtggttcagctcgctatcaaggttttgagcaagacgatgacagcacgacttgacagctgaaaaactcgagcttgctgagttgtatctgactccttcaaaatgtgttaagtaccatgttcactcgcctgactcgctcactaagctcttggttaagcatggtgtgactcaaccagccgcagaaacttcctaagctagaaactggtgacagttttacctgacccgcctggttactgtagatgtccatttgctttctttccctttggagatatcgtatcagaatcaatttaccactctgattatgtcatgtgattcatttgggttgactatcttttatcttgagattgatcttcttctagtctaaagtaaagttagactttagaggttttattcaataaatgaatgagcaatcaccaacgggcccattagaaagcccataacattcattgattgaggtaacgggttttaatggctcaaattaacgaagaatcagaatctctttaagtttcaccacgtcgatttacggtcaagagtgtctgtttattaacagaacagtaaaaatgttaccgctcaaagcgtatatcttgagcgccaaatggaatttcattggtacaatgcccagaagttctgggccagaactggcctcattgtaagagattttttaggagatttatgcagatctggaaaaacaagtttttctctcttggattatctacaaaatattatttacttaagtagttgtcagttagacaatgccctgaatccaaggaattgtatcgaccgggattgaagagaccattcttgcatcgtctcttctttttgcagcatcgcgattgtatgaaacattgatggccagatctttcttctataagtcaatcaaccggccaccggaattaccctaaaaacatagaaaatatgttgaaatatattgagatattagtcatcgactatgactaagtgtcacaaacttttgtgtgataggattcaatcaatccaatggatcttagtaagaatattttacattctataccagtctagttcacatattttctaccacaaattgttaattcctcacaccttttaaattcattttctagtttgcagtttttttttaagtgtcactttaccagattacctcaaacttaaaaattatcaaattattatcaaaatatacaaatttactaattataaaacaagtatatatctaatatcttatcttaaaaggtaaatatataaatattttctaccttttgtcatgtaatacaatttttttcctatttattaggtatcagaatctcaattaattaaattcagaaaaagtgtgagaaaataatttccagtaagcaaaaaaaaaaagtattaacacgacggcttcttctttcagcaaaaaaaaaaaaacataaacggagaaagagagagagaacgatacagaagagaagccaaggtcgcagagagaaacaatacacacggcgacagatatatttcccggcgaaacgggaacaataatatatacagagagagagagagatttagtgagagagctttctagggttttcttcttctcgatttatcttcctttgacctcgatctattcctcttccttctccataaattttcccttcttctcaccttcattcatatctctcctagctccattctagggttcttgatccgtttctctaccttttcgttttcttcctccgggtataatttcttcttcaattcgtttgttttcgcgtctcttcgtctcttctaatttcatcaatttgggtcttgtagggttttgagattttctccttcgtcgggtgaagaaaaccctacattttgttttgtcactgattgtgttttcggtgtttcaggttgtttaatttactccggcgggtgaccaaattggcggtggcaaagtatgagtattgatttccctgggaaaggggagagttagggaagtttgggctagagagaaattggattgggtttccatg

SEQ ID NO: 17936 - DNA, 3003 bp, Unknown; identical to SEQ ID NO: 17935
  misc_feature (1)..( 3003): 2750-1469P.txt file - cDNA_ID_1814641; gDNA_ID_2926162; Annot_ID_139778

SEQ ID NO: 17937 - DNA, 2435 bp, Unknown
  misc_feature (1)..( 2435): 2750-1469P.txt file - cDNA_ID_1814652; gDNA_ID_1621095; Annot_ID_55627
aaatgttctttttctagttttttacctattccgaggaaaaaaaacataaaggaagaaatgttaggtatactgactttgtttgtagcagaatgaaaactttgactattgtaattttctttagttgtttattgtttttcatattttgaggacttgtggacggataaattaaataaacttaatagaattatacgattcaattagagataaaatgcggtatggttttaataacgcactacataatgcgattttgtcttcattcagaactttaaatagcatttaccaatttgagatatcgtcatttcgagtttaagaactcatttagaaagggaaacaaaaaatttaagcggctttggaaacaaatatactcaaacgtgatcacatgatatggataaatatgttcataactattcgactacaaaattatgcattttggtgttcatagtttagtattcgaacaacttgttcaaactatcctacataaattcgattataagatcccgtagtcgtattttatatgtatgaatattcgttatggtaatagttcgagtatcatatacttgtacatggaaaggtctaaatgaattttcttttccttttccttccatgtgatgatcaactttagaaaaatcttagttggcttttcaatttaaagaagaattttctctacagaaagagaagtgaagaataaatattttacgtcgccgttgcttttcgttcagaaactaggggaaatgagtcggtgaaggtaggctaccaacatgtgaagaatctcacatgatgcgtttctcttttcttctcctttttcacaaaatgaaaaagtcgtttatatcgcataaaaaacgagtaacaaaaaaagggttagagacgggatgaattaatggcccatatttaacttaatactttttctgaagaaatgaattccgttaatgtgaaaattgtttgcttgcttactaattacttttgtgcttccataccttttttttgttgcatatggttttaaatggtggcaatctggagatcttccgagcttagttatatgtatgatgggtaccattcggatatgttaataatttggttttttgctttcctttagtcggttttgaaagaacccgaactgaattagaactttgaactgaaattcaaattggttcattctatcttggttttaattttcgaacatgttaacattttccttctcgtatgttagtttcagtttttgatcctttttctgacaaaccgactctctgctgtcggattccgacctagcaacacgaccatctcaaatctaacacttttccttcgagatccgacgatcctcatatactttgagcaaagaccacctaagtccggttccgtggaagctaaatcatagcagtctcagaggctgattgttcaatcaaactaccataaactagaatccacgaccgccttctaagaaatctagggattgtccctgtatataaacagttagacagtacatataaccaaaaacgttgttgaagcataaacgaatatctcttaaagtatagtaataaaggcagtccaaactcaatatacatagtccgggttagaacgtcatatatgatatgacatcatggaatgacagataaggtgcaaaactatcggaggctctctatttgaagtgaaacattgtgctctttttatattctattcaaaagttatatataataccaacagctaaacaaccatgaacaatatcagtttagtgagttttatatagttaaaaacttagaaaactctaactgatgtaaaaccaacgacaagatcaacaatttttacctttatttcaaaaaatggtttaaagaaaatctataaaatgttaggctctaattcatgactcatattgtttatgtcattacttattaatctataaaagtttgagagtatggatgacacaatttgacccacaacatatacaacaaccacctgtaggtgtgtgtacatgtacccgggccaacatgttcccatgcgatcgaagagcactagtatcctattcggctcaaatattctttatacgtgacttctttcaaatcattcttatttttgattaatacgtttacgaaaaccattaatatatcaatatatggctgaccaaaataaaaaactatatattaaaaagaaataccaactaatatcagtgttcaaagatggccgacctatgctctcaccatctctcaattactatattttacaaaattgtcgtctatcacttttttggctttaaatgtgaatgtgagataacaatttattttaggttgcaaaaattgaaaagtcttatcggaaagaaaaaaaaaatccaatttagaaaaccgcgcgttggagggaaagccatagaaaactaaaagataacaaacattttaacaaacccaaacccaaaaattctcaaggaggccgaagaagaagaagaagaaatg

SEQ ID NO: 17938 - DNA, 3003 bp, Unknown
  misc_feature (1)..( 3003): 2750-1469P.txt file - cDNA_ID_1814652; gDNA_ID_2926162; Annot_ID_139774
caacgactggtctcaattctacaacaaccaaaccttcttcaccaccgcaacctccaccgtcacaaccaccaccaccaccgccacgtcagctgattctcctctgagtccggataatcgccgtgttgcaaagccaacacgtcggagatctagagcctcacgtcgtacacctactacacttttcaacaccgacacagccaacttcagagccatggtgcaacaattcaccggcggtccatccgccgttgcgttcgggtcttcgccgtcgtctggttttagtctcacctcgtctgatcccactgccggagtatcttcctctccttggcaatacgctaatttgcagaaccaaatggctcataacgagctaatgcaacaacagcgaccgtacatgttttcgtcgtcaaacaacgtgagcactcttagctatcctaacgcagtggctaccgatggttttgtgggggcggaggagagtagagagggtggtggaggaggaggaggaggttatgctccgtcgtcggagaggaatagcaatactacctattccgaggaaaaaacggtatattattcttagaaatgttctttttctagttttttacctattccgaggaaaaaaaacataaaggaagaaatgttaggtatactgactttgtttgtagcagaatgaaaactttgactattgtaattttctttagttgtttattgtttttcatattttgaggacttgtggacggataaattaaataaacttaatagaattatacgattcaattagagataaaatgcggtatggttttaataacgcactacataatgcgattttgtcttcattcagaactttaaatagcatttaccaatttgagatatcgtcatttcgagtttaagaactcatttagaaagggaaacaaaaaatttaagcggctttggaaacaaatatactcaaacgtgatcacatgatatggataaatatgttcataactattcgactacaaaattatgcattttggtgttcatagtttagtattcgaacaacttgttcaaactatcctacataaattcgattataagatcccgtagtcgtattttatatgtatgaatattcgttatggtaatagttcgagtatcatatacttgtacatggaaaggtctaaatgaattttcttttccttttccttccatgtgatgatcaactttagaaaaatcttagttggcttttcaatttaaagaagaattttctctacagaaagagaagtgaagaataaatattttacgtcgccgttgcttttcgttcagaaactaggggaaatgagtcggtgaaggtaggctaccaacatgtgaagaatctcacatgatgcgtttctcttttcttctcctttttcacaaaatgaaaaagtcgtttatatcgcataaaaaacgagtaacaaaaaaagggttagagacgggatgaattaatggcccatatttaacttaatactttttctgaagaaatgaattccgttaatgtgaaaattgtttgcttgcttactaattacttttgtgcttccataccttttttttgttgcatatggttttaaatggtggcaatctggagatcttccgagcttagttatatgtatgatgggtaccattcggatatgttaataatttggttttttgctttcctttagtcggttttgaaagaacccgaactgaattagaactttgaactgaaattcaaattggttcattctatcttggttttaattttcgaacatgttaacattttccttctcgtatgttagtttcagtttttgatcctttttctgacaaaccgactctctgctgtcggattccgacctagcaacacgaccatctcaaatctaacacttttccttcgagatccgacgatcctcatatactttgagcaaagaccacctaagtccggttccgtggaagctaaatcatagcagtctcagaggctgattgttcaatcaaactaccataaactagaatccacgaccgccttctaagaaatctagggattgtccctgtatataaacagttagacagtacatataaccaaaaacgttgttgaagcataaacgaatatctcttaaagtatagtaataaaggcagtccaaactcaatatacatagtccgggttagaacgtcatatatgatatgacatcatggaatgacagataaggtgcaaaactatcggaggctctctatttgaagtgaaacattgtgctctttttatattctattcaaaagttatatataataccaacagctaaacaaccatgaacaatatcagtttagtgagttttatatagttaaaaacttagaaaactctaactgatgtaaaaccaacgacaagatcaacaatttttacctttatttcaaaaaatggtttaaagaaaatctataaaatgttaggctctaattcatgactcatattgtttatgtcattacttattaatctataaaagtttgagagtatggatgacacaatttgacccacaacatatacaacaaccacctgtaggtgtgtgtacatgtacccgggccaacatgttcccatgcgatcgaagagcactagtatcctattcggctcaaatattctttatacgtgacttctttcaaatcattcttatttttgattaatacgtttacgaaaaccattaatatatcaatatatggctgaccaaaataaaaaactatatattaaaaagaaataccaactaatatcagtgttcaaagatggccgacctatgctctcaccatctctcaattactatattttacaaaattgtcgtctatcacttttttggctttaaatgtgaatgtgagataacaatttattttaggttgcaaaaattgaaaagtcttatcggaaagaaaaaaaaaatccaatttagaaaaccgcgcgttggagggaaagccatagaaaactaaaagataacaaacattttaacaaacccaaacccaaaaattctcaaggaggccgaagaagaagaagaagaaatg

SEQ ID NO: 17939 - DNA, 3000 bp, Unknown; identical to SEQ ID NO: 6509
  misc_feature (1)..( 3000): 2750-1469P.txt file - cDNA_ID_1814682; gDNA_ID_1621096; Annot_ID_55669

SEQ ID NO: 17940 - skipped

SEQ ID NO: 17941 - DNA, 3000 bp, Unknown; identical to SEQ ID NO: 6508
  misc_feature (1)..( 3000): 2750-1469P.txt file - cDNA_ID_1814690; gDNA_ID_1621096; Annot_ID_55667

SEQ ID NO: 17942 - DNA, 3000 bp, Unknown; identical to SEQ ID NO: 6508
  misc_feature (1)..( 3000): 2750-1469P.txt file - cDNA_ID_1814690; gDNA_ID_2926163; Annot_ID_139810

SEQ ID NO: 17943 - DNA, 3003 bp, Unknown
  misc_feature (1)..( 3003): 2750-1469P.txt file - cDNA_ID_1814696; gDNA_ID_1621096; Annot_ID_55661
gggtccagttgtaaagtcgaagccagggaaagcttttttctcaatggttccaggggaggttctattggcttcacttgatgctcttagtaagttaaatttatatttattagctccacattgacattagattagattatctttgtaatgatgaactaaaaatagtttgatttgatctttgaaattagataaattactagacgctgctgaagccgcagagagacaaactctttctgctacgtccaaagctctacaagaatggttagtgagaggtaagtttcacagacaaagtcctcaattttgcctcacgtttagtgtaaatgtctcacataagtgaggttacattaacaggttaggtgagagcgcgggagaagctacgaaagatgtactaggcacggttgggcacgcagccggcactgcgtggaacgtcttcaatatccgcaaagctttctctccttcctcttcagtcacatcggggatcctcaaaaacgcttcacgaaagtgatatttggtgtttgtatttatttgtgggcagagaccataaggttaaaattaagtcagaatatgcaaatgtgtaatcttgaatctcaaacaaaggaaacctctcttccttaccaaatttatccctcatgtgtctaaggaatacacagactccaaacatatcaaacaacttaaccttaaaccaaaagctttgacccaaaatgaaaaaaaaactaccaaaatcaaatcatgaaatttaaatatatcaaagaaaattgagctttagttaaataaaaaaaatatgatcatgaaaacagttgtagatccatcgacaaagggaatagttagtgtagagcctccgttcctcgtcgctggtcgatgaaccataccaccacctcttccgatcccatgcccaccttcttcttctccatgtccgccaccgcctccaccagcatggcctcctccttcaacagcatgaccacctcctccactagcatggcctcctcctacactagcatgaccacctcctccactagcatggcctcctcctacactagcatgagcacctccgacactaacatggactccacctccaccgtgagcgcctccaccaccgcctttggcaaccacggtggtacaattgactaaaagtaaagtgataattagaaggacggcgagtttcgctgcataattggtaacaaagtgtgctcgagtcttcgtgattttcatgctggtaatatcaaacatacacctttatcaaaacaaacaagttctatatcaaaattcaaaacataaacatatatgcgtagttgcgtacactatctttgattcttaaattgctgtttgctaccttaaaacggaaaagaggaatttgttatcgtggggtgagatgctttagaaaagcctctattgtatatatgtgtaggcaatattcaagatttttttgattcttttactttttgttgtgtttaggataagttgtgagtaattctaaaaaatactctttgtatttatttttcctcaaaatatggatttagatattgtgtataattatcattaccctaattaatggaaaagtaagtttcacaaaacctttgtaggttatcattaccctaattaattatcattatatttttgtaggttataaaatccataacaattattgtagcatgtagcaaaaatgaaaacgaaaagcatgatatatcattagaaaaaaaatataattaccatatgctggaattggtatatttagagtttgatgggaaagtttaacctaatcaattcgtcaattcaaaattcaatatagattacattggtgctaaagttttaacacgtgttgcttcatatataacttactatgtttaagatggtaaaaatttataatgtttacaaacacatgctttctcaattattctatacttcatagacgagactagcattttgagattagacaaaagtatcttattatataaaatttggtttcttaaagttacgattagacgtgttttcctatttttatttgaattggatttgattatttttttcattatttaatatatttctattttcacaaaaattccatgaaatgattattctgtttctctttgaaattagtttttttttcaccaaaaaagaaaaatttgaaattagtttactttttaatattaatcatattttcaaaatttatttatttatttcttaagtatgttaacaatttaacgataaagtcatatcatatctacgacataattaaataaaaattggaactgcaactaatacaaaacttaccaaaataataagaaaatgtgcatgcatgattgcatgtgatgtgtgtatataaaacactatttactggtgcgttattgtgaatccatgtcctaacttttatattttgtttgtataaattttttaaatttaatttgtaaatttttggaaatcttattatttgggtttcaataaaattttaacttactttttaaatttgactttcatatatctcattgctttccaatcaaaatttgtcacatgtttttagttatttgacgaagaaagaattgatcgagtataaccctaacccaaattgttattcatttaatttattctaactggtttaaatgttaaataaattatgggatgaattgtttggaataatccatgttcatcaaatttaaattaattgaccaatttatacataaatttctacttcacaaataaaaaagagttaaatatgtctacccatgaacacagaaatatgtttcctcaaaataattaacagactttttctctattggtctttcatataaagctaacactaacagcgttttagacatgaataatacaacgcgttatcgtaacaaatcatgtccgttcatgttgccacgtgtacatcatattgttagattagagggaaatgactcgtcgccttcgtcaacacagaatatataaatctcaaaattctataattcgatattttttcccagaatcaaccagatctgctttcgaagacgaatctagctattagccatg

SEQ ID NO: 17944 - DNA, 3003 bp, Unknown; identical to SEQ ID NO: 17943
  misc_feature (1)..( 3003): 2750-1469P.txt file - cDNA_ID_1814696; gDNA_ID_2926163; Annot_ID_139804

SEQ ID NO: 17945 - DNA, 3003 bp, Unknown
  misc_feature (1)..( 3003): 2750-1469P.txt file - cDNA_ID_1814702; gDNA_ID_1621096; Annot_ID_55659
aggaaactataagttaaaaaaaaaaattgttggcagtctttaattgtaccaatcctgtgagactttattattacagactagatgatcacccgcgctacgctgcggttttttcggatttttttgtattatttaatttaaatttaatttttatttatctaatcattcactcatgcaataagtaattactttaatattaaaaatatttttttctaacaacattctcaacaatgcatcatacatataattcataaacaacatttgtcttaaaccaatttaagagagggtagggttggattctagaaacctgagaatttgatgatagagctccttacgtattcatcagcctcagtgatttattatataaatatcataagagaatataaatatcaatttaagagaataacttactcaaatcactaagtaatccacgactattatacattcatactttgagtttggattaaaaaaaaaatcttcaagtatgagaaaactattaaaatagttttattgaaaaatcatataaaataaaaataaatttagtaataatataattaaatatgtaaaataaaattaaataagaaatatatcattaacctataaattagaagttgaagaacttacattaattatttaatagacacatgtcaaatgctaaagtgatgatgtgtcaatcatatggagagagttgaccaacttttcatatatatgattggtaagaaaagttgtgtgtggttgtagttgtactacaagcttagtagaaacaaaagtattattgtgtaaagcatattgtatttttatgtattaaaatacagaagaaacgtgatacaaaatttggcgttttccactaaatcaaaaagtgagcaccattgtaatcgatgaacagtagaatttttgttttttctttacagttgaataatataatactaaatactaatgaactcaaatttttacatgtgaattttatgtttgttacatgttataaactcagataaaaggtttcgctatggaaacactaaaacgaagctcaaaagtatggctacaagagcttcgttcaaacctaaacattttctggggaacaatcgaatccgaaatctccaaaaacggtgccgcttcatatatcttccctctccaacgttgcatcttcagtttcctctgcgcctctctcgccggcgttgacgcttccgtatcgccggacatcgctgagaacggttggaaaacaatcaatacttggcttgcgttgcaagttattcccactgctaaacttggcgtagttcctcagcctcttgaagagattttacttcatacttggccttatccttctctcttaatcgccggaaattacaaaaagctttacaatttcatcgacgagaacgccggagattgtctccggttaggtcaagaagaattcgggttgacccgagatgaggctattcaaaatcttctctttgttttaggttttaatgcctacgggggcttttccgtcttcttaccttctttgatcgggagaataaccggcgacaattccggtttacaggagaggattagaaccgaagtcaggagagtttgcggatccgggtcggatcttaatttcaagacggttaacgaaatggagctggttaaatccgtggtttacgaaacgctgcgttttagtcctccggttccgctgcaattcgcacgtgcgaggaaagattttcagataagttcacacgatgctgtttttgaggtcaagaaaggtgagcttctttgtggttatcagccgcttgtgatgagagacgctaatgtttttgacgaaccggaggaatttaaaccggaccggtatgtaggtgagaccgggtctgaattgctgaattatctctactggtctaacggtccacaaaccggtaccccgagcgcgtcgaacaaacagtgtgcagctaaggacattgtcactctcacggcttccttgctcgttgccgatttatttctccggtatgatacgattactggtgactccggttcaattaaagctgttgttaaagctaaataagttaaagattgattagtgtttaatgttatgtaatcaatcttcaacggtttcatttgttcggagtgtataaattatatgtaaactaaaataatccgaattgaaactcaaattgttatgttagatggtgttgctatgttagagagattttaactgctttttacattttattaaggatatatgactctaatttttatgatagcaagataatttttgtaatacaagaaaataaatacaaagctcagtagtataatcataaccacaaagctcagtagtataatcataaccacaaagctcagtagtatttagggttaccaagcaatataataaatgtaataaatttgtgcgatggctctaaaaaaatgtaactttgtgtgatcagcagtataataaatttctgatctaaaaaactgtaactttgagagttgtctcaaaaccaactctctttcttaacatttatgaactattaattaatcaaaatcgatttaggtcttagtggcaatctaatttttttcctttcttacatttcaatctcttttggatttactttcaagtaagccatcttttatgttgaaacaaaatcttatggatgagcttctttaaatgttttagccatttatcaagaatgtattgcttaaagagtggtgtagttctaataataataaatatatatatatatccagatatttttgttagtctaaaataatccttcttgaaacacaaattgccatgtcggtaggattcgtaattattttaaataatttcttgaaattgccataataagagaagacaaatgtggtcatgttgggggtcctagaataaagtagtttgcctcgattaacaccgaaagtaaaaacattgtataatcaattcctcttttttgttttctatttactcgataagattctcctaaaaccaaaaaggaaaaaaaatttcaatcaatcttgagattgtgtcaagaaacctcaagagtgaaaatg

SEQ ID NO: 17946 - DNA, 3003 bp, Unknown; identical to SEQ ID NO: 17945
  misc_feature (1)..( 3003): 2750-1469P.txt file - cDNA_ID_1814702; gDNA_ID_2926163; Annot_ID_139802

SEQ ID NO: 17947 - DNA, 3003 bp, Unknown
  misc_feature (1)..( 3003): 2750-1469P.txt file - cDNA_ID_1814730; gDNA_ID_1621096; Annot_ID_55699
agttgggtttcccttgtaaagccgtgaatgatggcctctggttgcaggttcgttgtccttaaacttgctttgctttctcattcagccagttgtagaaatgttgggatggttgatgtgcttagcgttgatacatttgacttaaggcatttacatgagcaattctagtctagtgtttcatgttagattacaaatgcaataatattgttaataaatgcaataatgtttatgtgtttgactacatttcagatgcttctcagtcaaagggtgcaggaagttgctgccaacacatgcaaaaggtgttgccttatcagtattgcatgtgcgtgtaaacaaggatttggggtttcacatggtgcaaccttcaacaattattattgccaagaaaacgtgcagaacaatatgatgggagacatggataacgtatatgtgccggaatcttctcaaggcgatgggataggcatctttaagcctgtcaggatcagtgtcagaggacaacatattgatggacttaccggcattggatgcgaagctacatttgtaccaccacctgcttggcctcctactccttttgtgtactctcgtgtccctattaacagaaatggtcagcaatctattgctagtgatggttctgaaggtagaattgatcagagtggagaaatttcaaaagatgggctgacagctcttgttgggttgagccaagggacaagcggtgttggtaacaatcctcgtggagaacaaactgagggagggcgtggcagtggagctactgttggaatgtcagaaccaaaggaaccttcagtaggtactgagtgggagaacgcaagttgtaccatatcacttgatacaaagacacctttgtgtcactttcctccctttcgttttgggtaacgtttccagccttatttacttgtaaacaacactcttggtttattccaattgcggtgactccttgatttgtcctgtttggcaaaatagttcctctcagatgtgtctttttcattgctgcagagttgaatttgaagatgtccacagactcgctaacggtcatgtagagcattctcctgaattcttctatgctggttctctgtggaaggtatcagaaactcacaactaagtcgtcaagcttttctcttcgagctgttcttgctttctaagaatgaaatatgggttttgataagatgttttaataccatatccagattagcatacaggctttcaatgatgaagatcctcaaggacgccgaactatcggtaacccgagttaacacaatgacaagatcacatgttttcctcacgttagattggtctgtcatagtatacataactttgataatcaatatctacaggattatttcttcaccgccgcgaagcagagatagtggattcagtaaggaaggttagttttctgtggtctattgttataaaagagctgtttagagctacttaaattgtcatgtcttgtgaaataacaatctcttctgccacattcaggtccatgtttacatagatcctcgtgacaaagtgactgcacgttaccaggtatgttacaaatatctatttgcaagttctcgttgaaattcatataagattccatttctaaccccttgttttgatgcatctagtcatggtttcctcataagttatatcattttcattgttcttgtagcttatctgcccgtcgaaaagagaagtgatgttgtttgggagctttaaacagagaggaactcttctgcctaaagctcccaaagggtggggatggcgcaccgcactgctctttgatgagctctcggaacttctccagaacggtgctctgagagtggctgctgttgttcagctcgtttagaggtgtcttaaacccgagagttgtatgtaaaaaaactcaacaaaatccacattttgaagttaaccctcttaataaatagtatatattctacttccttaaactgtggatgtgtttgtataaatgagtcacagaaactatttgagagaaatatcaagttttcagaataagaatgtctttttatataacagtcaactgcatcatccaacaattggagaatccaaggaggagagccaagatcagggtacgacaacatctacaaagtaccaaacataagtaacatacaacacattctaacactaaagaacagcgacaaaatggtaacttggtaatagcaaaaacataacaactctcaataagaccaaacacaaacggcgtagtttaatcaataataatgaaccggaacctaccggttcaagcaatcggttcatggttaacaattaacaagtaaatgtaaaaccctattggtacacccttgccggagagaagcttttgtctcaccactcaccgtcacaacttgtgcttcctctcgtcctcgtcgccgtcgtcagagagaaaacgattaaagctggtggtatggggagagataaagaagattaagacagagatggattcggttgttccatggatgagagctccggttgacgtcagcaatgtcgaaaactgcgctctcgataccctcccttgccttaatcccaagtaaacatcgtttatctgtttaaaagtttttcgttttgattgaattatctttctgtttacgacttttgactgaaacttgggcttcgggaaatctaggcaacacaacagcgttttgaccttactatgtcaaagttgttcgtttctaaaggttaaattttgatttggttgcagttagagatttctcgagttattatttgctctttcgaattggagtattagatactcaaatagtatacacttctgttaatactgaagtaaaacacctccaaatttgcttagtgttaaactgatgttctgtctcttgctcttcttcttcttagatcaatttcttgtttgaaaattttaccatatacttacaatattcatacgagtaagaagaactgttttggatcacttggtgcgtgatgaatgcctcatttttcaagttttgatgtgataggttgaagaaggcattggagaacatg

SEQ ID NO: 17948 - DNA, 3003 bp, Unknown; identical to SEQ ID NO: 17947
  misc_feature (1)..( 3003): 2750-1469P.txt file - cDNA_ID_1814730; gDNA_ID_1621096; Annot_ID_171050

SEQ ID NO: 17949 - DNA, 3003 bp, Unknown; identical to SEQ ID NO: 17947
  misc_feature (1)..( 3003): 2750-1469P.txt file - cDNA_ID_1814730; gDNA_ID_2926164; Annot_ID_139841

SEQ ID NO: 17950 - DNA, 3003 bp, Unknown; identical to SEQ ID NO: 17947
  misc_feature (1)..( 3003): 2750-1469P.txt file - cDNA_ID_1814730; gDNA_ID_2926164; Annot_ID_198989

SEQ ID NO: 17951 - DNA, 3003 bp, Unknown
  misc_feature (1)..( 3003): 2750-1469P.txt file - cDNA_ID_1814734; gDNA_ID_1621096; Annot_ID_55698
tgtagctatttttgacttgaagtgcatgcaaagttgagcttgtgtagtataactatatggaatatgctaactagtcttgaagaggaaatattttgcaatcttcagcttatcttaaaattttaggtgctgctcaggattctgagcaaagacgaccatcaaacgaagttaagaagtcaagaatatctggaaatcgagtgggcggaacaccaaatatgaaagctggttctggatttggtagcacttcattgtcagagaaacatggagacgtcaggaaaggaacaccattgagaagagcaaaggagaaacaatctgagaaagagaataaattgtggtggctcaagcttccctatgtgctggtaggtaaataatattggatttttggttaaaaagctttctttgccagatccaattattaattcacaatcaagaacgaactatcacaaaatattatgagccagacacttaccgttttctcttttcttcagagaattctcatgcggagtaatatcgatcaagacatatctgagggatattttaccttgaggaccgaatctatggaacaaaatgagggtcaagtttcacatatgattgcatttgaagatcaaagtgatgctagaaacttctcttatctgcttgaatcagtttttgaagacttggatgatttcagtgccgatatagctcccgtaacaaccaaggtagatagttcatttctttaccaacttgattcttctttattaatgtctgtatctgtgaagtttacttgtttaggagaattttgttccttaaacccttaatttctcttcatgatctgagagtatactgaattctaagagcagtgagatcgtatttttatttataggatctttatgaggaagttagttctggtggcaagaatgtgatagttgtgaggaagaggcagcttacgttgtatgctggacaaccatttgaagacgttgaaagagctttgcgaactctgattcaagaacgaagatgaaaaaagtaacaacattacttcggactgaaaaaactagagagcccagagatgatcaatgtggagatgacaggggcagtaagaacaatggttccacaacaacaatttttcatgaagcttaaagaaccactgagcttctgttgtattatggtagtagcattggaattgagaggacagatccactagaaataaaaaagattgtttatatcatgtaaaaacgtattttacatgaatcagagagaacaacattttcatcttcagaattttattgagatgcaacgatcttgatcatggcttgtgcattaagccctgttacattcttctcacaaaacttcttccaagcttcttgcttgcttccttcttcgtcttcttcttcattccatgtaaatttctcgaaaagcgagttcaccatactccttgcagcttcccttgcctctggcaacttgtcactcaactgatccgcagccatttgtgcgagcagaatcatcccaaattcttccatttcatttacctcctgataacaaacatagagacaaatatatcaatcacacaattcaagaaaataataactttgctctgagcattttaatcattgttgaagaattcaaaataccattttagaaacgcagttggaagtagacacagcagctttggccctgacacgagggttactgtgacggacataactctgaagcttacgcagaagcggcaagcgagccaccgagttaaccatcgtgttcagcgctttctctgcttcttcacacacaaacttcttgtcttgtgaagctttcatcagcaactgcaacagctgttattttcaccatcaagataccaaaatcaaactttattattaaatcaacaatccatagccaatcaaaaagctaaactaaccggaaaaaacaaaaaacaaaaatcaattttaccagatcgtccatagatttcaaatgaggtccttccagcaacttttctccataagcagtgaagatatcagaacaagtcataatcgaagtcttgcacaatgcacttctaggattcttcatcgccttcaccatcacaactataagcttttctctacaaattgacaaaaacaaaatcatcaccaagaaactccataagatttcagattctggtcaaaaaataaaaaatactcacagaattggtagcaacagagaagagtgatgaattgcaaatctccttgtgttgttcaatgagtcacatactttaatccaatcctttgatgctaattcttcaagtaatctctgtgatagattgaatcaataatcatcaaaaacaaattactacacataaattcagaatcaattgagaaatttaattacctggacagaagattcaggatctgaaaatggtttgagattctcagaagcaacgtattcgacggtcgattcagccacagcgacagggttgttttcgtcatttagaccaatctccggttgctttgagagtttggccagcttcttaggtcgttcctgtgagatcggaagagcgttttcaatgttcctcaacgccattagagataagagaaagagagagattttgatttgaaattcgttaggggaataataatcaatggtggggttgaaaagcttaatataaagagaaatttttgttacctttttcgcattttatattcaaaaattcaagaggaaaaaaagcaaaagaccgttggtaaggttttggctccaacggtcacaagcatcggttcggtttacatgaattagattcggttatctggtttattgttcaattcacacgacgtcgtttcataacttttaagaaacgacagcgtctaagttatcacttttgcgccacacgcgagtgagagctaagctaattctccgtcttcaatggcttttctcttttccccaattgaaattgaatctattccctagaacaaattgattgtgaatccggcgtcatttttgatggaccaagagtatcgaaactctagaacgacggtgacgcaccaccaacatcatcatcaaatgagaatg

SEQ ID NO: 17952 - DNA, 3003 bp, Unknown; identical to SEQ ID NO: 17951
  misc_feature (1)..( 3003): 2750-1469P.txt file - cDNA_ID_1814734; gDNA_ID_2926164; Annot_ID_139840

SEQ ID NO: 17953 - DNA, 3000 bp, Unknown
  misc_feature (1)..( 3000): 2750-1469P.txt file - cDNA_ID_1814738; gDNA_ID_1621096; Annot_ID_55697
atgtagcttcgcatccaatgccggtaagtccatcaatatgttgtcctctgacactgatcctgacaggcttaaagatgcctatcccatcgccttgagaagattccggcacatatacgttatccatgtctcccatcatattgttctgcacgttttcttggcaataataattgttgaaggttgcaccatgtgaaaccccaaatccttgtttacacgcacatgcaatactgataaggcaacaccttttgcatgtgttggcagcaacttcctgcaccctttgactgagaagcatctgaaatgtagtcaaacacataaacattattgcatttattaacaatattattgcatttgtaatctaacatgaaacactagactagaattgctcatgtaaatgccttaagtcaaatgtatcaacgctaagcacatcaaccatcccaacatttctacaactggctgaatgagaaagcaaagcaagtttaaggacaacgaacctgcaaccagaggccatcattcacggctttacaagggaaacccaactcttcaagttcttttcttgcgttcaatagtatttcaaaagacatattgcaatacagaagtgaaccaccttcaaaagtgttgacaaatgcactgtattcttcctcagtaaattcatattttcctttaacagagcctgtaccctgtcttgtccccacaacccgtccaccccaggttagagcagaaacaccacagttaccccactcattgacaacgaaaccatcagaggaagaacctaaagtaggagaatttctagagtctgctcctgataaccaactatcattactcaaatggtatgcttcttcagaaggtccttcaattgccaccacactgccttctgtcttatcaacaacactggtgcaaggacgaccaaaattcgtttgtgagttagaagattgctgaaacacgaggtttgaacctgaaacacctctttggaaatcaataacaccttctgtgagtggaacaatcacatcatcactagcatctcgtaggtcggcttctatatctaaatgacctaacttacagtccaaactcctgaaagagaaatcatccatcacatttttcccctttgatatagcagaatccaaaggaaagcttgtctctctctcaaatctggaatcttgattggaatgatctgagttggagagagcactatttgctatgaaggcgtacaatgccagttcaaacctttttgacatggaaagaaacggtttatagaaatttctagatgcaaatacagtatgaaaccataatacagttagagtatgcaattcactataccgtttttcttcactaggcacccatagttcatcagatgtcagcaatgcacatagagtctgtgctgagagtttcggcagcatctgaccataaaatgtgataaaataactaaataagtagcaattcagaactagaatacttttttattctaactaaacactaggttgaacactcttcgttttcattatcagatgctttcgagatagaatgacatataggatggaagacgttcaagacataggtagaacggcatatttctaaaatggggatacttttgcttttttgacatacacccaaaagaaacgaggccatcactaactacataaaaatcataatgtcagtctaaagcatagacattatattacctctctcagttccacggcaccactttgacagagataaccccagcaagcattccttacacgttctccatgaatgccatagtcttggctctcagcaaatacctaagtcacaagtcgaagaagctctgtatactcaagaatcacggagaccaatgaggctaaaataaacacatgactgagattctcaaacctgatatgccaggaagtttgaagtcctcagctcagaaataataaaatcagtgcatatcgcacacaaatcctgtcagacaaaagccactagttattagatcaattgatccaaaagaaactatcttttgatgcaatcataagaattaatcatacctgaaggtcaagaaaagaagcagcagctaaaacacgaaaggcattatcatcatccagcttagggatggtacccatacagataagctaaagcaacagaaattgcgtctccattaacatttttatcatccacaagtaagttcacaacaggagagctagcttctttccatggaccttgcagcatagtccttaagcaaaattgcatagtttaaaacaaattgcaaaacctgaatatcaaaatcctcccacagaaattcaatattcaaaaaattcacctgaagtaggagctgcgagatagaatcaagcggtggagatggtaactggatcccatagctttaacaacaacgtcagaaaacgcaccagagccgaaaccttcggattgaatatgatcgcataaagaagtaagattacaatcgagagaacgaagctccgaggtactctgatcactttcagcatgaggaagaaccggtggcgatggttgaggagacggtggtggtggaaccgtcattctcatttgatgatgatgttggtggtgcgtcaccgtcgttctagagtttcgatactcttggtccatcaaaaatgacgccggattcacaatcaatttgttctagggaatagattcaatttcaattggggaaaagagaaaagccattgaagacggagaattagcttagctctcactcgcgtgtggcgcaaaagtgataacttagacgctgtcgtttcttaaaagttatgaaacgacgtcgtgtgaattgaacaataaaccagataaccgaatctaattcatgtaaaccgaaccgatgcttgtgaccgttggagccaaaaccttaccaacggtcttttgctttttttcctcttgaatttttgaatataaaatgcgaaaaaggtaacaaaaatttctctttatattaagcttttcaaccccaccattgattattattcccctaacgaatttcaaatcaaaatctctctctttctcttatctctaatg

SEQ ID NO: 17954 - DNA, 3000 bp, Unknown; identical to SEQ ID NO: 17953
  misc_feature (1)..( 3000): 2750-1469P.txt file - cDNA_ID_1814738; gDNA_ID_2926164; Annot_ID_139839

SEQ ID NO: 17955 - DNA, 3000 bp, Unknown
  misc_feature (1)..( 3000): 2750-1469P.txt file - cDNA_ID_1814750; gDNA_ID_1621096; Annot_ID_55694
acccatcggaggcttctcagctttaaacttgtacttcttctcaaacatcaaacttttctcatcatttccagattcatccaacggttctacgcgcaatcccgccaaacctttcctctgtgaattcaaccgtttctccatgttagacaatcttgcttctatctctttctcaatatcaatcccagtttcatcatcttcttcttgcttaccctcacttttatgtgcttcacgtgccatcattctgatctctgcaatcttctcattcatttcaacatcctctagcaaaaccaaattgttaccctcactatcacttgaaacttccggcgttttctcggatttcgttgagtctcccagaaacaaaacagcacaaacagtttgaaaagcgaatattccgatcaaccacaatccatacttcgctactaacttcggagagatcttagttgatataccatttacctcatttgacacaaccgagctacttaagacctgaatctcctctacatcagaaactacgtcgcttgaaggatcattttccggcgtttcgattccgattatgactgtctcttgagctttggatttagggttctaaggattttgggtcgcaggtaattttccttttgatgacttcgacagaacggaatcgaagccgaagaacaccggataacttttacagaaactctccttccggtggagtacgacggaaggaaactcgaaggagataaaaagacggcgcatcggaaaactgccatggctacggcggggatggtcagccactgagactgagagtttcttattagccacattgaaaaaaaaaaaaaaaaaaaaatagtaataacaaataagccccaaacattttaaaatattcgtatattcctctttcaaatttgaaagtttcaatattgaccccaaaagtgaatgattatgcaaaatctttaattttgtcttgagccgcctgttatgtagcatcatcgctctcactcttctctgtggttgtttcgtcttccacactatcacttccatagccacaaaagcttcacataaatcctaattaaaccctaaaaatactgttaaagacaaacagaaaactacaaaatacatcttttgtatatttggaagcttttggttttatggaatcggagaagcctgggattgtttcaattctcgctgcagcaacggtcgattcggagaaacctcgcgtttcaatttctgcggtgagagcgattgcggcggcaagagctgattcgtttcttctcacgcgtactctctctgggttcgttttcatctgctgggtctgttccaattcgtgcacctgttacaattgatgaggatgatgatgatactggtactgtaactgatgaacataactcagcaagtagtgaagctagtagttatagtaatggacttgattttgagactgatgaagatgagactgtgttagaggatgtggttttggatggggttagggtagataggctactaggggaagagttaggtggagatggaagtgaatttcaggtgggagtgggatttatagaccatttgcaggtgatgttgacgaggaaacgtcggtgaattactcgtctttgggaggaagatggtgagaacagtgatgaggtttgcgagagtgaagttagtggagatgaaagaggtagtatgaaagcaaaagtagtcattcctcgggctgttttgtctttggatgatgatgagtttgatgaaattttgggtagtatgatgaagaggctgtcctgttgggtgtaactaaggctccaggtgatgaagaagctgaagttgaagatagagggtcgcagttttgagataagggagtggttatgaaccagagtgttcggattcttttataggtgatgttgattctgaagaggtgagaatgaactattcagataaattagatgatggtttgatgtcctttgggaatattgaagaatcaagtctcggtgttccaccagaaggttctagtgattttatggcagaaaatgaagggaactctagtgaggcgagtatagaattgggtcaaaatttcaagcaactcatcgagaaaggggatagtaaaagtaccatcaacaaggaggatagtggtggtagcattcatgaatttgacgcattgatgaagccaagtgatgtagaaagagtagaagatagtgcagttgaattagcaaaaatgggaatgaatgataaaccagaatacgcaggttctaatataggtgaacttgtatccatagaggaagttatggtacaagagaaatcttctgacaatgtgttagtgtcttttgagagtagtcttggtgttatgacaggtgaatgcaaggagtttctggtggaaagtgaaggaaacgctgttgatgaggataaaggattagatgaaactgtaagcagccttgtcgaacaaggggtgggtcaagctagtaccagcaaggagagcaataacagaactgatgttggtagtgtctgtgatgcagatgaattgataattccacgtgacgagtctattggatcagaaagcagagactcaggggataaagacgctggaaatatgataggcaaggcagaagaacactgtgaaaatgatcgtggtgctgttagcgaattagaaaaacttgagtgcgcggatgaacctgaaattggtatgagttctgaaagttttcagttaactccaacttcagattctgaaatgataatgaaccttgaggtcgctggaggaatagatgtcgttgtaattggttgtggttcttccgatcaaaaagctgaagaagaatctgaaaatgaaggaaatcaagaatcagacgatactgataggaagttgtcacttcctgatgaagatagagcatcaagtttaataagttcctttgaaacagccaatgagactgtggaagatgggaatcaattaataagcaggtcaattttcagtctgatagcgaagcaaaccaaatctcagtgggcatagaagaaaccagtttgctttctgttaaagacattgagaggaccatg

SEQ ID NO: 17956 - DNA, 3000 bp, Unknown; identical to SEQ ID NO: 17955
  misc_feature (1)..( 3000): 2750-1469P.txt file - cDNA_ID_1814750; gDNA_ID_2926164; Annot_ID_139836

SEQ ID NO: 17957 - DNA, 3000 bp, Unknown; identical to SEQ ID NO: 6532
  misc_feature (1)..( 3000): 2750-1469P.txt file - cDNA_ID_1814759; gDNA_ID_1621096; Annot_ID_55690

SEQ ID NO: 17958 - DNA, 3000 bp, Unknown; identical to SEQ ID NO: 6532
  misc_feature (1)..( 3000): 2750-1469P.txt file - cDNA_ID_1814759; gDNA_ID_2926164; Annot_ID_139832

SEQ ID NO: 17959 - DNA, 3000 bp, Unknown
  misc_feature (1)..( 3000): 2750-1469P.txt file - cDNA_ID_1814759; gDNA_ID_2926164; Annot_ID_198977
acaactccccaaacaaaactttagatctgaaaatctcagctttgaaatggaggaaatcggaatagttatcgtcggcggcggaatcgctggtctcgccacttccattgctcttcataggtttgttattaatttattttgtaatgagactcaaactttatgaattccatatgtaaattaatatttggtgtgtatattttttttttaaaatgtaggaaaggaataaagagtgtggtgttggagagagcagagaaagtgagatcggaaggagctggaatcggaactctctccaatggttggagagcccttgatacagcttggcgttggtgatcgccttcgtctcaattcttctcttattcacaagtaagtaatattattcttttttaaccataactttattattcattatatgtttgttttagaattttgatttatggacctttcttggatatgaacagggcacggaccatgttgattgagaatggaaaaaaacgagaattcgtttcaaatatagtgtaagtcacaattttcctatccttaaaattgaagatgataaatataaaaactatagagttaatttgagtattttgatttagtttttaatgcagtttattctattgatttgttgtaatctttgttattgatttgaatatttaatactttgaataaaacagagacgaagctcgttgtattaaaaggaacgatcttgttgaggccttatccgatgcccttccgaaaggaaccatccggttcggttctcatattgtttctattgagcaggacaaaactacgttgtttccggttgttcacttagccaatggaaatagcatcaaagccaaggtaaatatcagtattgtttatttagacattaattgttcaaaggcaaatattacatttggcttttgcatttactgaagaatttatttttgtatgctttcaatagtataaaataaattatgcaatataatgtttttcttctctcataggtcctgattggatgcgatggtgccaattctatcgtcagtgattatttgcagttaaacccgaaaaaggcgtttgcttgtcgtgcggtgagagggtttactaagtacccaaacggccatggatttccacaagaggttctaaggataaagcaaggaaatgtcttaataggaaggcttcctttgacggataatcaagtcttttggtttctagtacatatgcaagacaataatcacaatggtaaagatcaagaatcgattgcgaatctgtgtcgaaaatgggccgatgacttgtctgaagattggaaagaaatggtaaaaatatgcaatgtggagtcattaacactcacacacttaaggtaccgagcgccatcggaaatcatgttagggaaatttcgtcgtgggacagtgactgtagccggcgatgcgatgcacgtgatgggtccgttcttggcacagggcggctcagcggcgctagaggatgcggttgttttagctaggtgtctagctaggaaagttggtccggaccacggagacttgttaaaggattgttcgatgaaaaacattgaagaagctattgatgagtatgtggatgaacgtaggatgagattactcgggctttcggtgcagacttatttgaccggacgttcgctacaaacgtcatcaaaggttctgaggctaatgtttatagctttgttgttacttttgtttggtcgtgatcaaattcgtcatactaggtacgactgtggccgtctctagagatttgatggacattttgtattttttagtgtgaggttgtgtgctttaaactttttttgtgtgtttctttttcttataacatcctcctttctcaatataacaagagtttacatgaccatacattatattgcaaatgtgatttatcaactattgctatgataacaaataattgtaaaactaaacgtaactaaaatgctttggtcctggtcttaacgaatatatgtgcctaggcccaaaacctcttagttgtttaaataaaaaacaaaaacgaaactaaagaaacgaaattagacaattttttcttactttactctcagtcacatatttgtaatttattatgtgtttcatttttgtatatgtttttttcaatttattatggtcgacattgtgctatcatcacgatgtgcattttagtgatcaagactattcattcattgactcatggactcattgaatctctaggagctcctacgctcaatgacccaaaaaaatgttagtgaagttgaattttggtttggtctctccgcttcagtaaatttagtctaaggggaattgaatcgtttggtgacctcgtttttgagagattctagttaggaatcctacatctaaaatgagaaagagcctatattagcatctcaactcattgctgataaattttaattggaagtacattaatacttacacatgatatatatttcagtaaatttaagcgaacagacactacgattttattgagataaaatgagccaaggaaccaatatctcgattctcgaagatacgtgttatgttttaagactccctaaatttaactaattctcattattgatttcactatatagctgtaacaaattttctttatgtactcctttaatttgtaaatgatattttcgtttttttgacaccattaaataagataatttccttgaaacaaataaatttgtcctcatgtcaaatgagtcatcatatttttgtttatatccaatataggtatgtatcttacatgtagtaatgaaaattgtaaatgagactaaaattggtctcaacttttaatatttcattttgatgaactgtatttcataaagattaccttttaaaatttcttattcttttttttttttgacagctaaaatttcttattcttttgtttccatttactcaagaaaacatttactacattttcctacatttagcttatttgactattttaaaaaaacgttataagctagactcgcatagtttatgtcaagctctcatcacagttatg

SEQ ID NO: 17960 - DNA, 3000 bp, Unknown; identical to SEQ ID NO: 6515
  misc_feature (1)..( 3000): 2750-1469P.txt file - cDNA_ID_1814767; gDNA_ID_1621096; Annot_ID_55687

SEQ ID NO: 17961 - DNA, 3000 bp, Unknown; identical to SEQ ID NO: 6515
  misc_feature (1)..( 3000): 2750-1469P.txt file - cDNA_ID_1814767; gDNA_ID_2926164; Annot_ID_139829

SEQ ID NO: 17962 - DNA, 3003 bp, Unknown
  misc_feature (1)..( 3003): 2750-1469P.txt file - cDNA_ID_1814783; gDNA_ID_1621097; Annot_ID_55746
gtcaggtcaaagccgttgaatcaactagtgagggtaagaaatgtgctctccaaaacgatgaaagggacttggtaggatgtgcgacctcggaaatgttggaatctatcagcaaaaaatgcgaagcaagcattattgatgataacaaacgttctgtgagcatgaatgctttacaggatagtactgcatctaatgttgaaaagcatcctgaaacattttcagtagcgaagcctgctttgtctagcacactctcctctgcacatagtaatcaaatgagaggaagggactgtgttccatgtgaggttatagatgagaagaaagttatagtaattggagctggtcctgctggattaacagcagcacgtcatttacagcgccagggtttttctgtaaccgttcttgaggcaaggagtagagtaggtggtcgtgtatttacagaccggtcgtctctttcagttcctgtggatcttggggctagcataattacaggcattgaggctgatgtgccatctgaaagaatgccagatccatcggtattggtctgtaaccaattaggtctggagttgagcgtgttacatggattctgtcctctttatgatactgtaacagggaaaaaggttcctgcagaattagatgatgctctacaagcagagttcaacagtctaattgacgatgtagatttgcttgttgaggaaataggcaaggaaagagcaaataaaatgtctcttgaggatggtctagaatatggccttcaacggctgagaatgccacatgacaaggtgaacattgacaaatttgggcttctcaattcaagctcaaaaacgggcatcagaggtccctttatgcaggatgaaagctggaaagatgattttttgaatcctttggagcgaagagttatgaattggcattttgctcacacagaatatggttgtgctgctgtcctcaaggaagtttcgcttcctcactggaatcaagatgagttttatggcgggtttggagggcctcatgctatgattaagggtggttatagccgagttgttgagtcgcttgcagaaggactggacattcacttaaacaaaatagtttcagatgtatcttatgtctctgatgtatctgccatggataacagcaagcataaagtcagagttagtacatcaaatggctgtgagtatcttggagatgctgttctggtaactgttccacttggatgcttgaaagcagaaactattaagttttcaccacccttgccggactggaaatatgcgtcaatcaaacaacttggttttggagttctaaataaagttgttttggagttcccaacggtattttgggatgatagtgttgattactttggggcaactgctgaggaaacagatctaagaggtgagtgctttatgttttggaatgtcaaaaaaactgttggtgctcctgtcctgatagctttggtggttgggaaggctgcttttgaatatacaaacaagagtaagtctgagcacgtgaaccatgcaatgatggttcttcggaagctttttggtggggatctggttcctgatcctgtcgcctcggtagttactgactggggcactgaaccttacagttatggtgcctactcgtatgttgctattggtgcttctggtgaagattatgatgtattgggaaggcctgttcagaattgtttgttttttgctggtgaggcaacatgcaaagagcatcctgacactgttggtggtgcaatgatgactggagtccgggaagctgtgcgtataattgatatacttagaagtggaaatgattacacagccgaaatagaaacactagaaaaagcgcagaggaaatctgtacctgtaagggatgaagtcagagacctaataaagaggctggaagttgttgagctgtctaatgtgctagccaggcaatcattgctacgaaacatgttcttctctgccaaaacaactgtcgggcgtttgcatttagccaaggagttgcttaacctacctggtgaaaccttgaaatcctttgcaggtacaaaagaagggcttgcagtgctgaactcttggatcctggtaagctcagtgagatagttttttttaccaaagcactaaattcaacttactttcgcttatatgttttgttccacgaatttctattggctattttacatattcttgcttatataaaattttctgttaggattcgatgggtaagaatggaacccagcttttacgtcactgtgtacatattcttgttcgagttacgagtgacctctttgccttgaggctatcaggtattggtttttcttccaagtacactttttgtcccaacctaatatatcacatgcaatcagttctgtcttaagactcgacatcatgtgctatctgttttgggatttcagccctgtttgattttctctaagttggttactttccacttgctgatgcaggtattgggaagactgtgaaagaaaaggtttgtgcacacacgagccgtgatattcgtgccattgcaagtcagcttgttaatgtgtggctggatctataccggaaagaaaaagctaatagtggaaagaaatcgttgagacaagcgaatactacaaacaccccctagaataagaagaaaactgaatagtccggacacagacagtaagggaaagctgagcaatggcaacgatgtgaaaacagatgaagagtttgaggacaaccagctacctatgtcagaggaagagaaggctgtgtttgctgaagctgaggcggctcgtgcagcagcagaagcagctgcaaaggcaagttttttttaatctctaaattagtgaaaggcatttatggatgcttactgaatgtttttgttttctctgaggccgttaactctttatttatctgtttgttaacgaataaattatatgtttctgtcttgcaggcattttctgaggcctatcataatacttcattgcagcttcctaagatcccctcatttcataagtttgccaggcgagagcagtatgcaaagatg

SEQ ID NO: 17963 - DNA, 3003 bp, Unknown; identical to SEQ ID NO: 17962
  misc_feature (1)..( 3003): 2750-1469P.txt file - cDNA_ID_1814783; gDNA_ID_2926165; Annot_ID_139888

SEQ ID NO: 17964 - DNA, 3000 bp, Unknown; identical to SEQ ID NO: 6578
  misc_feature (1)..( 3000): 2750-1469P.txt file - cDNA_ID_1814790; gDNA_ID_1621097; Annot_ID_55742

SEQ ID NO: 17965 - DNA, 3000 bp, Unknown; identical to SEQ ID NO: 6578
  misc_feature (1)..( 3000): 2750-1469P.txt file - cDNA_ID_1814790; gDNA_ID_2926165; Annot_ID_139884

SEQ ID NO: 17966 - DNA, 3000 bp, Unknown; identical to SEQ ID NO: 6559
  misc_feature (1)..( 3000): 2750-1469P.txt file - cDNA_ID_1814798; gDNA_ID_1621097; Annot_ID_55739

SEQ ID NO: 17967 - DNA, 3000 bp, Unknown; identical to SEQ ID NO: 6559
  misc_feature (1)..( 3000): 2750-1469P.txt file - cDNA_ID_1814798; gDNA_ID_2926165; Annot_ID_139881

SEQ ID NO: 17968 - DNA, 3000 bp, Unknown; identical to SEQ ID NO: 6555
  misc_feature (1)..( 3000): 2750-1469P.txt file - cDNA_ID_1814815; gDNA_ID_1621097; Annot_ID_55732

SEQ ID NO: 17969 - DNA, 3000 bp, Unknown; identical to SEQ ID NO: 6555
  misc_feature (1)..( 3000): 2750-1469P.txt file - cDNA_ID_1814815; gDNA_ID_2926165; Annot_ID_139874

SEQ ID NO: 17970 - DNA, 3003 bp, Unknown
  misc_feature (1)..( 3003): 2750-1469P.txt file - cDNA_ID_1814826; gDNA_ID_1621097; Annot_ID_55729
gaaataaaaaaaaaaccaaaaagccgattaaaccgatttaaccgaactcaaaaacctacataaaaagcgtttagtttcattgttcacctattatagaacaaagacaagaaagagaggttaacaataccttacaacagaagaatttcaaacagtttgggcattccaacgcataaatattatacaatcttgtatgctcaacatattcatcacagacaaaagccatttgggaatcaacggcagcaactgagtagaattgaagtaagaaaaggaaaggaaatgaaagtaataggtcaatagtattggtttttttttctactctttgtaaaatagatcacccatcgaaaaaattaatctttttacataacactaaactatttatttaagtctgtttaaaattacttataatttaaatatttttttcaataaaaagataagacaaaaaaagttaaatgcattgaaaaaaggaagttgaacgcaaatagaatcaagtcaccttattattattggtaaatctaaaaacatctagctactaattttataagacatgttgtgttttggttatcacagtaaaagtgatagcaaatacatattttgttacctaaattcttctacacagttttaatttttttgtacaactattgttctaagtgtgataatctaactcattatctattttttgagaagatttgatattagtagaatagattatttgattatgttttattaactaatccaatttgctggtaaatccactatatattaatagagaaacacttaaaagaataacatctagctacctatttatagaaatgtcatgctaacgagtcaaccaaaacaattttcaatcaatataatttattctttatttactagattgtttactaaatcaatagaattattttgcaatatttatttgacacatttactttatttgattctatatctaatttttacttttacgggtcaatatttttcaccaaacaataattaaatgacaattcaaattaaataattcaattatcttaattacggacaatttagttttaaattcaattttaatctgacccatttatgattcacacttgtcttctagtagtataggtatttttataatgccactttgtataatgatttatgattttattgcttcaattattctcgacaaaaagatattatttattgattatatatagttttttaagaaacacatcaaatataatctacatatatatttttgcagctattttgtgaaataaatcttggagttgagacttatttacaatggctgccactggtttttaattattatttttttttgtaataaattgattaacaaacgaaaaatattccaaatatatttcaatcccatatatcacacagatttctctaaaatttgaactagatttcgacaactatttaaaacaaaaaatgtttgacaaaccaaaatacaattgcaattccttaaaatgagcaaaacgcacctaaatacattctttatcgatccaataaatcttatttctccaaaatttgaattagattttggcaactatttaaaaaaaatatttgtttgacaaaccagaatacaattgcatcccgtaaaatatttattttaattatatatttaaataagcggtgtaccgcgggtttttttatgggacaagtttggcaggacgttacttaataacaattgtaaactataaaataaaaatattttatagatagatataatttgcaaacttttatatatattaattaaaaaaaaatttgttcatggagtgtaccgcggattaaaatctagtattgtaacaatcttggacatcgtaaaagtctgaagaaattaatagttaatcaacgaaaacatataaaacaaaacatgaaatgaaatagaagtcggcaaccaactttaattggttaaacattagcttaactcgtaactttaaatttggaaactaatgtacactattaatctaaattcgaaatcttaaactcgaaaatatgtattcttagttattaatgaaatttttactagttgacaaaaaaaaaaaaatttaaaagattttttttatatatttgtgtcttattagaaaaacttggaccgtccggttaaggtgtctttttctggttttttttaattaattaattaattattttggcttctttcggaccagtcctactgtacatcgtatctttcagtatttgtcaactagtttaaaggggcaagttcacaaatgggacctgcatcttgtcctagccaataatatcgttccacgtcgtactctatattgtttgtcacacgcggaaaattaactgtgcacatttgcaggatgctattttttactattagtgaaattgcttcattcactttggcccgcttctttattttgttgtaacatttaccctacagagttctcgaattatcaatttggtacttaatgaatcattttttcaattatcgtacctattttcattgaaataatattaaagcataaattcagtaccgaagtataattaggtcaaccgatgtaattttacaaaactatatttgaaaatacaaataattataaagagaagttttaatcgaattccaaaataaatccattaattttaaaccaaaaatcttataaaggttataaaatacgtataaaaattagttttgtgaaaacatatatcaaatgttttagggggtcagggtgtaaactgtgaataaaaataaatgttatggtaaaaaaagaatattttgtttttatgcgagttaacgcataatgtaccagttccgttgaatcgtcaacacaagagtcacaaacaaatttatcttttaacaaatttctctcttaaaaaattatttataaaaactctgagctcgaaatcggatttttttttcgtctctctcatcattttgctgatttctcaatttctgtgtttacactactccatcgacttgtaatttcactttcttagggttcttcttcatcggatcatcggccgtatctgaaaccggagatg

SEQ ID NO: 17971 - DNA, 3003 bp, Unknown; identical to SEQ ID NO: 17970
  misc_feature (1)..( 3003): 2750-1469P.txt file - cDNA_ID_1814826; gDNA_ID_2926165; Annot_ID_139871

SEQ ID NO: 17972 - DNA, 3003 bp, Unknown
  misc_feature (1)..( 3003): 2750-1469P.txt file - cDNA_ID_1814830; gDNA_ID_2926112; Annot_ID_196676
acagagaaaaaacacagaaaataagcaagcacggactccacctgtaaaaaccttcaaagttacttatgctttacacgccacaacacaacatagattcctaagatcaattagaaagaattaactctatcttgtcaagtcatttcttttatcaacagattcatatttagaaatgtgatgaaagtggatcgactcatatactagctattcgattacttctgcagaagatcttaaggctcttatgattgaatccagatcaatcacaaagaatgtgttgcaaagactctcacatttgactaattcaaacattaggtgtaaaaggaagctaacaagtaacatacataagacttttatcaacgagtgagcacatgggacttaaacaatgcaattgttgctagcatttgactatctctactaatctgaaattcctccttaattatagggatctacactagatacttcatccttaacataccaaaactcctaaatatagcaaaccaagatcagtcaaaagattattaagccataaatcaagtaaaccaaaatcaaatttaaacctttttgagtagctttgggacatttccatccatcagtagcgagagtgatgttcttaggaagcggcacattcggcggcgcaactccgaactgagtcccgacgagctcaacacgagcttgcatctgagtgacatcaccagcagtctgaatagctgatttcaaatccgacgaaggataaccagcgaaaacggtaccgttttcgacgctcaccggtaagctcgagccgtctgagagtacagcgtttgaagcagagacgaggatctctcggtgtgcgaatttgacgaagacacgccatgatttgagctcgtcgcggccgtggttgagcactgttatcacagattcgaaccggtagggttgatttgcggtgtcgttgggtgggatcttagatcctttagtgtgagtgtatgaaacgaatacaccgttgcatagatccgaatctgacggtggtgacggtgacggattagtagtgttggcgtcggattgtgatgatgttagaggaattgatacgatgagaagtgatagtagaagtaaccgagggatgaagttgggagctgaatccatggaaccctaaaatctcgctcttagtcaaaaagagaagttttttgaatttgaattttgtttgggaattgagagaagttagaaaaatggaagcttttgaagagatgatgactgataaagcgaccgcgatagtgcaagctgtaatgaaaaatgtttgtatttgcaattcaaattttcccctggagcattttttgttggctttttttgctttttcttttgttgaaaatctaagaaactttatggataccaatactcttacattattacataattattttcttaacaaaaataatgtatggatataatttcttaaaccctattttataagaaaaataaagattaaaaataaaataaaaaacacctaattgcaacaaaaacttcattttgtattcaatttttagatatatttaaaacgcactaaacaagtgagagcacatgagttctgtcgcaacataccaaattcttattttctgttcaacggtggtttgcttacttataaatggtatgagcatgagactatgagagcatcaatacatattccttaaaaccatccttgtacaactttccgagtcaatgagttcgtagactttctcctgaatagtgaagaaaatgttttgtatcatcgccaaattccactctttgcgatattaagctgtgttcagtgttctcgttcatagtcaggtgattaaaacaaaataacttcagaacatataagaaagcccaaaataataaaaagcccaaacccaaaataaaacgtatagcccgatacaatagacgatacatcactatcactagtactaagccaactagacataagacatctcccgtgaaatgtttgcttggtcttaactcttaagcttaattaagaagacaatgagataatcctcatgccaagttagatcactaatacactagtaacctccaatccattattaacagtatttctaatcatcggaccagacaagaatattaaacattcatgctactgtcttgagtgtctatgatctctttcccttaaactctcttgctgctgctgctcacaaatgattcgtccaacagaaaacggtgccgtcttttcagaaactttataaataatggataagaatactatgttttttactacttgggttttgtcacagatatcatctgcctcgtcagaaaggtaacagataaaaaaaataaataaaaaaaatgatgaccttatcttcaaccgctactcctacaacttggtaactgctgctctagatagataaatttgcatcttaaaaaattgtactatatttagaaagaattatacaaatactcagagattagttacaaagatggagaatgttgagagttaacttgcaattaattgaattgcaatcaactaaattacaatataccaaacgatgatcatatcgacatttgcggataagatcaattgtagttataagtccaaatcatatgatattggtctttcctttcttattgtcctagagagtttagataagaaaacatatatagtacttttaattatttctgcaatccattctttcccaatagtgcaattttcagtgtggaatttatatcccatatataaaattcatattcacgaaattcgttttatcttttttcttgaattgcggtgttacgtaaccatccttcgcatcataataaattattaataatttataacgattttaaggaagaaaaaaaagcttttaaaatcggagaattaatttcggttagttcagatttatgagtgaaagagcaaaattgcaaaaaaaaaaaaaagtcactgaagatttattagactctcttcttcttcttcctccttggcgcaatttcgcaatttcgcaatcgcatcagtcaattatcgaatcgtcctcccagagattaccggagaaaatg

SEQ ID NO: 17973 - DNA, 3003 bp, Unknown
  misc_feature (1)..( 3003): 2750-1469P.txt file - cDNA_ID_1814830; gDNA_ID_1621097; Annot_ID_55727
atataattggatgaatatgatctgaccacatcgtacatgatagtgaggtctccatcttttcgtggaagaaactcattatcaatgatctctctgttatcatagtctgggtcaggaatgcaacatacttgcagaacatttgtacctgacaaaacagagaaaaaacacagaaaataagcaagcacggactccacctgtaaaaaccttcaaagttacttatgctttacacgccacaacacaacatagattcctaagatcaattagaaagaattaactctatcttgtcaagtcatttcttttatcaacagattcatatttagaaatgtgatgaaagtggatcgactcatatactagctattcgattacttctgcagaagatcttaaggctcttatgattgaatccagatcaatcacaaagaatgtgttgcaaagactctcacatttgactaattcaaacattaggtgtaaaaggaagctaacaagtaacatacataagacttttatcaacgagtgagcacatgggacttaaacaatgcaattgttgctagcatttgactatctctactaatctgaaattcctccttaattatagggatctacactagatacttcatccttaacataccaaaactcctaaatatagcaaaccaagatcagtcaaaagattattaagccataaatcaagtaaaccaaaatcaaatttaaacctttttgagtagctttgggacatttccatccatcagtagcgagagtgatgttcttaggaagcggcacattcggcggcgcaactccgaactgagtcccgacgagctcaacacgagcttgcatctgagtgacatcaccagcagtctgaatagctgatttcaaatccgacgaaggataaccagcgaaaacggtaccgttttcgacgctcaccggtaagctcgagccgtctgagagtacagcgtttgaagcagagacgaggatctctcggtgtgcgaatttgacgaagacacgccatgatttgagctcgtcgcggccgtggttgagcactgttatcacagattcgaaccggtagggttgatttgcggtgtcgttgggtgggatcttagatcctttagtgtgagtgtatgaaacgaatacaccgttgcatagatccgaatctgacggtggtgacggtgacggattagtagtgttggcgtcggattgtgatgatgttagaggaattgatacgatgagaagtgatagtagaagtaaccgagggatgaagttgggagctgaatccatggaaccctaaaatctcgctcttagtcaaaaagagaagttttttgaatttgaattttgtttgggaattgagagaagttagaaaaatggaagcttttgaagagatgatgactgataaagcgaccgcgatagtgcaagctgtaatgaaaaatgtttgtatttgcaattcaaattttcccctggagcattttttgttggctttttttgctttttcttttgttgaaaatctaagaaactttatggataccaatactcttacattattacataattattttcttaacaaaaataatgtatggatataatttcttaaaccctattttataagaaaaataaagattaaaaataaaataaaaaacacctaattgcaacaaaaacttcattttgtattcaatttttagatatatttaaaacgcactaaacaagtgagagcacatgagttctgtcgcaacataccaaattcttattttctgttcaacggtggtttgcttacttataaatggtatgagcatgagactatgagagcatcaatacatattccttaaaaccatccttgtacaactttccgagtcaatgagttcgtagactttctcctgaatagtgaagaaaatgttttgtatcatcgccaaattccactctttgcgatattaagctgtgttcagtgttctcgttcatagtcaggtgattaaaacaaaataacttcagaacatataagaaagcccaaaataataaaaagcccaaacccaaaataaaacgtatagcccgatacaatagacgatacatcactatcactagtactaagccaactagacataagacatctcccgtgaaatgtttgcttggtcttaactcttaagcttaattaagaagacaatgagataatcctcatgccaagttagatcactaatacactagtaacctccaatccattattaacagtatttctaatcatcggaccagacaagaatattaaacattcatgctactgtcttgagtgtctatgatctctttcccttaaactctcttgctgctgctgctcacaaatgattcgtccaacagaaaacggtgccgtcttttcagaaactttataaataatggataagaatactatgttttttactacttgggttttgtcacagatatcatctgcctcgtcagaaaggtaacagataaaaaaaataaataaaaaaaatgatgaccttatcttcaaccgctactcctacaacttggtaactgctgctctagatagataaatttgcatcttaaaaaattgtactatatttagaaagaattatacaaatactcagagattagttacaaagatggagaatgttgagagttaacttgcaattaattgaattgcaatcaactaaattacaatataccaaacgatgatcatatcgacatttgcggataagatcaattgtagttataagtccaaatcatatgatattggtctttcctttcttattgtcctagagagtttagataagaaaacatatatagtacttttaattatttctgcaatccattctttcccaatagtgcaattttcagtgtggaatttatatcccatatataaaattcatattcacgaaattcgttttatcttttttcttgaattgcggtgttacgtaaccatccttcgcatcataataaattattaataatttataacgattttaaggaagaaaaaaaagcttttaaaatcggagaattaatttcggttagttcagatttatg

SEQ ID NO: 17974 - DNA, 3003 bp, Unknown; identical to SEQ ID NO: 17973
  misc_feature (1)..( 3003): 2750-1469P.txt file - cDNA_ID_1814830; gDNA_ID_1621097; Annot_ID_171119

SEQ ID NO: 17975 - DNA, 3003 bp, Unknown; identical to SEQ ID NO: 17973
  misc_feature (1)..( 3003): 2750-1469P.txt file - cDNA_ID_1814830; gDNA_ID_2926165; Annot_ID_139869

SEQ ID NO: 17976 - DNA, 3003 bp, Unknown; identical to SEQ ID NO: 17973
  misc_feature (1)..( 3003): 2750-1469P.txt file - cDNA_ID_1814830; gDNA_ID_2926165; Annot_ID_199054

SEQ ID NO: 17977 - DNA, 3003 bp, Unknown
  misc_feature (1)..( 3003): 2750-1469P.txt file - cDNA_ID_1814838; gDNA_ID_1621097; Annot_ID_55725
atgaaagaaaggtcgaaacccgtaaatcaaggttcgagtacggattaacaaacgagtggctcggatttacgaggagtgactcggatttaaggcgagtgatctaacccatggatcaagattcatataaagtatatatagacttgaaatgatcttagctgataaaccatattctatacttttaaatctaaatttgcttcataatcataactgcaagaattaaaaagtaattggtatattttaattatgggattttgttacaaaatatatggtcaaatcgctgatgcatatatatagttcaaaaaaaaaaatctaatgcataaattgtttagaaaaatgtataagtgcatggaaggaaggccacacatttgatcttttacatgctccaactagatcagtaacttctaaagcaaacaccactctattcagcttctagctatgcaagaatttgttgctattacctattgggggttatacctttctaatatttttgttaacgattaagtttacgagcgaatacacatgtgtacgtacatatatgatatatactgtcaacatataaatagttgtgtgtatacatgtagtgttgttagaaaatgcgttgccttaatcatatgctagaatgtgcgttgatgtattattctgttttatttaagatagcatatattataatgtattttgcccaataatttaatacttgtaggtcatagtctcataagatgtaggaggcatggtttatacttaatactttatagtctccaaataaaatcatggtatagacctaaatttttgggaggataatttgataatgtcatgcctttggggtttcgtaactaaaaaaaaacttacaagaaaattataagatgattaaagaaaataagtagaaagaaaatatattttatatcttttaacaaagtaaaaacatattgaagaacaaaattaacaatattttgttaaggttgagtttataaaatgagttaatttatgttttcatgtatgagctggatccacgtatcaagggtctctggtccaactttttctcaattgttatttagtttcgtatcctgtagtttaaaacaatataagatcaaccctgcaaagttaaaaatcttacagaaaaccccatgttttgagacattacattaattgttccaaaaaaggctgtactgtccgaaaatgttgcattattgcaaccaattgtgttatatatgtgttttacatatgatatactaggaaaattaaggatacacatgatttatcataacaatacttaaaaaataaataatattatattttcatctatttatatcgcattatttaaaactcatatactgtcaaattatatcgaataaataatagaaattttgttacataacattcaaagtagtactatgactaactaaatacacactacataataagagtcaaaacccaatatatcttggccaatgccttaggaaaatgcacaaacaaactcaaacacattgaagtcattaaaaaaaagtggtacagagaatattggatgaggaatattcaccagacaatgatcctgagtagaaagttgaagaactagagcatgatttggactagtagtatacataataactagattttaacctgcggtacaccgcgggaacaatttattttttaaattaatatatataaaagtttgtaaattgtatatagttataaaatgtttttattttatagtttacaattgttattaagtaacgtcctgccaaacccgtcccgccaacccgtcctcttaaaaaaactcatttattttattaatgttgatcttatttatgatatgtttatgaattattgtctaaatattttgtaattttgtagtaattaaatgctatcaaagatctctacggtttgatgattataatcatgtagaaaagcaatatcaaaaatgataattttgtagtaattaaataatattaaatattttggaagttttattttaataattaatcgtgtagttaaggtagagagattttgggaagattattaaatgtcaaatatttaattagaagattttctttctaattatcaaaaataattattaaatgccagtggcagccgctgtaaataaatcccaactccaggatttatttcacaaagtggctgcaaaaatgtatatatagataatttaaaaagttatctttatcaaattttaaaaatcaaaattttaaatttataatgtattatagaaattagtataaatttaatatacaatagaccaaaaccataaaaggatacgagaaaagaaactcaaaacaaaaaaaaaatcatgaaatttaatattttaacgattattattttagacaaaataaatcaaatctgaaatttattttatatcagattaaataatagtaattatataaagtatgcgacaaaaaaaaaatctacttaaagcatatgagttgtagacttgtagtgaaagaaaatgtgtaccaataatctattttaagttttcactaggtttgaatttaggtttggtaatttagcatttagaaaaatggatctaaaagtaaacttgataaagtacatggtctatatctggagaaaagaaaaatgtaaaggacatctctacaccaacgtatatacaacaaagtacaaacatagacagacatgtataaactatattaatactgtttaacattttcacatttaaacctttttcaaattattagttcaacttacttcaaaaaaagaaatgtaacagagaaatccgagctttcaagctgtgaaacaatagccatgcccctcataaatctttctactaattattttttttcacgtaagattctcaaaacaaatcaaaatctcatcttcttggtatcaaaaattttcttactttttttggttttgttatcccgaatttttagaatcaaaacccacgtcaattctttttcaaaggcatatattctctctgtttcaaactttgtgtctcttcttctccttctctgatcgttcgttttctggacgagagagatg

SEQ ID NO: 17978 - DNA, 3003 bp, Unknown; identical to SEQ ID NO: 17977
  misc_feature (1)..( 3003): 2750-1469P.txt file - cDNA_ID_1814838; gDNA_ID_2926165; Annot_ID_139867

SEQ ID NO: 17979 - DNA, 3003 bp, Unknown
  misc_feature (1)..( 3003): 2750-1469P.txt file - cDNA_ID_1814842; gDNA_ID_1621097; Annot_ID_55724
agtcccttcttgactcgatctaagaccaaagtgcctggccacaagaataatgtctctctcgtttttatctttgtttccacgtttctccacatttcctttttcccttattatataatcttatgaaaatggaaacgaaatatctttgttatcaaatttgtgcacaagattctttactttgcaccaattattttttctttacttttcctttgatgacctatgtgaaaacccttttgtttctttttgattttttcacatatcaaagcaaaagctatgtcgtctctgcttctaagcctctcttccaaggcctctctccgtaaacttcctctggtaaatctcttctagtttttgtatataatctctgtttccttcgtcttcttcttctgatgtctatttcttacttttcaccagagatgccacactcttcggatgttttcctcctctaccaccaacccttacttgttgtatcgtgtcataaactatggaagttctatggatgatattcatgtaacaagtaatatccactattttgacccggtgaaggaagatgaagttattgtccgagacaaggtattaccaatggagttgcgtaaagggtgtctggtcggaatgtcccatggttggggagttttcaaggccgtgtgtgattataatgaatataaagccatatatgttactgactactacaatccatgtggctccaaatctgtcaaaagcattcctttgcatccccttggtaaacctatagctatccaacaacaagctatcactaacgccgcaatgacttgttcacctgatcaaagcaaagattttgcagttgctgtcaagtgtttaggacctatgatcaatttcaataggcctggtggcacacacaaggactcgggttcggtcatctttaaaaccccttttcaatattttgatcaatcaaaggttatgtattcaaagagagatgaaaagttctacactcctagttttggagggcacttcttggttttttgggattctttcttcggagaggatatgaccggctctgagttggttgagttgcggttttgcaacgttcctaagttgacccagtccgagtgggagctcttgactcatgttccaagactgtataccttgtggagtctccctcaggccaacgtttcctaatcaagtagtacgctcagaaccaccaaccaggtgattcgatgacattcctgtgtcgcggaacaaagcgtttcatggtgtttagagagctggaagaagataaaaggaccatgtgttacacggaggacattggagatctctgcatattcttaggcaataatgagcccttttgtgtcaaggcaagctcattccctggtctaaaccctaactccatctattttgcaggcgatggcttcggtgtttacgatatcgccactagaaaaccacgttccttccgtcccaagtctccctcagccttctcgtcagcatcactcctcccttactggatccctccaatgtctctttagtttacttgttcttcactagtcatgttctgtaacttttgttttttatgcttataattgttcttttgcgagcccttggacgttggccgccatcttcatacgagttaataaattttggtgtgaggaaatatacgagtcaatttatgaaacgaaggtagtaactttcgtaattccttttttttttttttttttctctggttgtatgaatcattcatcatcgatatcttatacttttgtatcatgatcgtatggatcattcatcatggaccttgaggggttactcaatagagagcagtagtgtggaagaccttcttggtatgactaagctcagaactctcacggtccattcccttgatggttgtacgttagaaactctgtctgcatctctctgtgaatcgagagaactcgggcagctttcattgtacgaggtcatgcatgataggcataatgaaggaaaattagttcttgatttgattcaactcaaatttttaacggtgggcatgcatatgcctaggttgcctgatcaacatcgattccctccaaaccttacgaacatatgtcttcggtattgttgcatggaagatgatccaatgccgattctagagaagttgctccacttgaaattggttgaattatcatatggtgctttcactgggaagaagatggtgtgttcaaaaggtgggtttcctcaattgtatgagctaaatttatgatttggaagagtggatagtagaagaaggctccataccatgtctccatactttgactataaatgaatgcagaaagttgaaggagcttccggatgaggtcatatacataacatccttaaaacaactgacaattggaggaaggaatagtgaatgggtgtggaaattgtctgaaagaggacaagatcactacaaagttcaccacattccttgtgttcagtttatttactagacctttgtctaattttatgtataaaaattataacaatgtagaaaactacaacacaaatgagatcaaattctgatttttaaaatccggttgtgatgattattaatcgtggaaaaaaatcagggattataacttttgttaaattgtgaacgtacaatattgaactgaaaatgccaaatgaattggttattattactttgatgaaaatgaattgatcgtttaattttttttatatttataacaaaaatgcgatatgctctttttaattctttatttctatttttgcttcagaattttttttcattttatttttggtcaaaaaggttattaatttccttttcaatttgtacgaatttaaacggtgacgtttttgtttaaattatcaaacaaatcaaaacaaaatcaataaaatctaatctctcatcatgaggcatctttgactgctctttaattcactaaaaaagtctaaaaccctaaccattgccctttttcaaacgaagaagaagaagacgaaacgctaccatcatctacacacacacacccaactacttttttccatcgccggcctgtacaaatg

SEQ ID NO: 17980 - DNA, 3003 bp, Unknown; identical to SEQ ID NO: 17979
  misc_feature (1)..( 3003): 2750-1469P.txt file - cDNA_ID_1814842; gDNA_ID_2926165; Annot_ID_139866

SEQ ID NO: 17981 - DNA, 3000 bp, Unknown; identical to SEQ ID NO: 6549
  misc_feature (1)..( 3000): 2750-1469P.txt file - cDNA_ID_1814853; gDNA_ID_1621097; Annot_ID_55721

SEQ ID NO: 17982 - DNA, 3000 bp, Unknown; identical to SEQ ID NO: 6549
  misc_feature (1)..( 3000): 2750-1469P.txt file - cDNA_ID_1814853; gDNA_ID_2926165; Annot_ID_139863

SEQ ID NO: 17983 - DNA, 3003 bp, Unknown
  misc_feature (1)..( 3003): 2750-1469P.txt file - cDNA_ID_1814857; gDNA_ID_1621097; Annot_ID_55720
atttgaagcttcaattgcttatgtggtcaacgatatgcttggtgttacagatccgttgttacgtctagagagatttgttcttgcaccattgcctgaaatgggttctccaaagcttctgcaggttagtctcctatgtctcaacgttaacgtctattagaagttattggtaatgttttctttaaggaatttatttcatgtgactttaggtttccaatctccgtatacagcataatatggaacccgatgagaagcaattagctgattatggtagatgggccttggaggtatttgttcttgaccatatattctgcaacaaaattgaattcacatatgaagaaactattgcattgaaaaggcaagaagaacttattcatgaagaggaagcagagaagaacactaaactcaaaaaaacatttgttggtaaaaaagtgaactaattctttttagtgttttattcctaggctgctctggttttaagactttttaatataagctttctatcttttaactatgtgattaaagattatatatggtggttgtgtttcttttatttttctttaaattaatgctacatacttataaatttaaggttatgttcaatcttgtcactatcctactggcgttaagtcttcgctcacacgtcacacactgcaaagcactgaaattatttcttaattagtgaaaaggtttggggtatgttaacaaataccaataaataaataaaacatatatagtacatgttcctccacctgtcacaggcaacatttgctttcaaaagcaaagaagcattttttcctccattttcttcttcttctccaaatggattcaacatttagagatgaagatctcgttgaagagagagaagaactcatggtgtcttacagtgagaataacagtcgacctatcatgaaaaaagctcactttttaaaaccctttgtcacctcctccattgatgggtttcaaggtatgcttcgtccatctccttctcctgagttaaaagcttcgtctttaagtgtttcctttcgtgggtggaggttaccaaacaaaaagtttcagttttgggttaaaaaaatggtagctttacacaaacccacttggttaaaatctgggatttttgaagcaatcaaagcatcgacttacagaatccacaaaaatccgtctttgattctctctctcgctcagaattggtgtcctgaaactaatacatttgtgttcccttggggtgaagctaccataactcttgaggatgtgaatgtgcttctgggtttttctatctctggttcttctgtttttgcttctcttcaaagctcagagatgaaagaagcagtggagaaacttcagaaacgatgtcaagggagcatgaagcaggaatcatggatttcaagctttgtagatgatgaaatggagcatgaagcgtttctagtgttgtggctttcgaaatttgtgtttccagacaagttttgcagttcgatttccagtgatgttttccccttagctgttcgtctagctagaggtgaaaggattgcttttgctcctgcggttctagcaaacctatacaatgatttgggtcatatctgtgttttagcctctatacaaaatgttttagctagttctctgtttaagcttgtccaagtatggatttgggagaggttcaagagtataagaccagaagctaaggtgataccaaggggtcaacctagaattgctcaatggagtggtctgaaacagagatttaagaatgtgggactgattatttttcatggtaattttgattggcgtccttatagtgaacctttggagaattggaacccacctcggttttatgttgaagaagctaagtgggtgaggattgatgagagtcttgatggtgattatgatgacgatgatgagtttgtgtcgtttgctagatgtgtgagagtttctaagcttgtaggtattggtgtagtagagaactactatccaaaccgagtggcgatgcaattcggattggcgcaagatgttcctgttttgggtactaatcatagaagaaacttcacagaagaagaagcatgggatgattacaacaaaccgcttgttggtttaaagctatattttccttctcgcgtcgccacagcttcggttactacgagatacagagactggtgggctaaatcagtttcagaaatgcggaaagaatcaatggaaacttttaatgtaagcagtacagttgatcattatgatgatagtgatgatgatataccccttaagatagtaccattgagccaagtctatcagaagttggacgatgaaatgaagaaagccaagcattcgacaaacaagagacgcaagcgagctcgtgaggatgatgagagtgctgctgagacagaagatgacgagagtgctgacacggaagatgatgagagtgctgacacggaagatgatgagagtgctgagacagaagatgatgataacatgaccattgctcagaggatcaattctagaaagaagtctgatgacatagagaatactgaaggagaaagaagtagacttgtggcggataacaatgtttcaggccttcctcaaaagcttgcttatggagatgagacagtagcaacaacacaagaagaaacagagcaaaagaataatgaaaacaagtcttctaatggagtagctgctgagaaggaagaagatgatgagagattgaaacagagaaagcttgcaataaaggaactagctttgaagacggaagcacgaatgttgaaggtagagaacactttggcaaagattaaacaatggaaactcacaagacttcacaccaaaaaacctctagtttcttcttaagctatatcatctctatttgcagcgtcttctcttatcaaagacaaaagctttgtgtcataaaaatggcttttacgtacattcttctctgcaaaaatgataacttttggaatttagaattttgttggaattatatatattcgtatttacgttaccaaattcacattttcgtcttcgtctccaatg

SEQ ID NO: 17984 - DNA, 3003 bp, Unknown; identical to SEQ ID NO: 17983
  misc_feature (1)..( 3003): 2750-1469P.txt file - cDNA_ID_1814857; gDNA_ID_2926165; Annot_ID_139862

SEQ ID NO: 17985 - DNA, 3000 bp, Unknown; identical to SEQ ID NO: 6545
  misc_feature (1)..( 3000): 2750-1469P.txt file - cDNA_ID_1814884; gDNA_ID_1621097; Annot_ID_55712

SEQ ID NO: 17986 - DNA, 3000 bp, Unknown; identical to SEQ ID NO: 6545
  misc_feature (1)..( 3000): 2750-1469P.txt file - cDNA_ID_1814884; gDNA_ID_1621097; Annot_ID_171094

SEQ ID NO: 17987 - DNA, 3000 bp, Unknown; identical to SEQ ID NO: 6545
  misc_feature (1)..( 3000): 2750-1469P.txt file - cDNA_ID_1814884; gDNA_ID_2926164; Annot_ID_139854

SEQ ID NO: 17988 - DNA, 3000 bp, Unknown; identical to SEQ ID NO: 6545
  misc_feature (1)..( 3000): 2750-1469P.txt file - cDNA_ID_1814884; gDNA_ID_2926164; Annot_ID_199007

SEQ ID NO: 17989 - DNA, 3000 bp, Unknown; identical to SEQ ID NO: 6543
  misc_feature (1)..( 3000): 2750-1469P.txt file - cDNA_ID_1814892; gDNA_ID_1621097; Annot_ID_55710

SEQ ID NO: 17990 - DNA, 3000 bp, Unknown; identical to SEQ ID NO: 6543
  misc_feature (1)..( 3000): 2750-1469P.txt file - cDNA_ID_1814892; gDNA_ID_2926164; Annot_ID_139852

SEQ ID NO: 17991 - DNA, 3003 bp, Unknown
  misc_feature (1)..( 3003): 2750-1469P.txt file - cDNA_ID_1814907; gDNA_ID_1621098; Annot_ID_55788
aactggacacaaaccaagtttcgaagaatacatgcaaaacggtgtgatctcgagttctgtcccaacgatactgctccaccttttctccgtcctatccgaccacatctccgaccaaaccctaaccgatgattccaaaaaccactctgtcgtccggagctgtgccaccattctccgtctcgctaatgatcttgccacctcaacggtacacaatttactcgttaattagtttcttttattcttctagcccaaaacatgttcaacatatccaaatattattagtgatgaatgatatataccatttatttatgtttcacgttttgaaaaatgtgattcctttatattatttaccattcagaacattaaataatttccacgttttagaatatgatttagctatttataatacatattttaaaatatataaattcatttatttacaatagtcagcttttcagtgttaatcttgagatatcattaggttttaacactaatttgttgacaaaaaaaaactactcatagtttcatgtataaatgattcaatttttccccacacaaaaaaaataaaaataaaatcatgaaaacactaaattataatgactcacaggaggagatggcaagaggagattccccaaagtcggtccaatgttacatgtatgagacaagagcaagtgaggaagaggcacgtagacacatgcaaagtatgatcagcgactcttgggacattataaactccgatttaaaaacggcacacacttcttctcttcctcgtggttttctggcagccgccgcaaatcttaaccgcgtggtacagtgtatctaccggcacggtgatggccacggaagcccagaaaagaccaagaccgttgattatatccaatcagtactcttcaatcccgttccgttataggattgtaaatttgtatttgccgcattatagatatgtttacataattaaaaggtatttggtttgccggaaaaatgatcattttattttccaaactatttgtaattaacacaattattttttaattatatgtgcgcaaaattgatttttaatttgtcgttaacttaacaatttggtccaaaatttgatcaatgtttactagttgatatagaaacgttaaattactcgattaaaacctaataaactcaaaaaatcctaaaatttctcccaaattgaaagctaagtcattacttcgaataaaaaaaaaaaatcttcatctattcatcgtacttcgccaaaatatgcgaattcgattttattatttagctgaaattcatttattactattttctgcatggcaatgtttcgttaattttttactttcaattttattgtaattttaattcaaattataatatatgtacataatttaacaatgtgtttgataactttctctaaaattgttgtcatttattatttatacatagatatcaggaccggtttagagtgtgtgccaagtgccaatggtgcatttgtactgtttaagcaatcatggtcctattttctcaaaaatatataataaatgtccaaatccatacataagatataaacatgttttttataattagatacagggttctatttttctctgagtcggccctgatagatacatactatcagattaggcagaggtatggactatggagtaatttatgggggcacatccatccgttggtatgatcaaaatttagtataagtcttcagaaagtattttttagatgggatgaatttgcctctctattatcccaagattgaatccccatttccttcagaagcagtaaatacaaattaaactactgagctacaaattcgcgtaaagctacatgtgtatttttaatctcaaagttgctgtaattatgaaatgtgaacgaaatagaagtgacaggagcttgagtgccccatgagataagaacttatagatgtatattaatttaaactgtactgtctaaacctagacaacgccgtgacgtctttgcccacatgtgattattcgttaccacctctcttagtgtggtccaacaaaattggcctctcagttttcattgaaggcagggatagagatatacaggtagtcacatggacaccgaatcgatatttattccttggaatttcattaaggtttttcgaaccaagacaagacaagctatgcatgaaaccatttgccatgccattaacgtggactaagggtggacactgatctatctcgtacttgttattaataaaaacaaccgatttgtttttgtttttgttattatatctcctactttttgttataccatgcatgtccacacgtttttttcaatttgttacatgtccacaactttcacaaatatttttaccaaaaaaacaaaaaaaagtttgacaaatatctttagattttttttttgggcaattagtgacaaagcaagggacgttgaaagcaagaaacgtaaatgtttggatatcacaccacaccaatatgttttagccattacttctccaagtttttttgttgtgtgggaataatacttctccaagatatttaagaaaacgcaaatgcatggtcattgaattatatagcgagaaaacgtcaaaaactaaactgattaaaacagatattcttttagtaaaacagaaaaaataaaaatatcttcatatatataacctgtggtccgagacccaaaccttaaatcagtataaaatatcatagcggagtctaaagaagagttcatccaattatttaactctttagtgtaatcattagcaacgcaaagaaatgcctaaacgacaggctcaacggcgtttcactcgcaagactgactcgaaaacaccatcccagcctctggtatcccgtcgctctgcaaactatcaaccgtctctttggcagcacgaatatctcctctcgctcggtaatacatatgtggtacgtataagaatgtacatgacgttgtattaaataaaattatgtgacatatattactatttaggaaattatatatagtgataatatttatatcatg

SEQ ID NO: 17992 - DNA, 3003 bp, Unknown; identical to SEQ ID NO: 17991
  misc_feature (1)..( 3003): 2750-1469P.txt file - cDNA_ID_1814907; gDNA_ID_2926166; Annot_ID_139927

SEQ ID NO: 17993 - DNA, 3003 bp, Unknown
  misc_feature (1)..( 3003): 2750-1469P.txt file - cDNA_ID_1814911; gDNA_ID_1621098; Annot_ID_55787
ccagactcataaaggagccccaagctcttgagattgatcgcagaggcagaactccaaggaacgaggcctagacaaccacaatcccacaaatgaacacattgagatttaagaactaatggccactgaagttgaagagaacaagagcaaaaagagttatactttgatatctgggtggaactcaagttcgattcccttctcccgtttctcttcgatctgtgtatcagccagtagaaaacgatgctaagaagaagtaccaaactctatgtaaagaaccttgccattgtggagttactacttactacattaccttcttgtcttcatagaggcggcgagcatgaagagctccaagcataaggatagtagccattgttgctccgggcacaagaaaagcattgcctacattgagtgaaacaatgattcaagctcaaaaccatagaatcgatctaattgcaatctgattggaacttcacaaagtgtttcctacagaacaaaatgctcaaaacttaaacttagaatcttttcaactgtaatctaactatgtaaaggagcttttcgaagcatatatatatatgaattacctttggaatctccggttccacctcctccggctccggctccggctccgctgctgccgccgagaggcgaagcacgagcaccggaataattcgaacggatattgttgaggaaagagctgaaggttcgacgttgactatgctgaaagcggcggagatatgaatagcgagccaaaaaatagacattttgaggaaaacgaggtttcatggcgtttttccggtggcagtgacaccgcttttgctctggggttttagggttgtttgttgactgtttgagtaaactaacaatttttcaacgacaggttaaacgacagcgtttactcctcttgacttgttgactacgttctttctgcgctgacattttatcccaattgggcctttttagctcttttatagcccaccatccttttttttggacagcagcccaccagacatttttttttgtcgaacccgaaacagagtagtttgccgtcgatgatcatcaacagtggagtgtaagcagagaaattacgccatagatcggagcgattttggagcatcgccgaagctaaagaggaattggaggtttctgtagatcggaaaacacttgttgttctctctctcgattcatcccaaagcaagattcttggatctgcctcttaagatcgatcggtgcttttgtatcctcaggtatgtgttgatacttgatcgtatctatctacagagattaatcgtatcgtagtctgatttggtagatttggaattgggaatcgagaagtttaaaaatggaggaggatagagagaatgcaaagagagtagtgtttgtaactgtaggaacaacgagtttcgatgctcttgtgaaagcagtggttagtcaaaatgttaaagacgaactgcagaagagaggatttactcatcttcttattcaaatgggtcgaggaatctttttcccaactaaggttcttcttaatcatcttctccactcacacttctttacttgattgagatttgattatgaaaattggtgtacacacacaagagatgttgttctactcttctcttggtgtacacacacaagagatgcttctcatttgtgttttttttttttccattactgatctcagtgtgatggagcggatggatcattagttgtggattacttcacattttcctcaagtatcgctgattatattcgatctgcatctcttgttattagtcacgctggttagttattgcaatagttgagcacttttacatttaatagaatcaaaaccagagacacattttcgaaatgctaggatataatgttgttgactctcactgatgtaggatctggaagtatatttgagacactgaaactagggaaaccattgattgtggtagtgaacgaagatctgatggacaatcatcaatgtgaattagctgaagcacttgaagagaggaagcacttgtactacactcgtcctcactcccttcatcaaaccttgacgaaaatggagttggggtctctggttcagtatactccaggtgatggaactcctgttgctcgcattatcgacaggttccttggattccctgatgattaaacacaacacatacatgaaaacaagtgtttagtttccaaatacaacataatatgcagtaactggtgcttttgccagtagacattgtgtcaaagatatccatcataatagcaaagcttttttctaacgtttgacagaggataatcaattttgctcagtctgtatcatttcaaacataataccaaagaatatttaataatcagatcatcttaattttattaacaaccaagtgtaaacacttagatatttgcagaaaataactactaataatctcttagaactggacatttatgttttgtatttaagttagaaataaatgctattttttattgttactgggatttggattgcaaaggggcctcgatatattccaaaaccagactgagatcaacaaaaaagcaaagcaaatataaaatttaggttcaaagcataattgtatagtctccaaaatttgcaaaaacaagtcatcctgagagagataaaagtgcaacaacatggaacctagaagatgataacagtaataataaaagcaaaaggcaatcaacggtaacgacgaaggctgagagagttgtttttcttccatgtagccctgcgagatggacggttcttgtggttgttgtgaccctttccgcggagacctctgttcttctttccctctgaggtaagtcctctgagctcacggtgcttgtgaactgggttgcagatccagttgattctcgggtcattacgcacagcattgtgtgctgggtcaaccaagatgatctcgtagtacttgtaggtcgaatcctattaaagaaaaatggacaagttaaaatatctaaccagaataatcacctaaacgaaagagtactgaaagaaggtagtaaatg

SEQ ID NO: 17994 - DNA, 3003 bp, Unknown; identical to SEQ ID NO: 17993
  misc_feature (1)..( 3003): 2750-1469P.txt file - cDNA_ID_1814911; gDNA_ID_2926166; Annot_ID_139926

SEQ ID NO: 17995 - DNA, 3003 bp, Unknown
  misc_feature (1)..( 3003): 2750-1469P.txt file - cDNA_ID_1814923; gDNA_ID_1621098; Annot_ID_55781
tcgttgaagctgtgctaacacttgacacaacagctcacgtacacacccaattcaatccaaacaaataaaatacaattccgaaaacataagttttatttgtatatatcgtaagaaccaatattaaactgaaacataacttttcttgtaaatcattcaagttcaaaatatatcttacttaaaataagcagatatatatgttaaacttatgaaccaaacatatactgcctataaaaatttaaacaacccatcctattattgtgaattctatgaagtaaattcggattaaaacatcccatcgcaataaaccaaaaatgtaaacacaaaaagaaaagcatctctagtatatttagagacccacgtacagtacttgatctactggagcattcatcgtatgttataggtgactgctaaactaaagagaagaattatttttcttctagtcccaccacatattggatcaaagaagtagaaagttttctcctacatattatagtagaatgaaaaattactctgaattcttctcttctattcttataccagtcacacccatagattttatggtaaacgagatcactcctatatcagctcctagtaaataacaaagaagttttcagtactgaattatatcaatctttatcgtgaatgtttccgtacgtatggtatttgtccttttttcaaaataagaattatgagcttgttgattgattattcaaggatgaacttatgaaatatccttttgccagagcttggttaatcccaaaacatttcgtattgtagttctaaaaaggtaaaagaggaatgaaaattataattgggtagtaaagtttggtgggacttgcaagtttcattcaataaggtttcgtttattatgaatgcaccgccatattgtgaaagtgaaaatgacgttgcaccaaactaaacaattaattccccctcatgcaagatattgatcctcttcaagtttttcttctttggtacggtgaccttcctcaatgacaatgagtcaataacaaaaagaaaaactttgcgtttcatttactaatttattttccaattttagtttaatagatatatcatgccaaaacgttgggaatgtatatttttcatacgtgcgtaatttttattcttccggttaagtattcccaaactttaacaacaaattccgttttcatgttttacacaaaactattgtaaagttgattaaccacattagctatatgactaaattattatttttggttcagttgactaagaaaatagaaactgtctaacctatgatgggaccagacaacagtatctcatagcattattgaagtttggttagttttcattaaatgaaaagaatatatatgcaggttatcttctagtcccaaagtgacaatgacttgtcttgtttggaattggactgattaaagataaatacaaaaatatttactatatgaggatacataatgtgtaagtttataacaactgccaatataactatcaaaatatcatacaaaagcatgatcgcaaattaaaaatggtacgtaacatgtaagaaaacgaattagccaccagttgatagtagtctcatttgacatctattgttctattagaagttaaaaaaaaaaaaaaaaaactatatgaaaggtaaaccattcccaatataacgtaataaacataaccatcgagtatcaaccaaaatcatgaccacaatatgtcaagatgaaagtctattagttatttgtatgttagcttaagtgaaaaaagtggatgtgggtgagtgagcggttacaatcgatgatgaatgagtaaccgtacgaattgatattgtcaactatcaaacgttaaattttcaactcaataattaatcaacatttgatattcgtgaagtaacttttcacaaaaagtactctttgataagatgatttatgtccataaaactaattgcttcaactacattattgtcaatatttgatatcaatcaattctctatgcttccatgtgcaagtcttatcgatgtgattgaaatttaacttatggtgtaatctttttgtaacaatcgtttctatttcatattttaaatgtgaaatttatcaaataggaatcatactagaaggtctcatatatattgaaccgaataaataatatttaatcatttttatgatatatatcaatcgcttaaatccgcaactaacaactttatttacaggtagatgtctatcatttacacaaatttttgtcttgtttgcggttcgatctcctgcctagcaaggattccgatgagataagaaggcaatctttatcgcataacgtttatggtaatttaatatgtcatcacaacattatctacgatctgaaatcgacatagtatctctgaacctctgtaaataccacgtattaatttttttttaatattaaccttcgtagaaatcacgttgatcgtttatataaaaatataaatgaacaaaaatttcttgacaaagatataattttaataaaatgtttgtacatatatataagtctgtataggaaacaacatatgaagacatgaagataataatgtagaggtagttataattttttgtgtcttaagtcttcaccaactcatggtgaaaggttcacaatataagttgatcgatcggagttcgagttattctactaaatatggcttcaataaaaatttggttactctaaatagtttcaatgggaaaaatatgtaacaataattttcacaaacctcaagattgattttctaattattaaaataaagtacaccatcaaaaacaaaacagggacaagatccacgtcttgcaataaaacgtgccttgtcaaagatgttctctttgactctttagtgtagccatctctttctctatatataaaaatcaaccatggtgtgtgtcagtgtgtgcacatatttttataagatatcttcacatacacaaaaacatttattgtacagtgcacaagtgatcgaatatttgattctttttcataatcagagatctgatctaaatg

SEQ ID NO: 17996 - DNA, 3003 bp, Unknown; identical to SEQ ID NO: 17995
  misc_feature (1)..( 3003): 2750-1469P.txt file - cDNA_ID_1814923; gDNA_ID_1621098; Annot_ID_171222

SEQ ID NO: 17997 - DNA, 3003 bp, Unknown; identical to SEQ ID NO: 17995
  misc_feature (1)..( 3003): 2750-1469P.txt file - cDNA_ID_1814923; gDNA_ID_2926166; Annot_ID_139920

SEQ ID NO: 17998 - DNA, 3003 bp, Unknown; identical to SEQ ID NO: 17995
  misc_feature (1)..( 3003): 2750-1469P.txt file - cDNA_ID_1814923; gDNA_ID_2926166; Annot_ID_199152

SEQ ID NO: 17999 - DNA, 3003 bp, Unknown
  misc_feature (1)..( 3003): 2750-1469P.txt file - cDNA_ID_1814927; gDNA_ID_1621098; Annot_ID_55779
tactagttcagattcttcgttattgggaaagtttgtctgaagaagaaatccttagaatcatggagagggttacgtgtgagaggagacaactaacagaagagtctcctgttgaacaagatagggaggttgaaccaaaaggataaacaattctaccaattagcttcaattatttaattagttttgtagattagtcctatcgtattcaaactctcttaagcataccattgttttcttcgttggaggctgcctatgtttatctactattattaaaaactatagatacgtcacataagaaataaacagatgtaataagattaaccaactagatgaattacctttggttgttgaaagggagataaattataactgatggtgatgtaatgcattcggagaaattctgagagagacatggacaatggcactagaggtgtcccaacaaattatatttccacacattattattcgattagggttccaaattccaaccacttgttttttttatccatattgatttattcatataaaacatatcattatcgtattttatagcgataaaaacatgtggatacttttaaagaagataaaaagattaaaataaaacgttattcagtatatttcgtaattctttgtagtactagggacttacctggacgggatcaactcgtgatcaataagacaagtggcctaggctagtgatcgcattgcacatatcgtttgggtgctatgcttaaggttttcctttaaggaagagtatgtgtcattatttgtgacagaggagatttgcattcgcgcaatgctactgattttcaattttccactcttgtcacgagtactgttgagagttaaaaggttcattgtcaagaacataatcggcattttagtcttttggactcaacatttgcattaattgtattcaatatagatggaccatggaggcgtgaatattgttctaactgctaaggacatcatatctcgatatactagcttgaccaaatggttgagctctttacatactcttcctcaatcactcgtaaaattgaacaaaaaaatttcaaatcccccgtttcaaggaaattatttaatattctttcatccttatttcaaactcactatataaattaaaatattgcttatttataagctcattatacaaattccatatagattctcgtccctttgattaataaacgtcaactaattaacggtaataacttattatatagtaccttacaaatctctagattggtggtccaacggtatttggatcaacaccattgaaataatttagtttattgccgatttaaagtagattaattatcctaatgacaaatatgattttttttttcttctttttgtcatcacaaatatgaattggtatcctcattggcctgattaacatttctaattacggatcttacctcttcgtgccaaagaagacatttggaaatatatgacccccataaaccaaatatatgtttcttattaatgttgtggaatttgggacattttttaaaatggacaaaagaagacagaaacaattttcctacccaaaatggcgtccttaattttttcattaaattgtaaagcctgtttcaaaagaaaattgactttttgttgtgatagtataaaaaatgacatttgactttttaagtgacaccaagattctgacaataacgaattatatccatgctaattaattgatagcttaattaacaattgcgcaacataacgtgatcaaattaattaagctacatatcaggccttgatccgtggtccaaataatcatcctactaaagaaaaccagcttgttatagtaaaaagccgaattcgtgtaaaaatcggtttaaaatattcggtatagactctaatctcgatttactccggtttggttatcgtgtgtgtgatcgtaacttgccggtggatttgcgacggacacgtgggatgttgtaattgtctcacgtgactcatcgtaactacctttaaattcgctactgtgattttccagattcttatgtacatttgtgacttcttcggtctatttttgttatgtttccaaaaagacatgaatgaagaaacattattacagtttcttttcttcccttaagcctatttaaaattgatatttctaaattcgaactatttattcactagtcgaagccttttaacgcaaatctgagctcttaagtggcgcaaaaaccggtttaatatgtaaatagtaactcggtttagattaatttcgggttatttttgtgattagtgtagttaactaattaattcaggtgaataattatattagagagaaataaatttcaggacaaaaaggcaaagctttggtactgtctcttctcttctccgtcttcttcaccatttcgaaaaatctcaaaactttacagagagaaagagagatcctttacatatacttcactgtcttcttgaaaaccctaatcctccgatctgtttaacctccgatcaagagagatttcttcagcttgtgtgtatcagattcctttggattccccgattcttcgtcgtatcgaatcgggggatggcatttccgtgaaatcagtgatgaaattggaggtgagaagaagttatttctatctatgggcgtagtagctgaggtttggaggtcgagcgtgaggctattaacgaactcgcctcagcttaacggtggctctcacaagagtgcgttatggaagtggcgatttttctctgctcagcccaaaagaaccgtaatgtggacatgggtttgtggtttcatgcttttctctttaggagtcatctcacttttcactggtcacgttgtctcgcaccttgagtggtattctcagcaattaagcaaacggagcttactggtaccttttagcttacttagtgtttcgtttgttacttcttctgctcaattttgtaaccaagtagtgaaattggatgttattcttcaggatatgagccgtcgagaaccaattgatgtatggaagtcaaaatattcgaagtttttctatg

SEQ ID NO: 18000 - DNA, 3003 bp, Unknown; identical to SEQ ID NO: 17999
  misc_feature (1)..( 3003): 2750-1469P.txt file - cDNA_ID_1814927; gDNA_ID_2926166; Annot_ID_139919

SEQ ID NO: 18001 - DNA, 3000 bp, Unknown; identical to SEQ ID NO: 6592
  misc_feature (1)..( 3000): 2750-1469P.txt file - cDNA_ID_1814931; gDNA_ID_1621098; Annot_ID_55777

SEQ ID NO: 18002 - DNA, 3000 bp, Unknown; identical to SEQ ID NO: 6592
  misc_feature (1)..( 3000): 2750-1469P.txt file - cDNA_ID_1814931; gDNA_ID_2926166; Annot_ID_139917

SEQ ID NO: 18003 - DNA, 3000 bp, Unknown; identical to SEQ ID NO: 6591
  misc_feature (1)..( 3000): 2750-1469P.txt file - cDNA_ID_1814935; gDNA_ID_1621098; Annot_ID_55776

SEQ ID NO: 18004 - DNA, 3000 bp, Unknown; identical to SEQ ID NO: 6591
  misc_feature (1)..( 3000): 2750-1469P.txt file - cDNA_ID_1814935; gDNA_ID_2926166; Annot_ID_139916

SEQ ID NO: 18005 - DNA, 3003 bp, Unknown
  misc_feature (1)..( 3003): 2750-1469P.txt file - cDNA_ID_1814950; gDNA_ID_1621098; Annot_ID_55771
caagaatctcaattattgcaattccctactcatttagaacataacaccattaagaagttttgttgctttgttatctcatatacttgacttcttctagtggttcctatcaaacgtccccagaatgttataccataacaaatctcagaaaaaactatcttagaaactgtattcccgcatccaaatcatcactcaaagaagctaaaggcagtgcaactgcaagctgtacttctatctaactacacaagttgcatgtgaagtgtgaacagagaagatttggtctcaatggcatctagtacttagataagctcaggtttttagttatgatcacccaaaagtcttatccatgctattgatacctaaggatccccctacaagggaaaacgagtaatctgaaccgcctgagtataggcgatagtctgaaacttaatgctagattttcaatctcttttgttcccctaatcacagtgcttaatacctcctaaaatttgttagcatgacctatactgtttccacctcacacgatcacaacacagaaaggtcactactaacgtacaagttcattcaagacgtgtttacctgttatgtggataactatgatgtcgcaagaacacatctgcaccagttaagctggaataggatgatgatgatgatctcatgcactgcaaccagtacaaacccctacattttagagatgacatagcatcaaagcaacacaagaaggcccacatataccagagatcctttatggaagtaaggggtctaaatctctgattaagtctaaatttcatggcaattattccagagcttatatcagaatccttcatgtatacgtctcatacccataaagcatggaaacaatgagattggtgttaagtgttaactattggacaatggcagaaattacatataattacttgacacatccttctttcatatacaaaatctctaataatatttggcatttgttcacagatttgccagcaaaagaatagaaaagagatattgcacagttttagcaaagagaagcaacgcaatgcggttaaacaagttgggttcagttacacctttgaaagaagaggccttatcttctctagcagtgtctcggcttcaataaatccacccaaaggtcccaaagacttgtacttgatggctttccatctgttttgatgacaatattgataacaaagcttattatctcacagttttcaagccatgggaaagtaagagagagacgcaaagaatttcccaaaaaagatcaacgagtatgaagcatatatatacctgggcacataaggcaatgcaaaacagtggagatggagatgatcaacactgttaaatggtggctggtgaaaaccaaatctgtgagaagaaagtacaaatcaggttaatgctacagaagtcaccaaaaggagccttacttactccaaattcataattgatttcattgagtgtatgtaaccaagaaagctcacctatgaatgctttgaggagcatctttctgcaacagttgttgtcccacactaagcatgtgtcttactgctcaaatcataaaacaaacatcctcatcgaaactttacataggcacaacagaaaatgaagtataaaaatgtttagataaccaaccaagtgagtagtcttcatctcttctctgaaggtcattcacagtaggaatatgttcttttggaatcaccaaatagtgcctacatcatcagtgctttgttcataaataccagtaaatgatagctaagtaagcaaggagatgcaaattgattacaatggacaagcttaagtaaacggaatcaaactcaattcacaaaactcgatagagcaaagtgagtgaacagagacacaaacctctgggctgcaggcttgatgtcttgaaaggcgatgactttctcatcctgaaaaaaagataatcgcagacgtaagaaaacttgttcaatttagcctctgatgatgaaccaaacaaacaagagaagggaagaagaagataacggtgtgaaggagacgagtagtggttggatttcgcacgatctcacagaagatacacgcctgattcactcccgccataattcttacgtttggaatttgaaatcgctgctaaccaaaattcgaaatggatttcgatttccaagttgtggaaatgggaaagttgtcttctccggccaaaagcctctttttttctccgaaactaaatatttggatctttcattttaaccccacaaatatttttattgctaagttaaacccttaactcatatacgttccgatttagtatagtctttacttgtattaattttcaaaaatatggaaaatttgcgctacaccaccgaataaccattctaactgacgaaaaaaatctatatttgatttgtcctttttgtagattaattttgttttaatataagtataattgatagaagggcttccaggatttggtattttgtatttctcaaatttttgtaatatttattttattatttgattactcttaaatataaatgtaccgtataatcaattttttttttgtattttattttatataaatattttttaatatgtgtataagtccttatttgtttttcaattgtaatatatgtagatattttcaacgaatattatacatcaagagctttagtttattttcgttaaagttttcattctttattttaatattagatcacaataattatgctataaggtgattctatgacatttgtagagtagtttaaatatttttggtatattgttccaacaaaggtatatgggaaagttgaaattctattatctctgatttagtaataatagtgtttggcctatttggcatcacaaaagagttggcagttgggattgttttacttgtatttaaaatttcgaaagtctggggttcatttgcaataaaaagaaaatgatgagggcctaaataaacaataaacataaacaatcgccggaaagtttcttctcacgactaataaaaaccttaaaagctctcctccgttaatg

SEQ ID NO: 18006 - DNA, 3003 bp, Unknown; identical to SEQ ID NO: 18005
  misc_feature (1)..( 3003): 2750-1469P.txt file - cDNA_ID_1814950; gDNA_ID_2926166; Annot_ID_139911

SEQ ID NO: 18007 - DNA, 3000 bp, Unknown; identical to SEQ ID NO: 6588
  misc_feature (1)..( 3000): 2750-1469P.txt file - cDNA_ID_1814954; gDNA_ID_1621098; Annot_ID_55770

SEQ ID NO: 18008 - DNA, 3000 bp, Unknown; identical to SEQ ID NO: 6588
  misc_feature (1)..( 3000): 2750-1469P.txt file - cDNA_ID_1814954; gDNA_ID_2926166; Annot_ID_139910

SEQ ID NO: 18009 - DNA, 3003 bp, Unknown
  misc_feature (1)..( 3003): 2750-1469P.txt file - cDNA_ID_1814966; gDNA_ID_1621098; Annot_ID_55767
acaaagaacgaagcttttctgcgatcaaacacttctccagagcacaacgctatcgttgaagataacaacaacaattaacgaaaaaatatgaaagaaaaagcaaataagcaacctacaaaaattctgcaaaacattaaaaaattatgcgataaggtcagagattctctacagatggtgtatggtaacatctaaacacttcagctgacgttgtatgcttaatctgttcagtgagaatctgacggtagatattagctatttactgaaataggaatctcaaccgtccattttactgaaggtgtacgaggtaactgtctacgtagatattgcctccaacaaaggataaagaagaaccggatatgctgggatcacgtttctgcatacgatatgacacgtttacccctagaaaatgtgtgttaggtgaagagttcggaagggtaatagttggaaattgagaatgtcgcttataagctttgcctcttctaacaaaatgtagggcctagtgcagtaatgggccttgcaaataaacggatggaaatatgaaaactaataaataaagtataggcagaagtttttttatgactgttatagagatctggagatgtaggtcttggtgtatggacagcttaggatttcaagcttaggcatttcgaaatcaagggttgaaagcaattactgtatttgagaatatatcttcaacactgcacaaaactcattttgtaatttattaaaataccggaattgagtgattaatgtcaaaaccgagaatttacaggataacaaagataattaatcaaaatgaatcttttatcaaagtaagataagttttctaacaagttttttacttatagatataaaatattatagttgtgaaaagacataaacatttttaaaagttaagattgagttttctgaagttgaaaaaaaaatcaaaattattttttaatcattatccaaaatcattacttaatccaaaccgatgcccaccctaattatttaactatattaataaggtttgtaagcaatagtatataaaaagctaaaaaaaatataagggtatctcactacgtatgacacttatcaagtttgttagagcatatggggcacatatgtgggagtatgcactttttcatgtttatttcactgcactttttcatgtttatttcactgtttcaaaacaatcaatacaattatatccttactctcgtaacctcaggtcaaatagcatggttaagaaatgcctttgacgaatgatttagctgtgcagcaatatatagtactttgaactgctctaatgggagtggattgtggattttcctttcttctgtttcttaatcttgacattagatttccactccaccccatcttcgtctagtaccttataagtcgttccagcaatgtagaaggtgactttcttctcttcaaggtacctcacaaaacgtttagcaaactcaatgggtgttgaatggcttttgtactttgataaaagactcacagcaatctcctagttaggcttgaaaatcaaagtcttgacaactcgttatgcctcatcaatcacttttcctctagccaagccgtctaaatatgtccccattatttcaatagttggttctatccatagagtcttgactatccttgcaagaagataatgcccatactcagtttgtcgagcatgtgtacaagttaccatcacgttccaaaatgttgagtgagttttgatcaaggtggaaggaatgttctcaaagacttggattgctttgaagcattcactatttgtgcctaaggttgatataaatgcattccacatacctatacatgtagctccagatttaccgcattcatgaaagagtttttctgttaagaagagtttcaaactccaactcttaagattggagagatatattagtcacatggtaactttgttaaggaaaacaaaaactcaaatatttttaaaatttgttaatcaaataattttaaaattgatttcttgtataaaagtattgtttttttgtgtattttaaattatatttttatttttattaagttattatgaatcaaatatttaagaattaaattgaattttgatttatacttatattccaatcttgtatataagttagtcagattgaaatatatggtcgaaaattggtaaaaaataatattcaccattattttggtcattaagttttgaccactttttggtaagatgttttcgaccactattctcggtcaaaaatgtcaaccgatcaaaatatttctaccatttttattggtctaaaatattcgaagcaaatgtttaattcagtataaacatgcaaccaacaatttacaaatggtcaaagaatttctaccaattttattggtcagaactcaacttgcaaccaacaatttacatcaacttcgttttggtaaaaaaaatatcgatcgaagataggtgtttttgaccaaactgatgaatgtatcaattctaatcgtaatacattttcgacatttaccacactgatgaatggtttttactgttagggtcgaacaaaaaaaaaatccaaattgatgttagctgttctgatgtctctaatttcgattaattctaccaaaacattaataacttggactacattttagttgaaatttaccccttaaaaacatccaaattgggtgatacattggtgagagagaaaccaaacctcatttaaagtcataagttataataatgcagatgaggacaaatatagattaggatatggtgttgctggtaaaggtgtgaagcgactttgcctccttggtaccttgagaaatgtaatgatgaagatgatagtgttcgtggtgaggatgatgatggtggatatagaggttatgaagctgagtgggaagaagagttattggcccataattctaaaaatatacgacagccattttgaatgatttcaactaaacatacggttagttccggtttatattcagtttcgtaaccaaagaaaaacgcaaatcccaaattttccggaaatg

SEQ ID NO: 18010 - DNA, 3003 bp, Unknown; identical to SEQ ID NO: 18009
  misc_feature (1)..( 3003): 2750-1469P.txt file - cDNA_ID_1814966; gDNA_ID_2926166; Annot_ID_139907

SEQ ID NO: 18011 - DNA, 3000 bp, Unknown; identical to SEQ ID NO: 6585
  misc_feature (1)..( 3000): 2750-1469P.txt file - cDNA_ID_1814975; gDNA_ID_1621098; Annot_ID_55763

SEQ ID NO: 18012 - DNA, 3000 bp, Unknown; identical to SEQ ID NO: 6585
  misc_feature (1)..( 3000): 2750-1469P.txt file - cDNA_ID_1814975; gDNA_ID_2926166; Annot_ID_139904

SEQ ID NO: 18013 - DNA, 3000 bp, Unknown; identical to SEQ ID NO: 6583
  misc_feature (1)..( 3000): 2750-1469P.txt file - cDNA_ID_1814994; gDNA_ID_1621098; Annot_ID_55756

SEQ ID NO: 18014 - DNA, 3000 bp, Unknown; identical to SEQ ID NO: 6583
  misc_feature (1)..( 3000): 2750-1469P.txt file - cDNA_ID_1814994; gDNA_ID_2926166; Annot_ID_139897

SEQ ID NO: 18015 - DNA, 3003 bp, Unknown
  misc_feature (1)..( 3003): 2750-1469P.txt file - cDNA_ID_1815001; gDNA_ID_1621098; Annot_ID_55753
tttacataagagagcaagtgatggggtattgtatagtagattattagcatgacctcacacaagatgtacttctcatcttctaagtctaaactaaacaatgatatcatcccattattgccaatgttacttatatggatgatatgtacccacttattaattaacttacttatgataaatagaaactgatgataatgtatgaagagaaactgaataaagcatgttacaaacggtcaattattcaaagattaagatttcttacataaatttccacaagaaatcatgttacaaacagtcaaacatttgcatacctatgtaattataaaaatagtcaaatacatatgttctcctccgtaagtgccattgggcctcctcatgacttagaagacgcgagcgtttcagctgaaaaccaaaaaattctcatcagattcaatcagacaataatgtcaaaagttatatattaagtacataatcagttttatttcagaacgttcttagctgtaaaatgtaggatatgatcctcttttggtttaaacctcatgacgtggattcaatttttttgctaaaaatgtaaatatttcatagaaaatgaaaacagtttaggtttacaatcgatatttctatcatgatcgtggattccttttcgacatttctgtcaacaacaactgagtactgatacaaaggccaacgaccagcagtatcagcaacttgagggggatatcctttggctttcaagtgaacctttcctagttattaatctttttggcctcatatcgcttccaaagtgagttatattcattgtaaaatttgtaagggttagtacatccaccaccgagacttaattttctctattcaaaaagaatgtgaaatggcctactggacctggagagtaggattggagattctgatctaaagaatgaagtccattaagaattatgtttttgtacttcgaaatacccattaggtttcatgacccatctattaaaattcatataccaatattcatcaaaaaaaaaaaaagatttctattggcttttgtaaaactcccaaatataaagtgttttattctaccaactaaactgcatgtgacgaatcttccagctatatttcttgttgttttctctccttctatcttcttcttacgtatgaagaattaatgatgatgatgattgctcaatttgttcgttagtgaaaatattataagatacgcatacaaattaacctgtttcttctatatatagatgattacaaagcatgtgatgtgggagttggactattggagtagttgattaatcgagctggagagaaacaattacaaagattctttacaatttttaattaagcaaattagtacagacaaaaaaaaaaagtgtagaaggagacaaagagttgcgttgaaggaagaatgattgagaaattgaattatgccgactcacgccccactccttccataaatagtttagttttattttttgcatgttaatgtattaacctagtaaagaaacattgaatttaggataagcagtaaatttcatttggtgacaaataaagaaagaaagattgggttaagtcaaataatggcaactatgaaagttagagatgtgaaaagggttctggtgattccattattgtacctggctgctaacatttttgtttttcttttaaaatcaagaaaaaagttttgattaatcaaaatcgacgccaactaaaaacacgtgtcaaaacgtggttggtgacagtgggatatgagactgtattataaaaagctacatttctcaccaccacccaatctctctctcccttgaagtagactctaagctaaagccaccgtcagattttcagatctcagatctcagctcttcattcgacgccatggccgagaagggcaaaggaaaggttttcttcttctcttctcttcttattcagttaatggtattctcttattattgttttttttttaatttgtgggtcttgaggatatattcaatctttatttattattaacctgaggaggtttttgtatatgtgggtttatgtttgtttgtttttgtgtggattaaaaaaaagagttggctactttgtagaaactatgagaagaaatcagattctctttaaaccccaaaaaaagtaagaaaagaaaagaagagatcagattcttcttctctttttctattttgtgtcagaggtcgaatctgttcttctgctcccttcccttttttgttgtttctttcagtaataagatcttataaacgtcaaatccattagtacatataattttttatcaaaaaagcaaactatggaagaagcagaggatttagtgatgttgatatctgaaaaacaggtaactatgatgaagttgaaggtggatcttgattgtcccaaatgttacaagaaagtgaagaaggttctttgcaagttcccctcgtgagttacttctctctttttcttaacttttttttggtgaatttgattttgattggttttgtttggaaatggactgagtggatttacttgtgtgattgggaacaagagaaataagagaccaattgttcgatgaaaagtccaacattgttatcatcaaggtggtttgctgtagtcctgagaggatcatggacaaactctgttccaaaggcggcggctcgataaagaccattgagatcgtcgagccacccaagcctcctcagccacaaccccaacaaccacctcagaaacctaaagatgctcagcctaaagctccttagaagcctaaggaacctgaaaagccaaaacagcttgaaaagcttaaagagccagagaagcccaaacagccagaaaagcccaaagaacccgaaaagacgaagcaacccgcacccgctccagctcccgcaccagcacccgcagccaaacccgcacccgctcccgctccagctcccgcacctgccccgaagcagccgggaccgccaccgcaagcgatcccgatgatgccgcaagggcagccagcaatgtgttgcgggccctactacgatg

SEQ ID NO: 18016 - DNA, 3003 bp, Unknown; identical to SEQ ID NO: 18015
  misc_feature (1)..( 3003): 2750-1469P.txt file - cDNA_ID_1815001; gDNA_ID_2926165; Annot_ID_139894

SEQ ID NO: 18017 - DNA, 3000 bp, Unknown; identical to SEQ ID NO: 6581
  misc_feature (1)..( 3000): 2750-1469P.txt file - cDNA_ID_1815008; gDNA_ID_1621098; Annot_ID_55751

SEQ ID NO: 18018 - DNA, 3000 bp, Unknown; identical to SEQ ID NO: 6581
  misc_feature (1)..( 3000): 2750-1469P.txt file - cDNA_ID_1815008; gDNA_ID_2926165; Annot_ID_139892

SEQ ID NO: 18019 - DNA, 3000 bp, Unknown; identical to SEQ ID NO: 6654
  misc_feature (1)..( 3000): 2750-1469P.txt file - cDNA_ID_1815024; gDNA_ID_1621099; Annot_ID_55826

SEQ ID NO: 18020 - DNA, 3000 bp, Unknown; identical to SEQ ID NO: 6654
  misc_feature (1)..( 3000): 2750-1469P.txt file - cDNA_ID_1815024; gDNA_ID_2926167; Annot_ID_139965

SEQ ID NO: 18021 - DNA, 3000 bp, Unknown; identical to SEQ ID NO: 6623
  misc_feature (1)..( 3000): 2750-1469P.txt file - cDNA_ID_1815028; gDNA_ID_1621099; Annot_ID_55824

SEQ ID NO: 18022 - DNA, 3000 bp, Unknown; identical to SEQ ID NO: 6623
  misc_feature (1)..( 3000): 2750-1469P.txt file - cDNA_ID_1815028; gDNA_ID_2926167; Annot_ID_139963

SEQ ID NO: 18023 - DNA, 3003 bp, Unknown
  misc_feature (1)..( 3003): 2750-1469P.txt file - cDNA_ID_1815032; gDNA_ID_1621099; Annot_ID_55822
tcgcggttcggaattggtgttttttcctcggacttaggatggatgctaatctcttatgcttagattgtcgtagtttttttttttttgttatagattcggtcattttggcttttttgtttcttctgtattcgttgttgcaattagaaaattttcgaaaattttggcaggtcatgctcaatctaaaaccacgttggaaattgagttccatagtgatggcaatgcaatgtttggttgtgaagctactaaatggttttatttgaaggagattgcaatttacgtgtgggctttatgatcaataagagggcaatggactttggttttcactgctggataattagtgaagactttgaagttggatgatgaaaaatgtgatttgcgaatgtcaaattcacgtggatctctcgagattcaaaccaagcggcaaacatgcatgaaagaaaattctgaatttctgaacatgcgaacgtctcaacgcatttcgattgtggtttgttttagtttatttatttttaattcaacttttttttctttgttgtaaaaacatgcacatcaatttcatcaaccaactacaattttattaaaattccttttttatttttttcaatcactcagtgttaaaacacttcatcgaatctaatttctttttattttgggaaactacattgaatgatgatctttataattagccacaaatcattgtcaccgatcaccatgacaccatatatagctttaattttgtttgttctgtaccgcttgtttctgttttgtatactaaattactaaccacaatatatttccaaatccactattttatttgtttctgaaagcaaacacttagtaatatgattggctaaaacgctcctataattgtcaagaaaaggggaatgtattgcgacactaaattaatttatccacaagaactatgaccacacaactcgaatacaaaatcaacttgttcatttatgtttatcttgtgtgtaattttcaatctttatccttatatatatatatatatatgggaaaaggaactattgaatttgaagcaaactgttgagcaacacatttaattaagtaagttttacagagttattttgatcatcttaagaatgatagatataattagttaaccgaatttaatcactttaatttaatcattattacgttgtatactttgtatttggctatttgctttgttcgttccaaaactttagtatattcaccacacttcttcaccttatctcgttagttttgctttattacctttcctctttctattttttttttattgttagggtcaaagctttgttaccctttttatcattcgatatttgtatatggcctttgtttgatatagataacaattatctacattggaaagatgcgtttgcgagcccataaaaattggatagagacttgcacttttggatgatatctaaattatagaaattagaaagtcaagttgccaaaaacttatccctcaaattccattggatcggtatcgaacggtgtcgtttatatcatctcgaggcaatgctgatattagccgctttctcgctgacacgtgtccagagattagcagctcaaagaatctagtgactcatctttcctcttatcatctcgttattacattactaccctttgcttgctaatgtttctttacgtgcactggaagaaaaatagaattatcaaaccaaacgactaatgactaatctatgatgcatctaaataattacaggacacaaagttgaatattctgatttaacttaaggaggtttattattattttaattaaaaattgatcagatgactctgtctcgtctttcaaaactattacttgttgataatgatttttctctatgactaattcaaacattttctatattaaattcatactttttaagttaattactcattagggcctattattagttatatataatgaatgttttaaatatagggagttgaaattccatcttaatcatagttggatttctttagttaggtgagtttatgagtgagttttttttttttttttttttttttttttgtctttcagtttggttgttaaattgttaattatgattaaaacgattattatctaaaaatattatttattatactatattggatgtatgacctcacttcttaaattaatccaattgctacacggcaagaatcaaacaaaaataatatgtgaaaaacttattgttgtgagatcatacttaactatatagaaaagaaaatgttagaatcaaataatttaagaggataaaaagagtagttgaaataattgattgtcgatatgcgaccagtacctaaaaatattagaattatgcatgctaaatattgtctgacttgaaggttattagtagtaatagattttatgtgatatgtttgcttaaaacaatatcattaataagaattaaaatcatgacaagggtaacgtttgccacgctagtggcagacacgtagaattaaaccgtacaagcataaatccttgtattagtctcaaaaccatccgggtaaacataataaaagttcattttcttgccatttctacaagcaattgacaccattattacctagaatagtactatttaatatgagagtttaaaagacccggaattttaaattttgatgtacggcattaatgcattgaatcgtaaagtatattactcttgattattaaactaaaagtgagtcatttggtatcttaatgacgagagagatttaactaatctcacattaaactaagcttaaggatcaagtgggggcaagcgaatggcataacagtaaataaaacgaaacacgagggctttatttgacaatgcctctaccttagcttcaaaactgagctcgttcttcatcatttcctgaaaactagaaaacacagtttaaaggaacataaaaagcaactcttttgagagatcacagaaaccctaatttgctaagaaccctaatctcaatttccatcttccaaagttcagattctgtatgtaaatg

SEQ ID NO: 18024 - DNA, 3003 bp, Unknown; identical to SEQ ID NO: 18023
  misc_feature (1)..( 3003): 2750-1469P.txt file - cDNA_ID_1815032; gDNA_ID_2926167; Annot_ID_139961

SEQ ID NO: 18025 - DNA, 3000 bp, Unknown; identical to SEQ ID NO: 6626
  misc_feature (1)..( 3000): 2750-1469P.txt file - cDNA_ID_1815035; gDNA_ID_1621099; Annot_ID_55821

SEQ ID NO: 18026 - DNA, 3000 bp, Unknown; identical to SEQ ID NO: 6626
  misc_feature (1)..( 3000): 2750-1469P.txt file - cDNA_ID_1815035; gDNA_ID_2926167; Annot_ID_139960

SEQ ID NO: 18027 - DNA, 3003 bp, Unknown
  misc_feature (1)..( 3003): 2750-1469P.txt file - cDNA_ID_1815042; gDNA_ID_1621099; Annot_ID_55819
aaacaatcaaagaatacaaaggtttgagatttaatcatttgtttaagacaacgaatgatatgagttctagtgtctgaaggagcataatccctttataggtgtctgccatcaatagtgaagtttcttgtaatgggcaatgaaaatgatatcactaaaaaatgggtcctaagagagcaacagaggaaaatgggaagtaactatttgaactaaaggggatgcaaaaccagaagataccagtccactataagcacttacattacaaaatatatgtccccatgtattcgtcgggtttctattaggctattgcttgaatgctaaagtaattatcataaaccatttgtgaggtgtaaaaagtgttagaacttttacaggtgttcctctttgttagtaaatgcaggacactgggataattggtccaaatttgacagaacgaaagtggtacatgattccagaatatgcccccagggaagtgtaaaatttatactttgtgtaataatagaaggttaaaattcaaaaagcaaattcatcatcattataatccatatgtagaatgacagtgagcaaattttagcttttacctgttaatcatgggatttcggaagacagttctgacattcaaatgagttgtgcctttttaaggtcagacacaactcctctgtcttggctgcccctttcattgtaaaccacctgcacacagattacagaaagagaatgattcaatcatgcagaagataataactctatgttgacaggaaaacaaaatcgctcatacgttttacggatttttctgacattttatcgtaccttatcaatgatcccatattcaacagcctcagtgggactaaaatatttcgggcgtttcatgtcagcttcaatctgctccggggatttaccaatatgctttgaatacagcttgaccttgagcataacattacatagaatagagacacatctttcagataagtttgaaggtaaaagtgaaaagttgcggacagagaatgatagcatgatttgagatttgctagcatgtgcatactattaatggctaactgatgaatattaagatgtctgcaagtatatacacccattgcctgcaagttccatttatttatatctcccccttaaaagacccaaataacacacacaactggacactgttgcataatgaagatcaaactaagatattctacgtacatcacaagggtttgattctctactatgtgaattcatatcaagtttatcttctcaccatttctgtctttatgtgcttgatttctttccttgcaatttcaacatcagttgcttggccttgaaatcgagcaatgggctacaaagttaacatgcaagagaaaatatattgataagtaaaaaggtgcatgcacagaattaagaatcataaaccttagattcttccaacttgaaaaagaaaaccaaaatcttctagcagggggaaaagacgccacctaatatttaaaagaaacgatcagaaagaacctgctttatcataatagttgatgagggcaacgcagatcgatttccttttgcaccagcagtcagaagcaaagcagcttcaccccaagcattcccgacgcaaagagtaaagattggtggtttgacatacctgaaattcaaagataaggtaagagttgattgttgcattgataattggtcgttctccccaaaatatgctggatatgaaaactgtctccaagtgcaattttgaatatttgggaaagcagtttaagtatccaagtcttgttatcgatgctattacgggaagaagtaagttgaggaaagagatgaagatcaattaccccatgacatcatagattgcaaaagcctcagtatcatagcccaacttttcaccattctgaaaagggagaagataaattctcttaaaaacagtttgaacgataggtaatgatttctaagcttttagtcattcatttgaaacaaaccacagtttcaattttactattcagtatgcgttcttaatatgatggactacataatggaagcccaccttggttgtcccagtcgagtttatgtaaaggtaaataggcttttcctcgtcttcatactgaaggtaaagaaactccgcaagtatcaactcagtaactgaaggtacgagagacattcccaaatatacaattcggttcttgaacaaatatgatgccaaatcaggaggaggttgttcgtgtgcacttccctttgagaaaggtataacctgttgataagacggaagcacgaagataagaatcatataataacaacaataaacaaaagactatatgtgaagaatatagcagcctccaaattctctatcataatcataatcagagcaattgatgcatattataagtggcacacacaatcaagtgaaacctctgccacataataactcaacttcttccttaccagccaaacacacagcataatttcttccgaaactgcattatttaatcttcatactcaactctctaactaaacatgtaccatttccgatcaattaaacaacagaaatgaatgagccgtctttgctatctaattgcatatatcaatagtaactctaatccattaattcgccgtttaaagctaagtagcaaccgttggtaagattcgacccataaattttccctcaattcaccaccacagaagcataaatctcagctatagaatgaatgagcattactcccccttgcaatctaatagcctatatctagagtcaatctaatccattggttcaaaactaaggaacaccatttctcgacaaatacaatttctgaaaattcactaccacagaagcataaatctcagctatagcaacgaaaacctcaatttcaaaatcctaacagaatagggagctcgttaattaagaaactgaaaaaaagtataaattcgagtaccatagtgacaactccgcgtttaggcttggaactggaaaaatttaacggattaagcgattccgcacgaagcttagcgccgcataagtcactagagatg

SEQ ID NO: 18028 - DNA, 3003 bp, Unknown; identical to SEQ ID NO: 18027
  misc_feature (1)..( 3003): 2750-1469P.txt file - cDNA_ID_1815042; gDNA_ID_2926167; Annot_ID_139958

SEQ ID NO: 18029 - DNA, 3000 bp, Unknown; identical to SEQ ID NO: 6628
  misc_feature (1)..( 3000): 2750-1469P.txt file - cDNA_ID_1815046; gDNA_ID_1621099; Annot_ID_55818

SEQ ID NO: 18030 - DNA, 3000 bp, Unknown; identical to SEQ ID NO: 6628
  misc_feature (1)..( 3000): 2750-1469P.txt file - cDNA_ID_1815046; gDNA_ID_2926167; Annot_ID_139957

SEQ ID NO: 18031 - DNA, 3003 bp, Unknown
  misc_feature (1)..( 3003): 2750-1469P.txt file - cDNA_ID_1815062; gDNA_ID_1621099; Annot_ID_55813
tttagctcaagctcccatgatggctccttctggctcaatgtccatgccgcctatgtctagcggcggtggaagctcggttcctcctccagtgatgtctccgatgccaatgatgactccaccacctatgcctatgactccaccacccatgcccatgactccaccacctatgcctatggctccaccaccaatgcccatggcttcaccaccaatgatgccaatgactccatctacaagcccaagcccattaacagttccggatatgccttcgccgccgatgccatccggaatggaatcttcaccttctccaggacccatgccaccggcaatggcggcttcgccggattcaggagctttcaatgttagaaacaacgtcgtaacactttcatgcgttgttggagttgttgcagcccattttctcctcgtttgaaatgattattgaattggtcagcctcgatcgttttcttgtaatttaccttcatttttttccctcaaattattagtggtcatcattttataatatttgagtttgtgtttgatgtacgattcagacatttgtttgcattatgtgcttaataagtttatcgttgactctacttgaagagagactttgtatgtgatgtaaatttcttctatctatggaacattgcattcgtagtcatatataggacataaatatggttacaacttggaaggataaataccacaaggcacaatatgatcaatacgacaatacctctcattgttagtcgataatatcgatgtatatagtcactagactcaccgatccgtaattccttttaacaaaaaatacgttattcagatatgttattttcatatatatgtgtaaaaatgttcttcctaataattaaaagagacaaaccaaagaaaaggctatatttgcaagctgtcattggaattttgcatacattttctctatatattctcattgaaattcatttattctttcattttatggaggtgtagaaatacataaaatccaaagaaaatgagaaattttcaaatatgttgaatttgagaatggaagaatatgacaaaggtgggtatagtgaataaatggtagggaatatagatatgcccgacccaagaggacagctaaaaagaaagtgacgttcacatgtctgtctttctctattgccccaaccattttccaatgtgtattagtaataacagaaatcatacatttaaaaagaactatatagaaattttattcatatatatatagcagtactagttagtatatctgcatttttttgtttttcaagtcatgttgatgatttattactttaaacagatgccgaagctttctaaagtaattacggtaaatatatgttagtcatttgtaaaaacgaccgatgacagaaagatatgttttatttcttagtatatctaacaatgttataaccgaatgatgacaacctataaaccacaatagagcactaatttaattacatgctctttgttgctggctccgtacaccggccaccacaatcaaaaccttaattgtccactttttagccacttcgaattctcagaaagataaatctaaggaagttctaggtctttcaaaggccacaaatctcgatatgttggtggtttgtgaatatgcaaatctttggtgatacgctaacttcttcaattcataatttcaataaacgaactgagaatttactgatgggtagttgttcaaagctggagtttcttccacctgctgacgtttacttggaatctctcaaggacccaaatctaaggaaatgcttacggttgaaaagtgtccgtccgatttcgaaaaccattccaggtatttttttttaagtcttacaacatattctttccggtgaggaggagaccatgttgtttttcttcccaagaaaatttaacctctattgctatgatcctaagtgtataaaaggcttgcaatcaatggaggttttaattatagtccatgggtgaataatgtcatcaatagtgataactggacaagatttttaaaaaatgccacaaacacaaaagaaaaaaaaaattgaaagtaaatgtcataaaatcataattatgcgtagtgtgcaaggtatactttggtaaaatctgtcacattagacatttacttatttacaattttgcaaattggttatttacttaaataaatgaaacttatacgcaaaataaaataaaatcctgactaagctcatatcttttaatttgttttctaacagaaatatatccctctgttagtacaccacattgacgatgtcattcattattaggaatggaaatttttcattctttcctataaaactagatgttaattaaaaaaaaaaaacaattatacggatttcttaagagatttgaatttctttacgtagattttctgtaagtagtataattcaaaagaagcaagttaaagctaatctccttgacatggattgaatttttttttgaaccaattacccgacaaggatttttttagtggtatttatagattttgccattttttatatctaaaaaatacaatttaacacattacgtttgggtttatttagttccatattttttttagggtatagtgtttgttattaagtatgtattttacaaaaaaaaatctcaagtgtttcattttttaaagttgcagaaaacgcaaaatctaaaatatttgaaggtggcaaatctaaaagatttaagtcacaaaatggcaaaatcaacaataatcctatattattttgggtggtgttgatgagccgttgacgtagaagaatagcatgtggccttatttgctataggatgtggccctaaccctaataggatgagaaatctttgctcaacttggcttagagtggaaccaaccgtgaagcatccgtctcaaaaatgtctactctatgacgtctttttcaccccaccccccccctctccacaaggcccctccatttctgtataaacttcagaatgctttcttgagaatgtttttatcttctttctatagtttccatg

SEQ ID NO: 18032 - DNA, 3003 bp, Unknown; identical to SEQ ID NO: 18031
  misc_feature (1)..( 3003): 2750-1469P.txt file - cDNA_ID_1815062; gDNA_ID_2926167; Annot_ID_139952

SEQ ID NO: 18033 - DNA, 3000 bp, Unknown
  misc_feature (1)..( 3000): 2750-1469P.txt file - cDNA_ID_1815073; gDNA_ID_1621099; Annot_ID_55810
acttgcctcatttgttttccttgcaggccctcatgttggcgctcagaagtattatgtgaataatgaaatcagaatgctggagcgttttgggtaagtaactaagtatgattaggcatgaaccttccacattttcaagcataacgatctgaaactgctgaaattattgctttatttagggggaaaaactgtataataaagcatgaaggctgtctcaagaatggagattctgattgcatcatccttgagcaccttgaacatgacagacctgattcattgaagagagaaatagatgtgtatcagctgcagtggtacggctactgcatgttcaaagctctatcgagtctgcataagcaggtatgcagattttggactgaattatttttagcattcatatttcaatcacgcaactaaccagttctattttttctcttcacaatcttgaagggtgttgttcatagggatgttaagccaggaaacttcctcttctctaggaagaccaacaaaggctatctcattgattttaaccttgccatggttagcattttttgtcacccttctcttatcaaaattttcctagcgacgatttttggttagtgtttcttactatagaatttgaagtaaccgaaaaaacctgcttattcaattctaaggtcagtgtctaacagaggcactgaaaaacttgaggaacacaaacgttcatgttaaaatttactgttatgttcccttccccacccactgatattaatctcttttttttcctgcatggttcaattaggatttgcaccagaagtacagaagagcaggtaaacttctcccctcatgcatatgtgctgtacttggctataaaatatggaaactaaagctatctcttgttatcttctgtagataaatcaaaagcagcttcaggtcttcctaccgccagcaagaaacatcatacattggttaaatcactcgatgcggtaaaccgagggaccaacaaaccttctcagaaaactttagcgcctaatagtatcaagaaagcagcgggaaagacaagagctcggaatgacatgaccagatgggagagactcaatagccaaggggcagaagggtctggcttaacttcagctaaagatgtgaccagcacaaggaacaacccttcaggtgaaaagagaagagagcctttgccatgtcatggaagaaaagcgcttttagattttctgcaagagacaatgtctgttccaattccaaaccatgaagtatcatccaaagctcctacgtctatgagaaaacgggtagctgctcttccagggaaagctgagaaggaacttctttatctgaccccaatgccactgtgctctaacggtcggcctgaagcaggtgcagttctggtgtaatcattgacttttgtttttgtttcagagtttaatttaaaccttaagaagagtttttctgactttactaggggacgtaattgagaagaaagacggtccttgctcaggaaccaaaggcttccgagctccagaggtacatcaactgtaactatagctcacttctcttaatactagttaaatatgaaaatcttgtgccttcagactaaagttgtaggcctgagctactcattagcacatctctgatgggaaagctaattctctggggctgttcttggctgaattggtttgtgcaggtttgcttcagatctttgcaccaaggacctaagatagacgtgtggtctgcgggagttactttgttatacctcataatgggaaggacacctttcactggtgaccctgaacagttaagatctgacttgaatgagtacaccatcactcgattccactcttttttctttcttgccttcttacaaagaccttgtatttcccaggaacataaaggacattgcacaactacgaggcagtgaagaattatgggaagtagccaagctgcacaaccgtgaatcctctttccctaaggtaacatctcatcttaccactcttctgtactctccattcatttatgagacacatatacttgctctgttctttttaccgccagcttaaatatcacataaaagggttttcattgttagcgttttgtgttctattgcttctactgcactcccattacagaacatatatatcttaataatgtaaattgatgacaaagtgattagatagatgatcgtgagagatgaaatcaggtagagttttgtgttgttgtttcaggaattatacgagtcaaggtacttgaaggggatggagttgagaaaatggtgcgaactcaacacaaaacgcagagagtttctagacgtaattccactatcgcttcttgacctcgttgataaatgtttgaccgttaacccgaggcgacgaatcagcgcagaggatgctctcaagcacgacttcttccatccagtacatgaaacccttagaaaccaaatgctccttaaacagcagcctacagtggttgctgacgcagtaagccaaactctaaactatttacaattgtaaaagtaaataagaaaaatatatttaacaatcttcactccactgtccacaccactcaactttggaaaactaaaaagagtattttagcaaattagatagtttgagtcttcaaaatatcttttgtagaggacacaaacttgacgtttttgtctatttgcctcgaaattatgataaattataatcttatttctgttttttacaatgacttagtcataattcagtgacagttgacaaccacaaaatcaatcttttaaaataccggtgtatagtaaacctctgtatcatattagtttagttcgtctcaattgtcttgttaggtggtttgatgttagtcacttaaaaaattatttgtttagtaagtcttctatcaagtgggagaccaagtcttcgaggaaaggaagaccaagtttctcctctctttctctcttactctcttactcataatatgtattgctaatttacttctcttacgaatcttcgtctcttctctgagttctctctatcgtctcccatg

SEQ ID NO: 18034 - DNA, 3000 bp, Unknown; identical to SEQ ID NO: 18033
  misc_feature (1)..( 3000): 2750-1469P.txt file - cDNA_ID_1815073; gDNA_ID_2926167; Annot_ID_139949

SEQ ID NO: 18035 - DNA, 3000 bp, Unknown; identical to SEQ ID NO: 6633
  misc_feature (1)..( 3000): 2750-1469P.txt file - cDNA_ID_1815077; gDNA_ID_1621099; Annot_ID_55809

SEQ ID NO: 18036 - DNA, 3000 bp, Unknown; identical to SEQ ID NO: 6633
  misc_feature (1)..( 3000): 2750-1469P.txt file - cDNA_ID_1815077; gDNA_ID_2926167; Annot_ID_139948

SEQ ID NO: 18037 - DNA, 3000 bp, Unknown
  misc_feature (1)..( 3000): 2750-1469P.txt file - cDNA_ID_1815081; gDNA_ID_1621099; Annot_ID_55808
tcaacaactgcaaaagtttggtgacacttccttctactattgggaatctccaaaaattggtgaggttggaaatgaaagaatgcacagggctggaggttcttccaaccgatgtcaacttgtcatctctcgaaaccctcgatctcagtggttgctcaagtttgagaacttttcctctgatttcaaagagtatcaaatggctctatctggaaaacaccgccattgaagaaattctagatctttcaaaggccaccaagctcgagtctttgatactcaacaactgcaaaagtttggtgacacttccttctacaattgggaatcttcaaaatttgagacgtttgtacatgaaaagatgcacagggctggaggttcttccaaccgatgtcaacttgtcatctctgggtatcctcgatctcagtggttgctcaagtttgagaacttttcctctgatttcaactaatattgtatggctctatctggaaaacaccgccattggagaagttccctgctgcattgaggatttcacgaggctccgtgtactactgatgtattgttgccagaggttgaaaaacatctccccaaacattttcagactgagaagtctaatgttcgccgactttacagactgtagaggtgtcatcaaggcgttgagtgatgcaactgtggtagcgacaatggaagatagcgtttcttgtgtaccattatctgaaaacattgaatatacatgtgaacgtttctggggtgagttgtatggtgatggtgattgggacttaggtactgaatattttagcttccgtaattgcttcaaattggatagagatgcgcgagagctcatcctacgatcatgcttcaagcctgtggccttaccaggtggagaaatccctaagtatttcacgtatcgagcttatggagattccctaactgtcactttacctcggagctctctttctcaatccttcttgcgatttaaggcttgtctcgtggttgaccctctctccgagggcaagggtttttatcgatatttggaggtaaactttggcttcaatggcaaacagtatcagaaatcatttttggaagatgaagaactggagttttgtaagacggatcatctgtttttctgttccttcaagttcgagtctgaaatgactttcaacgatgtggagtttaagttttgttgctccaataggatcaaagaatgcggtgtacgactcatgtatgtctctcaagaaacagagtacaaccaacagactacgagaagcaagaagcggatgcgggtatcttttgacttttgattagagctgaaaattataaagctatattttgacttttgatttgattttccaggatcgaaataccatagagacagactatttaatagaatcgatcgtttgatttataatgcagatgacatcgggaacatctgaagaatatatcaacttagccggtgaccaaattgtagcagacacaggattggccgctctaaatatggagctttcgttaggggagggagaagcatcatcatcaacatctctagagggggaagctttgtctgttgattatatgataactaaagaacaagatgaagacattcctttcttggatcctgtttctggtaactgaagcatcttatcattctgttttggtctgttttaggataacttgggatcgaccatgattatatatctataatgataacaagacgatttcataggttttgacacaagccattttttattgatagatggtacatggagatcattttattctgcagaatgatatttggagaaccaaattccgtttaatcatccaactccggagcctgaaagtgtttgtaatttcttctttatctgaatgcagaaacactctgtttgctttgaacattttgtctgccttttctttgaaacatagatctcaatgtgtatattagcacaggttgtttttctctttattagcaatgaatagagaaatcagactttgcgtaaacaaaaatgtatatcgcaaattcacaaaagaattgacaacaagagtgtgttggaactaattttaaatagcaagatccttgtcatcaacaacatttgcattgctgattcaatagccaaaaggcagaagcgtttttggcctaactttggccaaagatgtgaccagcataaggaacaatccatcagctgaaggaaagagcttttaaactttctgcaggagacattgtctggtccacttccaaaccatgaagtatcatccagctatcctacgtcgatgagaaaacatgtcgctgctgttcccccatcccgctgcactctttaattatatgataaagagtgaaagttgtaggcctgaactactcactagaacatctaggataggaagctcattctctggggctgttcttgactgaattggtttgcttcagatctttgcatcgagggcctaagatgatagacgtttggtctgatggggacgacacctttcactgctgaccctgatcagttaagatctgccttgactgaattcacaccatcacattgttaagattcctttcctggatccttagccgtctccacagcttatcacattgttaaggtgacctgaaacgtattacaactctgtttcataatgaacatgggatcgaccatgactatactggtaatgacaagacgatttcttagtttttcacacaagccattttctcctgcagatgatggaacacttactgacagctagaaaccttttatggttccatgtccagaacagaagtactctattcttacttctctgttttgcttctttgaaaatttcgcttctcctgaaagatgtgaatataacagtcttgtctgttgaaacacatatctctctctacgaaatgttattttcctctctttaaagcaatgaataaatcataatcttggtaaacaaaaatgtatttcacaatttcacaagagaactatcaacaacaaaaaagttttaaatagcaacctcatcagcaacaattgcatcactgctaccatg

SEQ ID NO: 18038 - DNA, 3000 bp, Unknown; identical to SEQ ID NO: 18037
  misc_feature (1)..( 3000): 2750-1469P.txt file - cDNA_ID_1815081; gDNA_ID_2926167; Annot_ID_139947

SEQ ID NO: 18039 - DNA, 3000 bp, Unknown; identical to SEQ ID NO: 6634
  misc_feature (1)..( 3000): 2750-1469P.txt file - cDNA_ID_1815089; gDNA_ID_1621099; Annot_ID_55806

SEQ ID NO: 18040 - DNA, 3000 bp, Unknown; identical to SEQ ID NO: 6634
  misc_feature (1)..( 3000): 2750-1469P.txt file - cDNA_ID_1815089; gDNA_ID_2926167; Annot_ID_139945

SEQ ID NO: 18041 - DNA, 3000 bp, Unknown; identical to SEQ ID NO: 6635
  misc_feature (1)..( 3000): 2750-1469P.txt file - cDNA_ID_1815097; gDNA_ID_1621099; Annot_ID_55804

SEQ ID NO: 18042 - DNA, 3000 bp, Unknown; identical to SEQ ID NO: 6636
  misc_feature (1)..( 3000): 2750-1469P.txt file - cDNA_ID_1815101; gDNA_ID_1621099; Annot_ID_55803

SEQ ID NO: 18043 - DNA, 3000 bp, Unknown; identical to SEQ ID NO: 6636
  misc_feature (1)..( 3000): 2750-1469P.txt file - cDNA_ID_1815101; gDNA_ID_2926167; Annot_ID_139942

SEQ ID NO: 18044 - DNA, 3000 bp, Unknown; identical to SEQ ID NO: 6637
  misc_feature (1)..( 3000): 2750-1469P.txt file - cDNA_ID_1815113; gDNA_ID_1621099; Annot_ID_55800

SEQ ID NO: 18045 - DNA, 3000 bp, Unknown; identical to SEQ ID NO: 6637
  misc_feature (1)..( 3000): 2750-1469P.txt file - cDNA_ID_1815113; gDNA_ID_2926167; Annot_ID_139939

SEQ ID NO: 18046 - DNA, 3003 bp, Unknown
  misc_feature (1)..( 3003): 2750-1469P.txt file - cDNA_ID_1815117; gDNA_ID_1621099; Annot_ID_55799
tagtggattaaggcattaagctgtccaagttgcttgtattttcttttcattttattaattaaaaaaaaagttcaactatttattgactaataataatacgtgttaaatggttatcggtttaaaatatgggccataggcccagacttgaagaaaaacttgaaacccaaagttttatttttacttgttttctttctcagtgaatatctcccaatcaagcttcttcaattttgcttgctctctctcttacacggccaatcggtgttttcgcagctttcaggtttgtctcaatctcaaattaaatcggagtcaagtaataacaattgataaccctaattgtttcaattatattgtaagatttgaaattttgcagtagatccggaatcgtattctagttctggaatcgttgatctcgatggaattttttttaagatttcttcatacacatttggttcaaaagatcacataattttattttaatttgataagtatgatgattctgctaagtggcattggataaagttttcatttttgcaatacgtctaaacttgtctatgtcttgaatgaactctctgagttgcttaaaaagtcttgtgctttctttattacacaggcctcaatacaagacattctatataagcatattgcagaagaggcggttctaattgttgcatggagttgaacaatatgacgtagggaaattctaatttaggggaggcctcagagtttgcactaacttcataatcagctctggacgttgttgattgtatttgaacaagaatgtgtaggcagaattgtcgcgcgaaatcctcaccggaggaagtgatttcaactgatgagaatctcttgatatattgtaaacctgttcgactatataacatctttcaccttcgctctctaggcaacgtatgatttggccttcctctctcatcattttagcttagtaatctttcatctcctgtgtagatcacccactaatagtttgagtttgctaagctgattatggtctgactcatggcgagtgtgtgcttcttttgtctcctaatgttatttgaacttgttgtttgttgttgcagccatcgtttctgccaagatgcttgaactacaaaattggggcaaagcgcaaaagaaagtatgcgtttcttcttgaatgtagttgccacagtgatatgttatttatcttacttctaatatggaagctgatgaactatttatctttgttgagtagatatggacataatgaatggtttcttctttgttcatgctatacacttatattttacaaaattgtgttttgcttaggtcaagatctactgggatggtagttttcaactataaggattgtaataatacattacaaagaactgaaggttagtctttttctgttcttcgacaaaattcgatgtcaatgtctatgtttctctagatgatttgttatttactatttttttctgtattgtcacgcagttagggaggattgttcttgtccattttgctctatgctatgtggtagcttcaaggtgggcaactattacaactgaggtttcttccggggcctttcatatctaacactgtgaaatgctactgccgtttaatgctatatactttcactgtttggttacatatttttgtgtttgttgtttgtcttcttgctctttttaaactgctgagtgtgtgcttatctgagaaaacatgttccagttcgagcttacaatccattgtcttgtgtctatgcaggggctgcaatttcatttgaattcatctcatgatttatttgaatttgagttcaaggtatgtggttttatggaatttcttgttttgcctatgccgttagtaatgaggttatagttaaaaaagggtctttcctattgtagcttttggaagaataccagacagttaatgtttctgtaaaacttaattccttcatatttgaggtcagttactttaaacttggttaattgggaaatcctatagctggtgaaaatttggtttatattccatccttatttgtactaggaagaaggaagtgatgatgataaatttgagcccttctctctctggtaactctcagaaccccttgattaaataccttaatagcagtaactccttgcttttcttgtcagtacttctctataaatccaaccacaatgttttgcagctcgaaacctcgtaagcgtagacaaagaggtggcagaaataacaccaggagacttaaagtatgctttttaccgttggattcacccagtttagctaatggcacagaaaatggaattgccctgctgaatgatggtaaaatcacatcttcttctgtggtattcgttgtggcttagaacttcattttacagaagaagatacaatgtcctgattgtttagtttttgtacttctcctcgcattcttcttgtgagggtaatgttaccagaactgatgtacaaaattaatggcatgctacaggaaaccgtggtttaggatatcccgaggcaacagagcttgctggacaatttgagatgactagcaacattccaccagccatagcccactcttctctggacgctggtgctaaagttatattaacaaccgaagctgtggtccctgctactaagacaagaaagttatctgctgagcgatcagaggctagaaggtttgttcatcatgacaccccgtcatcataattaccatacctgttgttacaaatgttcttcctattatggataagtgtttactgtactgccatattaaccgagaaaatttcttccagccacctacttcttcagaaacgccaattctatcattctcacagagtccaggtgatccaagttccttcacctacttcttaggcattttctttaaattgctcatgatgatatcttatcaaagcatacttggtttgttctcatctaaatttgtattttgattctgtatgtatcaacgcaaaaaaattatgtccatgttgtctccgttttattgccactaaccaaaaactgcatgtttcttgtgacaagccaatg

SEQ ID NO: 18047 - DNA, 3003 bp, Unknown; identical to SEQ ID NO: 18046
  misc_feature (1)..( 3003): 2750-1469P.txt file - cDNA_ID_1815117; gDNA_ID_2926167; Annot_ID_139938

SEQ ID NO: 18048 - DNA, 3003 bp, Unknown
  misc_feature (1)..( 3003): 2750-1469P.txt file - cDNA_ID_1815121; gDNA_ID_1621099; Annot_ID_55798
agtctcatcacacaattgtttgcaatgcggttctaacatttatccacttcatattttttttatataaaaattgtttatacgtttccaacacgtaaacacttctcattgtacattttcttttttttttttgctataatgactgaaaccatgcatgaaaagtcttctaaatagaatcgaactaaaagaaaaattacacttaaaaaaacaaattgcaatattttttggttttatttggtttaaaactatgtatgatctagaaaaaaaatattatgagcctaaagtgaattattctgattctatataaatacaaacggtaagtattaagttagaaaactaaatagtcttatgtatacaaatctcttcataattcattaaatatattgtaaattgtaatgagtattttcatatacatagactgatagaagcactttatcgttaaaattgcaaaataaaagtagttataagtgggcataaatgaccaaaatttgctaaaatagattgtttttttttttttttttttggtaggggacactggacagggagataatccaataatgaaatataaacttttgtttagatatgccgtcggtttaagtattctgataatcaccaccgtttttttgcctattccaaatttccacacattttattttcatttcttaatatttatttccttatcatttctttctctcaccaaccaacaagttctcctttctacccatttcgtctccttcattttgacgttttctttagatctgttaataatcccatccatggcttggtctagtcactagtggtgttatctctctgtgtggaataaaaagcaaggttttttaatcacttggattgttttaagatatggcaactttgaacccttttgatttgttggatgatgatgctgaggatccaagccagctcgctgttgccatcgagaagattgataagtccaagaaatctggacaggtttcgagcttgcctgctaagtcagctcctaagcttccatcgaagccacttcctcctgctcaagccggtgaggtttcttctcataaatcaatatttaatcagaaaaattcgatctttattactggagtaagctgtctgtgttattgtttggattctcttgattattcatggagttgtgttttgtcggttgaatgattgagattagtgtatgattagttttgatgctgttgactagtgagagaggcaaggagtgatgctccacgtggtggtggaggccgtggaggatttaaccgtggtcgtggtggttacaaccgtgatgatggtaacaatggatattcagggggatacactaaaccctcaggtgaaggagatgtttcaaagtcttcttacgagaggcgtggcggtggtggtgctcctcgtggttccttccgtggtgaaggtggtggacctggtggtggtcgtcgtggtggattcagcaatgagggtggtgatggggaacgtcctcgaagggcctttgagcgtcgtagtggaactggcagagggtcagtcttattctgttgttgcataatctgccattgaaatgactgtgtcaatctcataagttggagtttatcttttggataggagtgacttcaagcgtgacggatctggtcgtgggaattggggaactccaggggaagagatagctgcgtatgtaattgtttatggtttattgcatttgtttaaaaaagtatgtattaatgtgattgtgattgggaatttggactaaaagaagttttctctggattttaagtgagactgaagcagtagctggtgttgagactgagaaggatgttggagagaagccagctgttgatgatgtagctgctgatgctaacaaggaggatactgttgttgaggagaaagagcctgaggataaggtaaacagagaatagaatagaaatgctaggctcctctttactatactggtatcagttttttttattttcacttattgtttattgacttgtgtttctacaggaaatgactcttgatgagtatgagaaaatactcgaggagaagaaaaaggcacttcaatcattaactacctctgagaggaaagttgatacgaaagtgtttgaatcaatgcaacaactgtcaaacaagaagtctaatgatgaaatcttcatcaagctggtaagacatatcatgtatcatttcttcattgtcgtctattaacttgcgtcaatgattctaaacctttcctttgacctatttcccagggttctgataaggacaaacgcaaagatgacaaagaagagaaggctaagaaggtttaaatcattgtctgaattgaaacatattgtagaaatcaataagtttgcttattgatgtgtgttcctgattgtaaacaggctgtgagcatcaatgagtttctgaagccagcagagggtgggaactactaccgaggaggtcgtggtggccgtggacgtggtggtcgtggccgtggaggtgtttctagtggcgaatctggtggttaccgtaatgaagctgcaccggcaattggagatgctgctcagttcccatctcttgggggcaagtaagatccatccatgataacgtccacactcgtgcatcctcctttaggattttgtgcgaggatttactgtttactggtctctcgttgtcagatgtaaataattaggtgtcgtcgtcagtttttagattttatgcaaaactttacacttgttggtgttctttacttttgaaacagtacactcttcttaattttaccattttactcgttttgtgtttgttgttttcttatttatgaaacatgttttgagacggacatatctaatgttatcgggtttgagtctttactctgtctcctcttttctcattcgtgatcgtgttcatagatgttttagaatcagtaataatttgacatgagttatgacttatgaatgattgtcgaataacgtggttgctattacatataccaatgattctgtaggatttaaacatttttttgtgttctgtcgtaaaccatgtaaaatg

SEQ ID NO: 18049 - DNA, 3003 bp, Unknown; identical to SEQ ID NO: 18048
  misc_feature (1)..( 3003): 2750-1469P.txt file - cDNA_ID_1815121; gDNA_ID_2926167; Annot_ID_139937

SEQ ID NO: 18050 - DNA, 3000 bp, Unknown; identical to SEQ ID NO: 6621
  misc_feature (1)..( 3000): 2750-1469P.txt file - cDNA_ID_1815129; gDNA_ID_1621099; Annot_ID_55794

SEQ ID NO: 18051 - skipped

SEQ ID NO: 18052 - DNA, 3000 bp, Unknown; identical to SEQ ID NO: 6671
  misc_feature (1)..( 3000): 2750-1469P.txt file - cDNA_ID_1815133; gDNA_ID_1621100; Annot_ID_55881

SEQ ID NO: 18053 - DNA, 3000 bp, Unknown; identical to SEQ ID NO: 6671
  misc_feature (1)..( 3000): 2750-1469P.txt file - cDNA_ID_1815133; gDNA_ID_2926168; Annot_ID_140017

SEQ ID NO: 18054 - DNA, 3003 bp, Unknown
  misc_feature (1)..( 3003): 2750-1469P.txt file - cDNA_ID_1815141; gDNA_ID_1621100; Annot_ID_55879
tttcctaataagctcgtttgttatttcagcttctctctttcatttcacacacatacatattggccagtaatgtccctactgtttactctccagttggatgatcgtaccgttgacagatttgaaagagagaaattgcttaaattctgggtaagtatgatctaacacgggttacatatatcttctttgtttctccattcttgtttagacttaaatggttttaacatgctgcagatacaatcattcgtagcaggagttccatacattgtcgttggatttaggtatgaatttgccaaccattctaaggataaactcaaaaagtctaaacctttcgccatttaagcaaatcagttcaagataacattaccatatcccttttcatcttgatgtagagatgatggaggaagactagtacgcacagagagactaacaacgagagatattgcgcatagagccagattgaaaaactattggcaggtaagtgttatcagttctcattacagacatgaatgataagaaacactaatgaatttgggaactagggaggagtgtgcttggcatttgccgatgaagttctttgctggctatacggcactgttaaagaaagtaagttcattttttgttacgtctacatagaacaatggaagaagatcttttaaatttacatttcccaacaatgtgttttgcagacgaagattacatacttcagttcgtgcaccctttcatgagactagagcttcttcaagctcaatcttgtcctgatgccatcactaatcatgttcaccttctacaaaatcctgcatcaccaccaccaccacctcagtaactttatgcttctttagtggagtcataaactgtaatacttagggttcaaaatcaaatttgaaatgaaggtttagattttggatttcttttgtaacattttattaaccaaaaacccaaacattgaaaaaggaaaaaaaattgtgattcaaagattttaaactgggtccaagcagaaagcgagtctaacatgggccgggtctgttttaaactgggtccaagccttctaatcttatcacgtgagcgtcacgtgctctctttttctctctctctctctctccctctggctgacgaatcaccggagaacccaatttgtttcattcctttcccgttttgcccttccctgttcttttattcttttcttatctacaaaaaaaacttcgagcaagaacaaaaaaaaaaaactgtccatgtaccacaccatgagattagttgtcagatagatattcgcgagacgagaagctccaattaaaaaccctagagctcatctctctctccaggtacggccttttcgtttttggctttcaccggcgtggatctccggtgacggggagattcggaatttcggagagattttagatcatgtatagggagagaggtatggttggatcgaagtcggaggtggtcgatcggaaacgaataaacgagattcacgataacaggccttcgcattcgatgtctcagcctgtcaatggaaaaggcaaggtaacatcgacctccgttttgatggggaagcagcaattgcatgataaggaatcttcacgttctggttctatctctaagactaacatttccgacggttagattcgattttcccctctatcgctatttctctatgtttatcgtattcgcagattgtttatttcgagttcttgtcctgtgttggtctcctgatttgggattcaactttcttaaaattgattagaaatttcttaatttgacctattgttcttgaagaaatgttattcattttgttgttaacaaaagctagaagcttgatcttagacgcagtctagttttggttgctgtgtattcattttgcttatatcgagcaaatcattgttgtttgcttaagaacaagttataagaatgatgctgatgaaatgttttgtgggcatttcttgtggtgataatagctgtggatatatcagacacagacagcgaagaatcagaggtcagtggttctgatggagaggacacctcgtggatatcttggttctgcaaccttcgtgggaacgagttcttctgtgaagttgatgatgattacatccaggatgactttaacttgtgtggactcagccatcaagttccttactacgactatgcccttgatttgattttggatgtggagtcttcgcatggtaagtcttacccatgaattattagtatgtaattgtgtgtttttcataatataatagccgaaaacttggttcgtctttcttttcgttttgtgtcttcaatgtttgatttggattgacgggttaacaggtgagatgtttacagaggaacagaatgaattgatcgagtcagcagcagagatgctatatggaatgattcatgctcgtttcatattgactagcaaagggctggcttctatggtaaagaacttttttagactcaagttagatacttaacatatcctatagaacatacactgattgttgttttctttacaatggttttgcagttagacaaatacaaaaactatgactttggaagatgcccaagagtttattgttgtggccaaccttgtttaccagttggtcaatccgatatccctagagcaagcaccgtaaagatatactgcccaaaatgtgaagatgtctattacccacgatcaaaataccaaggaagtatcctttttctaatctcagtggtaaatgcagttctgtgcggttacacacacttagctttactttgattgtcattagataattttatcatgctgttttcgttgctgctatctttggtttttgtcattctttaacacacaaaaaaacagacatagatggagcttactttgggacaacgtttccacatctgttcttgatgacgtacgggcatctgaagccacaaaaggcatcacaaagctacactcaaagagtgtttgggttcaagctacacaagccgtgaaggaaacaaggaagaagaaatgcacccttgggttttgagaaacaagaaatg

SEQ ID NO: 18055 - DNA, 3003 bp, Unknown; identical to SEQ ID NO: 18054
  misc_feature (1)..( 3003): 2750-1469P.txt file - cDNA_ID_1815141; gDNA_ID_2926168; Annot_ID_140015

SEQ ID NO: 18056 - DNA, 3003 bp, Unknown
  misc_feature (1)..( 3003): 2750-1469P.txt file - cDNA_ID_1815146; gDNA_ID_1621100; Annot_ID_55876
tgattaaggtcctaattatgtcaacgtttgcctgccacattgcagaccgaagtactaattccacaccgactggtctacgacatatttaattcataaacacaatactttataattaaattgattcttgtagagatttggcttcatgatctgatttatttagttaataaccatttcaacagataattacagtttagagcctttttccagttgtcaagagtgttatggttttaaaatggcaccctgtaaatatcacatatgttagtggatttattttaccaaagaaacaaaaaatgttaatggattaaaaaacttgtgtttttttagatagcaaaaccaaaagaagatatggtgaccactaacacgatcagtcgaagacaaatgtttcccagactttattattggcgtttccattttgcatattagtcaaattatggagcatcgcaaatatctaataaactaactatataaaaagttattataatacagggttaccaattccgtatattcagaatattcctaagaggtgccattttgactaataaaatggacggatctttgatttattccggaagtgaatggatattagaagaaacaaaagaaattttgaatttcttgtccaaaaaatatttttcccattcttagtatacagaaacatagaaaatatcgtgtatgcttacgtaacaatcaagttgtaaaaagaaaaaaagacagaagataaatagtacagaatgaacataacagaaatcaatctatggaattaggtacaattaggttcggtctaactgaaattacatgacgacagaaaaaactgaactaaacgccgattctattaacttccaaaactgactcgtctcacacgcgcttactatgattcacacgtgcgaatatgccatcatataagcgctactaaaattcattccaaaggaaaaagaaaaataaataatcgatctcaaccgtccgatcatccatcttgccatcaccgttcaccaatcttcttcgtctcctctctctttctctctttttgctgtttctagctcctctctctctggatctcgccggcgaaccgtttctcttgggtggtgagtgttgcttcttatttttaagaatctttttcttttatttccatcgaatttcgtttttttgagtttgatttttggcctgtggaattctcgatgtttctacattgatcgtctggtttcgaatcgtgttttactggtacaattttgattccatctccgtatcttatggattcgaagaactttgtgttttttttttctttcttcattgatgctactttgctagggtttacacttttttcttccatggtaaaaaaatttgagcaaagttgttgagattcttctagactgttttcaattttacgtttcacaaagatttttttagatgatttgtttctaatgaaatggcattgtttgtgttctgtttccatatgtgtagattttgaaaatatgtttgtgatgattgtgcagtaaacagtagcaatcaagctatagaatctcagatatcgctgaattagctgttggattttatccgccttttcttcgttatccggggctcgggtataaggtttcatcgtcttatttcatctgtaaatgggctgcttccactcaaaggcagcaaaagaatttcgaggacacgaagaccctgttaagcttgcctctgagacagcttgtaagtttactcgcgctataagtttaaacctcctctagattcatttctctcaaagctgcatgttcatttgttttctgatatgagatgagaatcatcagttagattcaaatcattctttctctgttcactgatttagtttatctccggtttggatttttttagttttgtgttttggagtctttgtctgcctaacaatttctagtaatgatccttcaaagttggttaacactctatctcatgtttcttgttaccaataccatcaccttaatcttgttccttaacttgtcaagacgagttctctctccatgcaaattctaaatgtgaattattagtctctttgtttgtttgtttgtttgttcctggtaattctttgttttgatctcgtagtgttgcttgtttttttctcttttccagttagtgtgagtgaggttgaagcattatttgagctattcaagagcataagcagttcggttgttgatgatggtctgattaacaaggtacaaagtttgtttcttttgacccaatttggatcttttcatgaccccatcgttgtatctttttgttctttacgctattcatctacagtatttttcaacttagttgactttatttgagcaataattattcttccatgacgatatgtctgttccatattgcatcgattcaatgtatcgtagcccttaatgtttgacttgaacttaacttattttattgattgctttgattttgaattttgaagccttcatggcccaccttgtttatgttgttttttaatcctggcttcacatgtatgcaggaggagtttcaacttgctttgttcaaaagccggaagagggagaatatatttgctaatagggtaaaatcttaattcttcaggcttttacaagattcatcttctggaagagtgatctaaaccaagataatatgtccattatcctaaacaatattgcttttccgcagatatttgatatgtttgatgttaaacgaaaaggagtcatcgatttcggggactttgtaagatcactcaatgttttccaccccaatgcttctctagaagacaaaatagattgtaagttgacataagatagtttcatatataggtgtttattgaagcttttgtgaagagatttattgattctggtctgccattttttctcagttacgtttaggctttacgacatggactgcacgggttacattgaacgacaagaggtaatactaacttgcaagctttgaatactagtcatgatagatctttgccatgttcttgagtattcatcttttacttaataactttgcaagaaatcgttaatg

SEQ ID NO: 18057 - DNA, 3003 bp, Unknown; identical to SEQ ID NO: 18056
  misc_feature (1)..( 3003): 2750-1469P.txt file - cDNA_ID_1815146; gDNA_ID_2926168; Annot_ID_140012

SEQ ID NO: 18058 - DNA, 3000 bp, Unknown; identical to SEQ ID NO: 6698
  misc_feature (1)..( 3000): 2750-1469P.txt file - cDNA_ID_1815172; gDNA_ID_1621100; Annot_ID_55869

SEQ ID NO: 18059 - DNA, 3000 bp, Unknown; identical to SEQ ID NO: 6676
  misc_feature (1)..( 3000): 2750-1469P.txt file - cDNA_ID_1815172; gDNA_ID_1621100; Annot_ID_171373

SEQ ID NO: 18060 - DNA, 3000 bp, Unknown; identical to SEQ ID NO: 6698
  misc_feature (1)..( 3000): 2750-1469P.txt file - cDNA_ID_1815172; gDNA_ID_2926168; Annot_ID_140007

SEQ ID NO: 18061 - DNA, 3000 bp, Unknown; identical to SEQ ID NO: 6676
  misc_feature (1)..( 3000): 2750-1469P.txt file - cDNA_ID_1815172; gDNA_ID_2926168; Annot_ID_199292

SEQ ID NO: 18062 - DNA, 3000 bp, Unknown; identical to SEQ ID NO: 6678
  misc_feature (1)..( 3000): 2750-1469P.txt file - cDNA_ID_1815179; gDNA_ID_1621100; Annot_ID_55867

SEQ ID NO: 18063 - DNA, 3000 bp, Unknown; identical to SEQ ID NO: 6678
  misc_feature (1)..( 3000): 2750-1469P.txt file - cDNA_ID_1815179; gDNA_ID_1621100; Annot_ID_171371

SEQ ID NO: 18064 - DNA, 3000 bp, Unknown; identical to SEQ ID NO: 6681
  misc_feature (1)..( 3000): 2750-1469P.txt file - cDNA_ID_1815186; gDNA_ID_1621100; Annot_ID_55861

SEQ ID NO: 18065 - DNA, 3000 bp, Unknown; identical to SEQ ID NO: 6681
  misc_feature (1)..( 3000): 2750-1469P.txt file - cDNA_ID_1815186; gDNA_ID_2926168; Annot_ID_140000

SEQ ID NO: 18066 - DNA, 3000 bp, Unknown; identical to SEQ ID NO: 6690
  misc_feature (1)..( 3000): 2750-1469P.txt file - cDNA_ID_1815193; gDNA_ID_1621100; Annot_ID_55857

SEQ ID NO: 18067 - DNA, 3000 bp, Unknown; identical to SEQ ID NO: 6690
  misc_feature (1)..( 3000): 2750-1469P.txt file - cDNA_ID_1815193; gDNA_ID_2926168; Annot_ID_139996

SEQ ID NO: 18068 - DNA, 3000 bp, Unknown; identical to SEQ ID NO: 6687
  misc_feature (1)..( 3000): 2750-1469P.txt file - cDNA_ID_1815209; gDNA_ID_1621100; Annot_ID_55853

SEQ ID NO: 18069 - DNA, 3000 bp, Unknown; identical to SEQ ID NO: 6687
  misc_feature (1)..( 3000): 2750-1469P.txt file - cDNA_ID_1815209; gDNA_ID_2926168; Annot_ID_139992

SEQ ID NO: 18070 - DNA, 3003 bp, Unknown
  misc_feature (1)..( 3003): 2750-1469P.txt file - cDNA_ID_1815216; gDNA_ID_1621100; Annot_ID_55851
gaagtctacttcggtctgaaaaccggacaaggtcttttggagttcaagtgcaagagcaagattcacaagcagagatgggttgatggggttcagtctcttctccgccaagtaaattgctttgaggctgccaaatgctcgctgggatctctgaatctcactggtcacacgtgatgcaggatcctgtatatatttgattatattcatatatataatatccaaatttttgctgttgtgaggtatttgcaaaacctggcaatgtaacctcagaagacttttggataaaacaaagcaggttgttcaaatgatcacaacaagtgttaggaacattgctatgtacagaaagacatcagaagaatgatgaatctcaattgaactttttatttccaatgattcagtttctatgaagagtcaaaaaattgtagagaagtggtatgtatatttttgtttgagtgagaagttcatatgaagaatcacgtgagagacatgtcagagatattcatatagaccgtattagaatacgacagtcctttgtgtcccataaggcaatactcgcagttcgcagtaagattttatagctttcatgagacactttttctcaaggtcctctgatttctggacaaagctcctcaaattgtctcggtgggaaactctctcaacctgtaaaaactcaaattgagacgcttctgaagaacaatgcaacactcaaaacaaataaactagttgggagatgaatcaccatttgctcaatgataggacctgaatcaagctcctctgtaacaaagtgagttgttgcaccaattagtttcacacctgcatcaaatgcctaccaatacaatctagtaaagtaagagacagggacgaaaacttgagacataaggacgagctaaatataaacctgtttcacgggatttcttcctttgaatgatggcaagaggccatgatggatgttgattacatcttttccataacctttcaagaagttaccggatagtagctgtcaaaggaaacttttccagtaaacatcatccgtcaatataataactaatgctaagaaatatcttttgttaataaagctgttcctgcaaagaagcataaacacaaagcaagaacagtctgaagagaagatttgattcattttggcgcaaacaaagtgtaatgagactattcaagacaaagaaaacgagcctaggatggaacttaaaagctgatatacctgcatgtatctagcgagaactagaaaatcggtacccttaaccaattccaaaatctcctcttctattttattctgatcggttgttggtaaataatgataagagatgccatgcctctggagaaacctcataacatgggtgtttggagctctttcatgattactgaagacaccaaatattccggaatcactagtcataactaatatatccatttagttcgttggaagagatatatgcaaaccttatcacacatgttatatcaacgggaagttttccatcctgccatttatgtaacatttcaaccagacaatgatcctacaatacaaaagaatcacacaactccaggaaaaagaaggcacagaataaaaaggatcttctttatgacataaaatttacctgtttcgacagtagaagagctatcttgtatttggggtctaaagagggcactcgtactactgagctcaaagcactaaacttttgtgcaatagtttgaaaatcttcatccatctgcctcctcggccattttactggatcaaatataaactcactgcccaaagaaattaccttttcatcacaactaaacccaaaaatagaaacttttaactgctccaagcttttagtattcactttaaagacattgattcagaaagaatctattgaagtaacatcaaaggtaagatttttcaaatgggaaaattggaaactttaccttctagagtagaagacgttcttgttctcaggaaccaaaacatcataaccaagaatgttacctcctttagcagcaatacaatctgaaagtttcgctacaatcccaacgacatcctaaacttcaaaaagaaaaactggattcagttagattaggaccaaaagaaattatggggagacatcaatgattattggattcatatacgtaccggacaatggaagacgtggaagccgggaatgagaagaggtgagacagaggaatcgagggactcgccgtgaaattgagaagatttaaaggaccatttggtaaatgatctaaaagctgtggcggagagacatgaggtggtggagactcttcgtatcattgccgctatttcttgtcgcactcttttgaatccgactcatccgtcgttataaacattctcacctttttatcgttagattatgtgtttgttattcacatatcattctgaaattttagagcataaactcaaaactctacaaaatagagtgacttcactgtttacttcgtcgtattaaaaaaagtttattatattttccaaattgagcaggaattgtttttgataaaattctcatttttatacatataataacaacttttctaatgaaattattttatcttcatactctttttccactcctttcaacaaaaatagttaaagatgtatttcattatattatcaaatgggaattgcttaagtaatgttcatttcctaaattatacaccattttatggtcatttacccaaattgcaaaaaaatatctttgagcagccagccatatcctccgaaagcttccaagtttaatttgtacaccacaaaaagataaaagaaccaaaaaagtaacatcttcttttccagatatggtctgtagtctgtgctattttgtaaatatgactccatactagatttgtgtccctcaccaaatcggtctcatcctagaaacataccatttgcacacaaattattcatacagatataaccgtacaatatttgagataggccccatcgacgtcgtttagctcaaagcaagaagggagagagagagtcagcgagcttcgttaatg

SEQ ID NO: 18071 - DNA, 3003 bp, Unknown; identical to SEQ ID NO: 18070
  misc_feature (1)..( 3003): 2750-1469P.txt file - cDNA_ID_1815216; gDNA_ID_2926168; Annot_ID_139990

SEQ ID NO: 18072 - DNA, 3000 bp, Unknown
  misc_feature (1)..( 3000): 2750-1469P.txt file - cDNA_ID_1815220; gDNA_ID_1621100; Annot_ID_55850
ttctgctatagctatagacaaatacattcaattttcccaatttgtgcagaaatactatccatgggccatggcacagaaaatttcaccttcctaacggtgctataacatctatccaccagttccgataccccaaccatgccatcggctgccaatttgttgggaggaacaattatcacagaaggatcatagaaacgcaacagcgtcttcgtgttttggtatgagctgcttgtctctatatactgagatagatgcagtgaagccgatcttaggtcaaaagcagccattccaacctgaacagagaaatccaaaatcgaatccaacatcacaatcgaaatatcaagcgagaaacaagattttgaagctacgatatcgatcccagaaatcgccgtcgcaaaatcgatacccaaagagaacacaaatcatatcataatcctgccaaatccgagcaatggagaagccgtacctacctctttggctctgttctcaattaggccggcgacgaaactcgatctctctcctccgtcgtcttccattttcgctccacagatcagaatttgaaaattgagtgaaaggtacacgagttccgaaaatgaaggcaaaagcgcgccactgtgaattctatcaatcggtttggactccaccacgccgattttaatttggtaaaccggcttcaatgaccaaactgtgctgagggtttccggttcaatttacttggtttgtgaaatccagccaaaatcaaacatatacatttgttggattaattctttgtttccgatttaattaattcaattttcaatcgacatttttatattttatatttgtccaaagaacattaaaaacaaaaaaattagagaattaccaaattaaaatttggtttggttcggttattttggttcaacagagtttgaatctgtttctattatccggattgtagagaaattgaggggctgtttgatccagttccattgccaagcagtacaaataagttgctatttcaatttattggcttatcttataacaacagttgatgatcactctcttcttacaataaacagtgttgtatggcaaacatttgaacggtaataatacaaaggttctattttagtttatttacctatctgacagtcacaaatcacaagacctcgtcaatggttacatagcggcgctcctgaatggagagctgtgcagcaactcccatggcaacagccatcaatccgtcttccaaatcaacagctgctattccttcacctctgattgctgataagaaggtgaggtgttccaagtaacttgacccgtgatgcaacccttcatatctgaataaaccaacatcgtgtgatgcgatgtgagactataatacattgttaagagtgtaagacgatatgtagataaatatagcttactttattctttcatcttctgcttttattgtttgaacgtgttctcttcctccaatacgactgccagatcgaactataccctctggaacaagtgcctccccctgcaacatgcttgccacgtcagttgaaaagaaagcaaaaggacatattgacaaaactcaaaactcatggatcatatgaacaactccaaagaaatagtcttgagaacactttatgctcatcttccatctatatgcaagagcatgtagatatgccatgtgatttgggaataaatggaaattatgtactcttgggaataacgtcgaatggttcagagaagtcaataaaaaagaaagaacacccagctctgtttttttcatatcaaacctaaaatcctatcacactaagcgcataaataagcacacacacacacaaaaatggcccataatatttcaaaggaactcacctttccaatgtcaccagtaacagaaatttcttgctcgtttttgcttccttcagcaaacatgcaaagatcgagcatcccacgacatccattgtcaaactcaataataacatatgcgttatcaattatatcaggcacctatataacagagaaacatctagtatgaaactcgcaatacgttgattgagtgtaacttgggataaaaatgtacctttccaccataaacttcatccttgtggttcacatccatgcctccagaagccatcacacagacaggatttgcaccggcaaagagcctcattagatcaaagaagtggcagcatttctccactaaggtccctccagtgttcacattgaatctattccagttgttcacctagtgatgtgttctctcagcaatcatataaaaatgtgaagcgtaaacactacacatagtcccatcttgtttaagcctaccttaaccaagaaagggaatctatgttctcggattgctaccatcttgacattaccaaagtctctgccttttacttgttctattagcttagcaactggcggcatgtatctgtactccaacccaacttgcaccaccatatctgaccttttctttgcagcctccaaaacctgattccagacaaagttggatgaattgatcaatttggtaccaaacagaaaagaagagaaaaaagacctgtttgcaatctgcaactgtggtgcataaaggcttctcaacaagaacatgatgcggttttgaataattgataatgtccataagaatctgatgatgagtcatatttggagaagagacaacaataacgtcacacagctcactcttgagcaactcctcgtgtcctgagaaaaccttaaccacaacaaagtaaaaaaaaatctcaaatcctaagctcttccacaatcaaggtatgaaatttttttatcaagtacaaagactaggaatcaaacaattatgcaccagaacattatatagaaaacacagcaaaagggtccgctctaagtaagtcctaactcctaaggttgattgttctggtaaattcaaaataccttaagctcccatccaaaagattgagcgagttcaatggccaggagctgtgaaggagggtgaggatcggcgatgcaaacgacggcgaggccttggtcacggagatg

SEQ ID NO: 18073 - DNA, 3000 bp, Unknown; identical to SEQ ID NO: 18072
  misc_feature (1)..( 3000): 2750-1469P.txt file - cDNA_ID_1815220; gDNA_ID_2926168; Annot_ID_139989

SEQ ID NO: 18074 - DNA, 3000 bp, Unknown; identical to SEQ ID NO: 6666
  misc_feature (1)..( 3000): 2750-1469P.txt file - cDNA_ID_1815228; gDNA_ID_1621100; Annot_ID_55847

SEQ ID NO: 18075 - DNA, 3000 bp, Unknown; identical to SEQ ID NO: 6666
  misc_feature (1)..( 3000): 2750-1469P.txt file - cDNA_ID_1815228; gDNA_ID_2926168; Annot_ID_139986

SEQ ID NO: 18076 - DNA, 3000 bp, Unknown
  misc_feature (1)..( 3000): 2750-1469P.txt file - cDNA_ID_1815232; gDNA_ID_1621100; Annot_ID_55846
aatagcaaagagagttcagggacaaaccccatgattccactctcatcacctttatggagtttatcaacttccgtagatactttacaatcaagtagcgttcagagaggttcagctgctactcaccagccattgctttctgcatcgcatgctcaccaaactccaccaactcagaatattgttggacataataccccttggatgtcgcctctccctttccgtaacgcttggcttgcttctcagcaaaccagtggatttgatgttggttcccgtttccccgtctatccaatcactgaccctgtaaaattgactcccatgaaagaatcatccatgactctttctggcgcaaaacatgttcagagtggaacttctagcaatgtttccaaagtgacaccaacacttgagcctactagtacagttgtagcacctgctcaacattctacaagggtaaaatcaaggaaacggaagaagatgccagtctctgtggagtctggtccaaacattttgaattcgttaaagcagacagaattagctgcctcacctcttgtgccttttacacctactccggctaatctgggttataatgctggcaccctgcccagtgttgtttctatgactgcagtccctatggacctggtatctacgttccccgggaagaaaataaaatcatctttcccatctccaatttttggtggtaaccttgtacgtgaagtaaagcagagatctgtcttgtcagaggatactattgaaaaacttaaggaggctaagatgcatgcagaggatgcatctgctcttgctactgcagctgttagtcatagcgaatatgtatggaagcagatagagcaacaaagtcatgctggcctccagccagaaactcaagacagattagcttcggctgctgttgccatagctgctgcagctgcggtggcaaaagctgcagctgctgccgccaatgttgcagctaatgctgcattgcaggccaagttaatggctgaagaagcatcccttccaaatgcttctgatcagggactcccaaagtcatatgatagcatattacccggtcagggtacccctgcttctatcttgaagggtgaaggtgcagtggtgaactccagttcggttcttattgctgcgagagaggcatctaagaagagggttgaagctgctacagcggccaccaagcgtgctgaaaatatggactccattgtaaaagcagcagaattggcatcagaggctgtttctcaagctggaatacttgtttcaatgggtcatcctccgttgctcaataagctggtggaggcgggtccaagtaattactggaggcaggctcaagaatctcaggaagtacagccctgtaaaacggttgtcttagaaaaagaaactgtgtctactagtgagggaacttttgctggtcccaaaattgtgcagactgagtttggtggctctgtgaatacggcagatggtgtgtccggtccagttcctgccactggaaagttaaagggacaggagggtgataaatatgcagacttggctaaaaacaatgatgtggtttttgaaccagaagttgggtcaaaattttcaattgacgcccaacagactatcaaagcaacaaagaatgaggacatcaaggagggttctaatgtagaggtttgtgctacatttacactgtctataactaactgctcgtggttgattgtcattttttttaacggagataaatttttttgaaggttttcaaagaagaacctggattaagaaccgcatggtactctgccaatgtattgagcttagaggatgataaagcttacgtgttgttcagtgacctatctgtagaacaaggtttttgtatttatcatcaatggttttctttaaatcttatttatcatcaatagatcttttactgctcaaattcttccaagtataagtaaataggttatgcaatcacccattttccattattatattatatgcatgtaaaattatttaaaaggatgcagaactgattgccgaagctcctacgaagaggctccattgctttattaattgattggttgatcgtttgatattatcttttatcaggaacagacaagcttaaggagtgggtagccctcaaaggggaaggtgatcaggcccctaaaataagacctgctcgttctgttactgccttgccatatgaaggaaccaggaagagacgtagagctgctcttggggatcatatttggaaaattggggatagggtagactcgtgggtgcatgacaggtagtactgtctccataactagctgttttattggtctcccctaacagggatcagacaaaaccacaaaatctgtatatcaatttcagttttccgttttggaaatcctattcattccacgaagtttggaactttgatctatatttgttttgtttttcttcagttggttggagggtgttatcacagagaagaacaagaaagatgaaaacacagtgactgtgcattttcctggtgcgtaaaaaggccaatgtgcctgatgaatatacctcatttttgtgctctaaactgcttgtctgatccactgttctcaaaacgttcttattttctaaaacatatttctgcagcggaagaagaaactttgacgatcaaagcttggaatcttcgtccttctcttgtgtggaaagatggaaagtggattgaatgttctagttcaggagaaactatcagctcgtcacatgaggtattttcacccttttatggatctagagggttctcttttggatgctttggcattttgtgagactcaaaaatttgaattgcagggtgatactccaaaggagaagcgtcctagattaggaactcccgctcttgtggctgaagtaaaagacacgagtatgaagattgttgatgatccagacttggggaaaccgcctcagactggtgttcttaacctcggtgtttcagagaatacttttaacattggaaagagtaccagagaggagaacaaacccgatccactccgaatg

SEQ ID NO: 18077 - DNA, 3000 bp, Unknown; identical to SEQ ID NO: 18076
  misc_feature (1)..( 3000): 2750-1469P.txt file - cDNA_ID_1815232; gDNA_ID_2926168; Annot_ID_139985

SEQ ID NO: 18078 - DNA, 3003 bp, Unknown
  misc_feature (1)..( 3003): 2750-1469P.txt file - cDNA_ID_1815244; gDNA_ID_1621100; Annot_ID_55843
atttgaacttggaggtaccatctcttctcatgattcaatccaaagattgtctctttttgttttgttatgcaattgttcaataaagagattgtctttttgtttaggcgaggaaagatgctacacaagttgttgcaaatcttcagaggcaacaagtcaattcacgtcttattgctgctgattatcttgaatccaacattgatcttatggattttctagttgatgggtgagtttaggagatgtaatcatgtagtttgaggttgcattatggattttgttaatggctcttttaagattttgatcatgaggtttgttttatcattcatatgggtttctgtgatatctctcaggtttgaaaacaccgatatggcgttacactatggtactatgtttagagagtgcatccgtcatcagattgttgcaaagtgagcaaatcttatattttctttgattacgagattaaatcctatatgtttcaatccataaagagacaatctctatcgaatttatatagtgaaaactgcttctctttctatggttcagatatgttttggactcggagcacgtgaagaagtttttttactacatacagcttcccaatttcgacattgctgctgatgctgctgcaacttttaaggtttgggaacactgcgacatatttggagttccctcataatcacgatctgagtatatctctaatacatgccatcataactccagttccgtgattattttcttgcaggaacttctgacaaggcacaagtctacagttgctgagtttctcattaagaatgaagactgggtaagttctcttacaatgtaccaaaccataaaattttgcttgagagaaaaattatcttgaatcaatctggtatgactctcagctgttttgatttacagttttttgcagactacaactcaaagcttcttgaatcaactaattatattacccgacggcaagctattaaggtagagtaacttagaggagtgatgatatcatcgatggttaatcacgaaaaagatagcagtgacagagcattctgatggattgtaatgtgtaaaattttacagttgttgggcgatatattattggataggtcaaattcggctgtgatgacgaagtatgtgagctcgatggataacttgaggattctgatgaatcttctcagagtatgatgctttacccgccataacattaaattcttaatttctggctctgccagacagagttaatattggaaacaaactgaaacctgtggtcgaaaactctcaaatgcaggaatcaagcaagactattcagatagaagctttccatgttttcaaggtatatttcttgtactctaaatacatggagtaaatttacccagtgaaacataatcatcagtcagacgctttggcaattggatttttcggattttttaatgtgattgtagtctgagttttgataataaagtcatgaaggggcaaccaaagttcactgatattgttgtttctgtacagctgtttgtagcgaaccaaaacaagccttcagacatcgccaacattctggtggcaaacagaaacaagcttctgagattgttggctgatatcaagccggacaaaggtataggacttgtgttatatgaagccttgtatcaccagagaatggatctgattctcaccgtaaaacgagtttcttatatttatgattcatgtctgttatgtggcagaggacgagaggtttgacgcagacaaagctcaggttgtgagagagattgcaaaccttaagctgcgagagcttgcttgagcatgcacatatacacagaagctcatgatttctgttaatctttgaaagacatttttggaccatcaaagattgttgttatttattaggtactgtttcttttctctctctcagcatctacgctgttgactactctggatttttttagatcatatgaattcacatgtacactcctttagtgttgatcaaataaaaatggcattataaatcctaaatcatgaatgtaaaaaatcatcattgcatatgggaacagatagataagcagataaataactgtgtctctatgcacaaagagaaaaggaagcaagtctgttgctaatcttaagcatactgagaccgagtgccgttagatgctccatgctgagccgttttagcctccagtttccttcttttaatgactacataccaggtgaaggcttcgagtagggtggccacaatggcgagaacaacaatgataccgatgtaggcatttttccactgcttcttgggactcaatatgcctagccctttgaaaacgttcaccacccctaggatgattatcgtgtagccgatcgtgtggtggtaaatgttccagtagagcctatgcttgtgctctggttttggcctcagaaacatcgcaaacacctaatgttttcaaaacaaacgattaactggtgttgaaacctatatattttactggtttcccttttgatgtgaagtgtgtaatgtacctgaactgtcgctagagagaagagagcgatcccgatggcacggtgggtgctgtactgaatccctggtgagtcgccaccgagtttgagaccagtggcccatccggcaacaccgatgatgtaagcagaagcctggcagaaacgtgaatgtagaaccaagcagggtctgctgatttggctactctcaagtatcgagcaatgattgcccctagtggcatcatgattccccagctcactccattcaatattccatgaatctgccaaccatttttttaccaaaatcaatcattattcgttgttgccaaataaaaaattagggaaagagatgtgtgtccacaaaagattcaactcacattgcgtttgcgaagcttggaacttcctccagctcctcctgcagctgctgaaacaccggataccagattgagagttgacactgatcgaacattgttgccagaagttggatgaggcagaagactgttcccagacattgacccatcttgccacactgtgttaatg

SEQ ID NO: 18079 - DNA, 3003 bp, Unknown; identical to SEQ ID NO: 18078
  misc_feature (1)..( 3003): 2750-1469P.txt file - cDNA_ID_1815244; gDNA_ID_2926168; Annot_ID_139982

SEQ ID NO: 18080 - DNA, 3003 bp, Unknown
  misc_feature (1)..( 3003): 2750-1469P.txt file - cDNA_ID_1815247; gDNA_ID_1621100; Annot_ID_55841
cttgctcgctcaagaagttagtgaaagctgtaaacgaggcattggtctatgtcaacaagttcgaagaggtcttagacatcgaaggagagttagctaacagcaggaaagctgcagaagttgtttggttaggagttgatctctaccataaatggctcaacgtggatcttcgaaaactatccaagcaacatagcaaaacaccacaggaagttcttaaagagctggtagatatagcacaaaaagagtttacagagtcatgggagaaaaatcggatactatgcatgaagcataagccctcgcactggcccatcaagactcaagcagcaaactcaatgtaccgaatcagccaaacccttttgatgaagtacgaattcaagaaacatttgaaacagaggagactctgttgaaagatgtggaaaagatggtatcggacatagtatcaggatgcttttgcaacacggcacaagttattggaatgaagtgtttggttacagcagtggaagtgagggaagcgtcggtgagagaagcggcaatgcatttggggagaacagagaagatacttgagatcgtagacaggagatgcatgcctgctttgtctcatcacaaagtggcaaagattgatgaatggagagagttttataggaccaataaatccatcactttcactcatccttcgtcccagtgtacgacccgtgaactcattatcacctagaataacacattttcttgtcacatttaaagaattaattacgttttgtacatgataaaccctaattagcaaataaaatcctttctttgtcggttgatctaactattaacacttgatgccaagtctaaagagtttattagtttttaaaacccagtttaccaataataagtttcctttgtcggttgatgcactagtcaaactatcaaagtcgtcaagtttgctttgttgacaaggcaaagctactcttccaaaacattgatccattcttctggaaatttgcaataacgtctcaagaccaatgcaagtaataatttaaccatgccatgttatcaacaaaagctgcttctctgatttctagagtattattttttaaccattattgaagtttgaagatttcttattattgctaaatggtaaaaccatcttgaggggaacaatttgataaaactgtgtgctgcttcctgtctccgaccaaaacatgtttaaaattagattcggaccaaacaagttgtcaatttttagtacaaatcaaaggttcaaatgtcaataaataatcattacattttaaaatttcgaaataaaaggacaaacatgtaaaaaccaaaaaagtgaagcactgatatttgtcatttctgcctataaaatgtacacttcccactcacacggtcacagaaaccaaattcgaagaagaaacagagaatcatcaaatcaaatccctaaaaattgatttttgaaatggagaagaacgcatcgacttcgtcgttgaaggacttgggtccgagtggtctagatctaaccagcgcctttttcaaaccgatccacaactccgatccttctctcccttcaaaccgacgtaccaaagtctccgtcgtcggagtcggaaacgtcggaatggccatagctcaaaccatcctcactcaagatctcgcagacgagatcgctctcgttgacgccaaacccgataagcttcgtggcgaaatgcttgatctccaacacgccgctgctttcctccctcgaactaagatcaccgcttctgttgattacgaagtcaccgctggatctgatctttgtatcgtcactgctggtgctagacagaatccaggcgagtctagactcaatttgcttcagaggaacgtcgctctcttccgtcatatcattcctccactcgctaaagcttctcctgattctatattgatcattgtttctaatcccgttgatgttttgacttacgttgcttggaaactctctggctttccggtgaatcgggtgcttggatctggtactaatctcgattcttctcggttccgattcttaatcgcagatcatctcgacgttaatgctcaggatgtacaggtcagttccaaccaaaattagggatttttgttataaagctgtgatttgttttggttaaacattgcgattaaggagtcattagctggatttaatggtttagtatgataaaaatctatgctttagtggttttatactgtattgttgagaagatcaattgaagagcaaaagtgtgtttggattggttgttgtaggcatttattgtgggagagcatggagacagctcagtggcattgtggtcaagcattagtgttggaggcattcctgtcttaagctttttggagaagaaccagatagcttacgagaaacaaactcttgaggatatccaccaagctgttgttggtagcgcctatgaagtgattggactcaagggttacacttcttgggccattggctactcagttgctaatctggctcgtactatcctccgtgaccagcgcaagatccacccggttactgttcttgctcgtggattttatggtgttgatggtggtgatgttttcctcagtcttccggctttgcttggaaggaatggtgtggttgctgtgaccaatgtgcatatgactgatgaagaggctgagaagctgcagaaatcggcaaagactatattggagatgcagagccaattgggactttgaatatccacatctatatatgcatcaatttcaattttataactagtatcccacgggtgatagtgtcgatgttgatcactatatgttatgtaaatgcttgttcatgcagagtaatcccaactttgagttctattttgaaatagggtatttgcttacaacacacttgagttaccacttaccagtaatgtgaaaatgcgtggttttggcatgaaattattgtgcatattgcaaggcaatcgacacaaacattagtatatcaaaaaatatgatgtgtagaaaaaaagaaaagaaataaatttcttttaaaaaatg

SEQ ID NO: 18081 - DNA, 3003 bp, Unknown
  misc_feature (1)..( 3003): 2750-1469P.txt file - cDNA_ID_1815251; gDNA_ID_1621100; Annot_ID_55839
tgaggtttccaggattactatcaggctttatgggcttcgttgttttggttaagtaggagatttggatctgacaatggctttcgatgaaattggcttgttcgatttgaattctgcggaggatgatagatctgagtgaatcgaggaggttacggatgatctagaatcgtaggaattgtagcgagacgccattattgatggaaggttcaaaaaagattaggatctgtgaatttgaaattgaggaagaagatgaagcagagggaatttggtttttctgtttccaatgtcccactctcttcttttcaaatttcgtattctctctgttctaaaacggacttttcatctgtattgggcctaactatgggctttaaaagtttaacggcacttttgtgtttatttgaattttgttattctgtttattcaaataactaaatactaatgagataattaatcatttgctctagaaaattagaaccagcacatatctacacttttagctttcctttcatttttgtgcatttttttcctttctaatttggacttttgttacttccttcttttttcttaactgtaaaatgacatatacaaagtgaagagactttcatgttccttttttggggggtttatggacgagcattttgtatttttgtggacagtaaataatagcgaagaagttggcgttgattgaggcaggcataaaggaaaagatggaatgaataatgaagttggctttggtccatattgtagaacccaaagcctaataaccgtacactaagcccttacatacatgaaacgctgaattgtcattggtagaaaaggaaatggaagagtagtagtaaggaattatatcagttaataagagttgtaatgtgaatagaacacgtaactggactagtatgcatgtgtatgagaagttcaaatctttaactctcacaatatcgtcgaagacaattgtttaggataagatagaaactaaatgagcatttaaaatttaaagaaaaaagggaactgtagagttgccttggcaggaggggaaagcattatcatgaagaatctggtctacaagaatgggaaatggacagatgtatctgttcaccaccaatccatcttcataactcaagtggtccctttctctcgacccatccacgtctccttcatcacaagtaagaccaaattaagccaccatttggtgtctgtcatcttctctttaatgctctcttttgttctttctttataaacacaacaagacatgaaaggtttttgggaacttgtctgagttccaatgcggctgctgctatcatctgatccccaacccgaacttacgtctacatgtacctctcatagttgcggctggaagccttactctcattccaatgactttgctgccaacgcgttcctccttctcatcatcctcttctgttctttcatatgcgtcctctctctccacgctgctatccgttgttgcctccgtccagtcctccaacatgtccctaagcccgacccggaccttgaggccacccatccagacgctcccccgacacttgtctactccccgggcctaaacctagcaggcaatgaagcagagtgcatcatttgtttgtctgaattccaagacggtgacaccttacgcgtgttggagagatgcaaacatggattccacgtttattgcatccagaagtggctctcctcatcccattcttcttgtcccacttgccggacaaacatcttctcctccccacctcaacttcactcacaaagcttaccactaacgagtacaccttagtcagatggtagctagttcctggtcttgcccactttttttttatctttattttctttacaacttcacaccactatcatgttttacaagttagtttattttttacctttctccttttatattccatgaaatttgcacagtctaaaattgatatgaagtcacttttgtgaatcatcatttacaacgtataacaaacaaagaccaatgtgtaacgaagcaataacaatacctcataatatagagggaccaaaggctttatttaatgtcggagttcaagatatatgaggtcttgactggtgttaggtacgttcccacttgttggataagataaagaaaagagttgttactagataagataatggataaatatagaggatgagaaaaaaaaatagaagtggaatgacgacgactcacattacgagcattaactccattgcccattggcatggaatgattctagctagcagtaggagaaaattccaagtgcgtgcaaagttcttcaatgaattcctagaccccctaaccagagtcatggatgcaatactggaaaggcaagactatgctcgctgcatattttcaggttgctgacatgttcaagctcaaaacacaatcaagcgatgaagttagaggagaagatgattgaacaactttgatctggtctcaaaggtcaaagccatgcaatatctcctcgtatgtactacattgttctagatagcctaatgatgcacatcgtgagttatgttaaaaaactatttttagaaaaagttactgagagttctggacaaaaagttcagggtaatgatatttaaggtgacaaaaggtaggagatgttactattcacaaaaaaaaattaaagggttatcttgtaatgcgacttgttcatgttagttgttgacaaaaaaatagactgttgtagattatttgttatgagggtaggagtaggatcgtgtagtggagagacgaacacgtaagtagaaagaaagagccttgttattagattagagctgtgttaatgtgtgaacgcaaccaacagttcgtttttgaacgagtctaactagagacaagtcaaagcttatgactttgagtggacactggacagagctagtaacttctttgaagattctgaacaattttataacatcaagacacgactctgtcgctctctctctccatagaagaagacgaagaaatagaagaatcgagagagtgagacaaatctagtgatg

SEQ ID NO: 18082 - DNA, 3003 bp, Unknown; identical to SEQ ID NO: 18081
  misc_feature (1)..( 3003): 2750-1469P.txt file - cDNA_ID_1815251; gDNA_ID_2926168; Annot_ID_139978

SEQ ID NO: 18083 - DNA, 3000 bp, Unknown; identical to SEQ ID NO: 6660
  misc_feature (1)..( 3000): 2750-1469P.txt file - cDNA_ID_1815259; gDNA_ID_1621100; Annot_ID_55836

SEQ ID NO: 18084 - DNA, 3003 bp, Unknown
  misc_feature (1)..( 3003): 2750-1469P.txt file - cDNA_ID_1815270; gDNA_ID_1621100; Annot_ID_55832
taaggattgaaaagaaaaagaagcagaaggagttaccagtatcaccgatgatgatatacttaaatctataagcataagacattgaagtggacgaatctgaatccgtaggttcagacaaaaacgaatcccttcttctcctgatgggtaaggtcaagaatccgacaatgtcttcacttttaacgtttttgaatgtttctatagagtcttagaaacttctagattgtgtcacttagagatttggtgtctcaccattgggatgattgtacaatgattggagattgatgagtctgttgtgaaggttgatacgtgccatttcttttcttcttaaataaggcaatagcctcttatttggggtcccatgatttggatcaaaaaaaaaaaaaaaaaggtcctttgataaaatttaatatataattaataaatttcaacataacaaaaagtacaaaaatatagaaaattaaaaaaattatcctctattatttttctagttagctaaattaacaattttaaaaataaatgataatcaatttttagtgattttataattttaatcataaaatagataaagatctaacaaaaaaaagtttaataatgattggcaaaatttagttaaaaatcttaatataaattttgcctcaggcctccgaataacttgtcatagcccttgtaagttgtaagataaaacagtttcttttgtttgtgactttggctttttgttccttttctcaatttgcatgtctttctggtccaatattatgattgcttgagctcattttacccccttgttcaatttcgttgtcgtctgttctggttcacactcaaagacggttggttttccagcaaatccagagaaatatcaacctgtattgtcgaccattgcaaacttgctggcgtttcagtatttggtaggcttttatttgaaagacaagacagcacgcggaacaaaagccaatagactctagtaaagaagaagaagaaatcatgtgaaacaactgcaaaaacctagacacgaaatagcgggaaggagggctttgttaaacgagtaaaccatgaaagacatggaaggcatcgttcatcatgacaaaagctaaagggattactttatttgttgtataacacggtaaatggaaccacatgcagccaatacaattttctccacaaacactgaacttaccttcatgatatgatttatatccttactaccttttccagtacaatgcaaatgggctacattcctacctccattagatccttacgcaaacacatcttaatttttagatatatgaataggcatacacgtgtattgtcaaaccgttccaaaaccaaccacaacacagtcaccaaatcgaattccaaaacgatttacaactatagaaagaagcagagacatttttgctatatcatatgtgatcatttttacataatgacatagacatatttttcccatctcagccgcagcaccctcctccttgcgaggttgatccatctcttccacctgatggtcctggaattcctccatatccaactttgattccatatgactcatttgacacatcaaacacaccatcttgaatcttcttgtatattgttgcagctgtcttaatgaatgcctagcaaaaaatcacaacaccagtcgaaatcatgttaagtaattgggtaattggcaaatataccacattggaacgtatgggggtttacctcctcaacattctgagcagtcttggcagaggcctccatgaatataagaccgtgctcctttgcaaactgctctccttcctctgtactcactgcccttctgtgagcaagatcacacttattcccaatgagcattatcgtcatatttgcatttgcatgctgccttgcatcttctagccagctagctagatggttaaatgtctccctcctgcaaaaaaaacggaggtaaaaaatatcgtaagtgtcttgactgaaacagttataaattcaaaaacacaaatctaattctggttcagatctttaggagtcgaactccaatctagaaaagaagaataacgtctagttactacttacacaaaaaaaataatttgcttccctgatcaactctacttttgataaacatacagaaagaagcaaatgatttaccttgtgatatcatagacaagcaatgcccctgcagctcctctatagtatgaccttgtaatagacctaaaggattcttgaccagcctgtcattacagagagatattagccaagacaaaggatatgaaacttcagaatagccaagtcgcctagtcaaagaaaatcaaagcatatatgatgatgtgcacaaaccaatccaggtattcatgaaaacaagatagagatacatcatgaaagttgaagaagtaaggagaaagagaccgtatcccagatctgaagcttgataggtttgttatcgatggtgatcatcctagccccaaattcaacaccaatggtaaggtcatgcaccggctgaaacctcttgtcggtgaactgaagcagaagacatgatttccccactcctgaaaatcagaatcaatatacaaaaatcaacatcaccaaagcttctctcgacccctaaatccactaaaaaaagttggatatgacacagattcagatcaattcgcttttcaattttcgcaacgaaacatatataggttttgatcatctcaattccaaatggattgaagaaagataacgtagcagagaaggagttaccagtatcgccgatgatgatatacttgaagagataagcataagacattgaatttgaagaatcgaaaaatccgcaggttcaggcgaaaaatcgaattccttctttaagacgatgatgagaacgagaagagaagagaatctttttttctctataaagacggagattgacggtttgttttccagcaaatccagcgatgcatcaacctgtattgtcgccaaatttcaatctctatgtcgtttcctatttagtaaccgcactgcttgacgtttatttaaatagaaaacgacatg

SEQ ID NO: 18085 - DNA, 3003 bp, Unknown; identical to SEQ ID NO: 18084
  misc_feature (1)..( 3003): 2750-1469P.txt file - cDNA_ID_1815270; gDNA_ID_1621100; Annot_ID_171330

SEQ ID NO: 18086 - DNA, 3003 bp, Unknown; identical to SEQ ID NO: 18084
  misc_feature (1)..( 3003): 2750-1469P.txt file - cDNA_ID_1815270; gDNA_ID_2926167; Annot_ID_139971

SEQ ID NO: 18087 - DNA, 3003 bp, Unknown; identical to SEQ ID NO: 18084
  misc_feature (1)..( 3003): 2750-1469P.txt file - cDNA_ID_1815270; gDNA_ID_2926167; Annot_ID_199235

SEQ ID NO: 18088 - DNA, 678 bp, Unknown
  misc_feature (1)..( 678): 2750-1469P.txt file - cDNA_ID_1815270; gDNA_ID_2926168; Annot_ID_199252
tttgttatcgatggtgatcatcctagccccaaattcaacaccaatggtaaggtcatgcaccggctgaaacctcttgtcggtgaactgaagcagaagacatgatttccccactcctgaaaatcagaatcaatatacaaaaatcaacatcaccaaagcttctctcgacccctaaatccactaaaaaaagttggatatgacacagattcagatcaattcgcttttcaattttcgcaacgaaacatatataggttttgatcatctcaattccaaatggattgaagaaagataacgtagcagagaaggagttaccagtatcgccgatgatgatatacttgaagagataagcataagacattgaatttgaagaatcgaaaaatccgcaggttcaggcgaaaaatcgaattccttctttaagacgatgatgagaacgagaagagaagagaatctttttttctctataaagacggagattgacggtttgttttccagcaaatccagcgatgcatcaacctgtattgtcgccaaatttcaatctctatgtcgtttcctatttagtaaccgcactgcttgacgtttatttaaatagaaaacgacatgcagtctgtttataaaaataaagctgtaacctttaaaaagttgctatctttgcacccgagagagagctcagtgaaaaagatg

SEQ ID NO: 18089 - DNA, 3003 bp, Unknown
  misc_feature (1)..( 3003): 2750-1469P.txt file - cDNA_ID_1815276; gDNA_ID_1621100; Annot_ID_55829
aaacatatcaaaaaatgggtctaactgagtttataaaactattggaagatgaattcaatgaagaaacttagtcccagaataaaaacaataaatattgtatgacattgagtaagatgactgatagagaccatgaaaacaagtgaaatactactcgtgagcaaatggaatagaaaaacgaaaagataactaatgcactcaagtagatattgtttaggttagataggatatatataagaaaacacacacacacaaaacacaccttgagtttgactgatccaagaaatccagctttaaccctcacaggtaatttcaaagcattaagtgcttctggttttagttgcatatttttcagctctacatctcctgcgaaatcaagttaaaccacaagctatattaaccaaatggaaaaaataaaagcaaatttattgacatgggtatgctaaaaccttctttttatttaatcatctgttcttagtaacaactgtgagaagtaactaagcaattataagtgaacaaccagcacaaaccaagataaaccatgagcgaagaagctataaagcctgaaagcaagcagcaatcctacatcattttaatcatgtaatatgccacacgggaaattgaacagttccgatcaactaaaacacccaacacatgcctgaaaaaagaaacactaaactcaaaaatccagaagtgtgactattgacttctccgtttaatagctagctacccgaatataactcgaagagaacccaattccataaatcgcagtcaatcacagcacacaaaacctaaccagttctcacattcgttcacaactcaaaatcgctactcaatagcacatttgaactttaaactcaaatccggacattacacaaaatcagcgagaaaatagaaacaatctaaccttgccaaacactgatcttaagagcttccttattcaatcccctcacatagttccccaagtacctttgtaacaagtaagctacctgatcttccaacatctttgaactctgcaaatcaaaattctcaccgtaaaagggaaaaaacaaatgtaaaatcaataatcgtgagaagagaatgaaattctcaaagagttcgatttcgatcggactagaaacggaatcgaaggagaggcatgaggatcgtttcctcaagagcacgcaagaggcggttggaaatgtgaaatagtcatgactcaatgacttgggggagagtttcggctctgtaaaaggaatataaaaatatctgctgttgatgacggtgcagtgcagtgtgttgctgtgttgtttatcaattgtcgacataaactttattattaaaaagaaaaaactaatcagtaactgaactaaaccaaaatttaattaagtttcaaaaataatttaaccggtggagaaattcctataccatataaaccaattagataaatcggatttacgcagcctaatttttgattaatcgaactaaccgaaattactaaaatatatcatttctagttaaacatatacaaaaagtttcttaaaatatgaagttttttaaattataaccaactaaaatctgaatcaaccaaaattatatacaaataggtgatcgaatttaattgaatagacgaattatgtgaagttgctataatatatcatgaattttgattggtttttccgctataactcgcaaacttgtgaacgattgcgattgttagcatttaaaacatatttagaaatttactttaaattattttgcaccactcaatatcgctaaatttcaaaatctcatttctagaaatatttgcggttgcagacgatagcggctagtcacaagaaaaaagaaaatcacataagcgacaaatacttagatcatatatatatatctatataaaaaaaaatcatcaaaatcatagtatcaattcaaactgaagaaagacaaaatatgaacataagtattgtaaaaatattgtcgatcttgaagatctacgaattcaaaacacaattttttttgtagtttgtcatattacttgatgtagtttttggtgatcaaccaaatgcatgaagtaataataaacatatcactatgatatttatttgttttttaataattttgtactactttatttatggtttttcttattagttttttttttttattaaagtttttcttattaattatgtttaaaaaattaatatttaattataataatataaattttgcacttagatggtcattggatgtatgtaaaaaaaaaaaaaaatcattggatgatctttaaatttgtatgtttttgttgttaaccattatatttattttaatttaaacatttcacccgtaaaagttaaaagtttatgtttttagatatttttaagctttacaggtcagtctatatcaggccacctagtgagctggagaagaaaggaacagcaaactcagaatgaactaaaaaggtcgagatttcttgatagcgcaatgaccacacagaccagagttcgaaccttcaaaagggaaatatataatttgtttcttagtttctcgagtatctaccacctcgagatctgaaaatctgattctacctttccattttctttctcaaaagtcgtggctttgagaatagttttttcctcttcttctcatcagactcggtttcctagttgactcattttcaagatctgggcatctgtcatttctttaataaaagctttctttttttatttatcccttttgttttcagctgctggttgcttgtagtaggtatagttttgggtggccttacttgcttttcagcaaaagctgggagattgagatttcttcttcttctctctctttagtctttgggatctgcgcatttctcagaaattatatgggactctcgaaagcatgatgctttttgttgtctcacttgtaatttgttcgggactttgttgctgaagaaaactaagcaatgtctgtagaaacatggttcatgattcagaagactactactagctcatgagttcactggtacttggaattaagatg

SEQ ID NO: 18090 - DNA, 3003 bp, Unknown; identical to SEQ ID NO: 18089
  misc_feature (1)..( 3003): 2750-1469P.txt file - cDNA_ID_1815276; gDNA_ID_2926167; Annot_ID_139968

SEQ ID NO: 18091 - DNA, 3003 bp, Unknown
  misc_feature (1)..( 3003): 2750-1469P.txt file - cDNA_ID_1815282; gDNA_ID_1621101; Annot_ID_55895
atgggctttattccaactttcatttactatgatattgtcctttttgagcttatatcttcaagcccgcaaagatttgttattgggttcctttccaaaagacctcatactagttggagttggacttgacttatatattaaaaactctttttctaaactttcgatgtgggacatttggtttgtacccaacaatttgtagctgttttttacatttaaatattctcaaaaatacagagagcatggaatttaaatacatatactgtaataaacttacattttcaaattcaaactaataaagctgaaaaaaagtagtgtaaactttgtggcacatgttttgtcaaactgatgttttagttttatatcaccccattacatgtatattcgtcatagtctttcagttttgttacgtttttaaatatcttataacgtattaatttttaataactttaaaataaactatctaacaaaaaataaaaaaatagaattagtgtccgtgtgcttattttacctgcaagtacgggcatgaaggcaagggatttgatagatagccaatacgaacacgcatcacgtgcttttctaaacgcttcgatcactctgaagacgccacgtgtaaaaatctagccaaatagagtcagaacttaccatgtgggcacgtgcgattcccgcagctctaacatctatgtatgcctccatgactccatgtgatcatttgagccaatctaaatatattttgcgtattctttttcagtatacacacattggatacgaattgattttaaattttttacacatgatagattgttttgtaaatataataatactaatattatgtcatcgaaatgcaccaagtcgttgtttatgataagatcattaatggaccgattaggtcttaattaaccaatattttgtttcacggaaagcaatatgacaaagcacgtattaattagtgaataaacaatagccaatagcttggagacatgaaatacaataatgaaccgaatcacacaagacttagtctatattattttctgaaacatgaaatcatcatgttagttttacagtcaagaaaacaatgcgtctataaatttatttcaaatcaaaatcttatatagtaaatgttgacaaaagaaaatcttatattacatatgatcaggattttttcttttcatcaagtatctgttaaatagataaatatagagaaagatgtgatgggcggccaaaggtcgtcgtccgggagaagcggtcgtttgatagctgcaaaaggattctctttgctcccaaaaagcttcgctggcaaaacgtcattgtttgcttctcccttaatctatctttcctttattctcaacttcaatacaataatatagttatatacatacaaacgttttgacccaatgagatatacaagtaccaacattggtatatatgtttaactcggagatgcatattatcgggttaagcttttttcaacatcgttcgtctaatgtttgtgatggataaactcgaaaaattatatatgcttataattaacttatgatattaaaatgactggaattattgaaacttttaacccaattttaattagcacttaaatttgtacactcattgtcaattaattttggattaaaatcatatagtgttcctataaacaaacatattttatcactgatcatgatgaagtttttttcgcattttaaacaaaaataaaataaaaagagcgttaaaaggcctaaattacgtacttgtccaacggcccattgaaagcaaacgcaaggatccataatgacctttatttgggctgagatttatcattgtactgtaatttgactattttccaaggaaaattaagtccctttttatgtttttatttatttgaaaaacatgacaaaacaaatgcaatccacatggtccaacgaaagagcgatctagttgaaatctaactaagttcccaacgaaaccactgttaatgtaactttacatggcaaatatctttcggatatcaaggcccatcactttcagctcttctgtttttcatttttttcccaaaatttgtattgtttaatattcctagatttcaaattgtaataaaattttcatttggcataagaaaaaaaaataatatctttttctacatagaaaataatatatataatatgagttcatacaccatacatgtgtgtctatatacatatatatagttttgtaatgtatgtatatctcgaattgtagccatatgtaggatgattatctaaaatatatggtcataatgtcacagtgtaaagctactctagtcatttgtcagattctaacaagagaatcttagtaatgatcacgcaaagctaagatctttgcttcaccatttaaagcaaacaaactttgtcttaaccttacataggacatcaaagtcacaaccaactttttcctctgtaaatcttcacctatttatataaaatgcacactatttttttatttataattgggcttcctatattaattaaatgcatagcaatctatgatttaatgtctttttgtaacaaagtaccaacgaagatagaagaacacacctaaaagtgtagagttctataaagacgtaaagtttatgtaaatttctgaaagtagctaaatatatgtaagtaattaatagaaaatgagatttcatttttacttttctaacatatataagttactaaaatatgtttgcactggatttaatagaaagaaagtatattatatttgcaaattttgaattatacatgtgataatcaaaatgtgtgtgctcttacactcagtaaaatttattatggtaaaatttctttcatttactgaaaatgatattttgaagataagtgacctatctatgtatatatttcgggtccatctttatatttattattgaatttacatcattatccaccaaccccatcttcttcttattcttcatcttctactgagatttctctttttttttcaaaaaaaactcatccttgaatgaacggtggtgcatggatg

SEQ ID NO: 18092 - DNA, 3003 bp, Unknown; identical to SEQ ID NO: 18091
  misc_feature (1)..( 3003): 2750-1469P.txt file - cDNA_ID_1815282; gDNA_ID_1621101; Annot_ID_171436

SEQ ID NO: 18093 - DNA, 3003 bp, Unknown; identical to SEQ ID NO: 18091
  misc_feature (1)..( 3003): 2750-1469P.txt file - cDNA_ID_1815282; gDNA_ID_2926169; Annot_ID_140030

SEQ ID NO: 18094 - DNA, 3003 bp, Unknown; identical to SEQ ID NO: 18091
  misc_feature (1)..( 3003): 2750-1469P.txt file - cDNA_ID_1815282; gDNA_ID_2926169; Annot_ID_199354

SEQ ID NO: 18095 - DNA, 3003 bp, Unknown
  misc_feature (1)..( 3003): 2750-1469P.txt file - cDNA_ID_1815290; gDNA_ID_1621101; Annot_ID_55891
tcaaataaataaaaattgtaagcaaaacctttaaatgttctaagcttgacacgtggagttaaaacagacgtccaagtagctttctcactatttcaaagttggttggacttttttctcatgattattaaatcacactcaaaagagaaagaaatataaatgactcgaggccaaacaccaaaaaaaagtcttcaaaatataattttagaaaatcatatgattatgttgacaaaaagaaaaagtaaatcgtatgattagtgtttctaatcttcttaagaaaatgattacgtttgttaaagaagagtttgggtgatgattttatactaaagttagcagtttgtgtgttttctttaatcattttttgtaaagaaaattaccaataatgttgacatgatatcatatatcactaccatctattggaaatagtttatagaagaataattaaatgaatcgacaagaactcacacatatacgcaaattgttatgtatgtgcacctaatgtagatttgtaggcattatatggtggggacgtgttaccatttatattgacattaatgatggtattgacacttttgtggacctaatcatgatacaaacatacatcaatgctgcttatataatatacttatatgtctatgtcgcgcacacacacccacacatataaacggtgggaatttatcgaatgatatgctaatcatttctgtatactaaacgtacaatgtctcatttgtgtatgtatatgtaccgatgtacgtataaaccaatgtatatagatgtatagaccagagagacctaatatacatggaaaaaattcttactagagttaataaaactgatgaacctagcgagtcactgagacatgcgagaatctctcctttttgaatgaactatatatagtctaatcaataacatattaataaatttacggcaatttgcaccaatttgataatctaatcatatattctttgtcgggttgataatctgaaaggacattataaacaatgagaaatataaatcctattatatacgaaagtataaacaaatcattcctttcgaatcttgacaaccaataaatcctaccctaagagatttaattatatattgattagagaaatgtattgtattcttcgaaacatatgctcatgagcacggacacggtatattgttttactgatcatcggtttaaacatttgaaattttgaacttactatctacatatgtcttcggtgaacaaacctttatacggattgataaataatactcttcgaatttattaatcttattaagcccacttggcgtgagaagaaggtatataaatactaatagtagttgaaatatactacaataattactaaagtaactgcagtagttaagatttaatttaaccatagtcaacgaaatcgacgctgatattgatatttattggaatttcgacttgcgagcctcttcacatgaatttaggctttgaaattagagttatgatcattgaagttaatgtagcgatccaagcttattattttaatttttaatagcatttctagtagtagtagatagtgaatttaatttggactgtccaatttcttttattaatacatagctgatattatgtattttattgaatttaaatttggattttaagttacgaaacaaatacaaatttagaagtttcatattgattaaaaaaacttattgctatccaaattatattaaaaaaaacttatagctatcgttttataattcgaaaacaaatttaaactaaacattatattatattaccttcattttaattacatatttacctaatgactattccagcaacaatgacatcattagttcaattgctttaaccatttgaattcttatataacaggggagaaagacaaattaaactagatacgaactgtgttcctcaatcaacaaagacatcaagagatttgttgtcttttcactcacaaattattaaagttaaacatcaaaattattatttatagaaaacgaccactgatcaacattaatatcatttttttattgcattattctaatgcctagcttattttacacacccaacaacaaatctatcaagtttctaattcccaaccttaaatgatgcgtattagtagaaaccaaaagaatgtgattaaatagtatgttttaatacctttgtctcctatgtttggttataaccacttgtaaatatatcttcctaaaacatttagtcacatgaactaagataaataataatgttgtttatgcttatggatgctttgtatatatctatatttaaatccccataataaatatttttacaaaaaataaaagagaaactagtcacataaaaagaaaaaaaagaaaaatttatgtagcaaaatataaaaattgaaaaagttaattggcgtgtattttctttaacaaaattcatatttcgacctttttttcttttataaatattgtgtactcattgtcatatggactatcaattacttccattacatgattggtcataaaaaccagaaaactattgccgtatggagagaaagcagagaagagaatcttccaaaaatgttaaatcttgtgaaacaaataaagcatagcaaagcaaagtccaaagtccaatgagctaaaacaaaatcaaaaaggtttctttatgtttttttttttgaagtaagaaaaaaaaagagtttataaagaaacagtggagaaataaatagcagaacaaagagaaagatcggagaaaagaatctttttaggctctctctcgcagacttcgcactcacacactcacttccattgctccaaaaaagtgagcttttttcttcctttttcctattttcctgatcatcttctttgcatcttatgtaactgtagaatctgactaactttcagtaacccaaagttttgttttttattttcattttttcctccagctgtgtgttctgatcttgcttgtataagtgtaagctctggcttaagcttttttttttttagttgttctaactataagacatg

SEQ ID NO: 18096 - DNA, 3003 bp, Unknown; identical to SEQ ID NO: 18095
  misc_feature (1)..( 3003): 2750-1469P.txt file - cDNA_ID_1815290; gDNA_ID_2926169; Annot_ID_140026

SEQ ID NO: 18097 - DNA, 3000 bp, Unknown; identical to SEQ ID NO: 6707
  misc_feature (1)..( 3000): 2750-1469P.txt file - cDNA_ID_1815301; gDNA_ID_1621101; Annot_ID_55888

SEQ ID NO: 18098 - DNA, 3000 bp, Unknown; identical to SEQ ID NO: 6707
  misc_feature (1)..( 3000): 2750-1469P.txt file - cDNA_ID_1815301; gDNA_ID_1621101; Annot_ID_171423

SEQ ID NO: 18099 - DNA, 3000 bp, Unknown; identical to SEQ ID NO: 6707
  misc_feature (1)..( 3000): 2750-1469P.txt file - cDNA_ID_1815301; gDNA_ID_2926169; Annot_ID_140023

SEQ ID NO: 18100 - DNA, 3000 bp, Unknown; identical to SEQ ID NO: 6707
  misc_feature (1)..( 3000): 2750-1469P.txt file - cDNA_ID_1815301; gDNA_ID_2926169; Annot_ID_199341

SEQ ID NO: 18101 - DNA, 3000 bp, Unknown; identical to SEQ ID NO: 6703
  misc_feature (1)..( 3000): 2750-1469P.txt file - cDNA_ID_1815321; gDNA_ID_1621101; Annot_ID_55882

SEQ ID NO: 18102 - DNA, 3000 bp, Unknown; identical to SEQ ID NO: 6703
  misc_feature (1)..( 3000): 2750-1469P.txt file - cDNA_ID_1815321; gDNA_ID_1621101; Annot_ID_171415

SEQ ID NO: 18103 - DNA, 607 bp, Unknown
  misc_feature (1)..( 607): 2750-1469P.txt file - cDNA_ID_1815321; gDNA_ID_2926168; Annot_ID_140018
aaaaaaaacaaaaaaaaaaaattgaaaaagaaaattgttaggtagctaaaaccctcaggtactacaagattaacgaatacatctacagattattcatctggaacatgcaaatatgtgatgtatcgactgatctaaaatggattagtttggttgaaagacggtttggtttagttaggttggaagggtctttgggaagagtgttacatcgttcacatcttttaattttgattcagtctctaaattatactatatagtctatattgcaactgaagaatgattgaaagagtactagtactaaggaaaaaaatagaagtagatgcaaaaaaaaaatggtaacattagtgtgaatcatgcatataatgttgaaagctttaaaaagacccacaagtctttgtaccctttcgtccccctcccctctaaaacctcatcttccccatttatttctcccattctttctccttttctttttcagttcttaattcatacttgaaaaaatcaatacattttcatcatcatcagcatcatcatttcccatatacacaaacacacatgcatgcccttattatctgataatgaacgcataggtctcttctctgatagctcaatg

SEQ ID NO: 18104 - DNA, 607 bp, Unknown; identical to SEQ ID NO: 18103
  misc_feature (1)..( 607): 2750-1469P.txt file - cDNA_ID_1815321; gDNA_ID_2926168; Annot_ID_199308

SEQ ID NO: 18105 - DNA, 3000 bp, Unknown; identical to SEQ ID NO: 6703
  misc_feature (1)..( 3000): 2750-1469P.txt file - cDNA_ID_1815321; gDNA_ID_2926169; Annot_ID_199333

SEQ ID NO: 18106 - DNA, 3003 bp, Unknown
  misc_feature (1)..( 3003): 2750-1469P.txt file - cDNA_ID_1815328; gDNA_ID_1621102; Annot_ID_55916
ctgaccagatagatgattcgaataatgagagatatgatcttggggtccattcctgaataaaaactccaagagttgatgtgagacattagttgagtgatgcttgatatgagccttgactctggctttcgtccctcctctgcgtcaacgaggtcgtgtatttgattaatgagtgatgccatctccgaatcctccgaatcctttatttccttgaggatacgagatattttataagtgactgacgtgagcctccattgtgactccgtgggatccaagtctgtagagctggtgatagagataattcgagtcacgagtgataccaactgtgactctggtccagaaacaaccttgctgagagagattatttgcctaacgagtgatgtgatcttcggctcctgcttcggctctgaattcgaatccatatccagtgattcgatgagaggaataagttgattagcgtatgctatgaaatctcttgccacctcttgacacatatcctcacctcttaatgtagatatcattttagaaatgatatagaacatgagctccgactcccaattcatatcatctgtatagccgtagataagatcatctttttcttcttcttcggtggtgagaggcggcacttgttggttattgatgagcttctgttcctccgtctggacgagactggccacctcagaaaggagtgaaaagagctccgattcctcgtccattgccatgatgagagcgaatatttgagaagtgagtgacatgagctccggctctgactccttgagatcaaaatctatagagccgatgatagagatcattttagtcaccactgataccgactgcgactctggtcctggttctgaaacagagttgctgacataaattatctgcttaattagtgatttgagcttcgactccggctccggctgcgaatccaaatccagagagttgaccagagagattagttgacaagtaagtgctatcaactttgacttcagctgtggtgtatgtgtgtcttccccaccgcctaagatagataacagttgagaaataagagatatcatgagctccgactcggaatccatagagaaagggattgtttgaatattgatgagtggtatgagagatgattattttgagtataagaaacttactgctctctgtatgtatatatagaactcgtagcttgtcggatcacgtgacaaaacctcaaagctgtccgaatactaagtcaagccatcaatttatagagagataataatatctcaattatataacgactagaaatttagcatcagatgtgaggcaaggtgggcctatcttatttcatattttattcgaaaacaggattgccttattaatgatcgtgtactgtttttagttttggtcaaatcatttaaacgataaactctgaattttgatagcgtcatgaacgttaaacttagggttttccacatagtgtgacataggtctatttttttaccgaacgtagcttgcgggtctttctttattatacataactggaaataattgaagcagtacggcattacaatttagtcacgtcgttcgaacgaaaagtcaatgatcgatttttagagataaagatcctctaattaacaatttatatttttcgagtttctagactacattaattaagctcatacgtatattaccgttaggtcggcctgtgcacctttcacatttttattgaagaagttatgattaacgaaatggtaatatatatcattaacaaaggataatactaatatgtttgatcaagcagttacagtgaaccagcggtaaagtagagaaatcgtcaaacaaacacttttgcatgtcgatttctgctagtgatattaaagatcatggaatctgattatgtggtaaagaaacagctcaacaaaggtttgaaataattagttaacagtagacattgacttcatctaacgaaagaccaaatcaaaaccactttcaacaaccacaatgtgtagaattacagcagtttcgtgactaatacgcgacaagtgttaattttaaaacggttctttagtaaacattaaacaataatcttccaagtggaggaatacttgatatttgttcaatcgcatatatcaacttttgagttctataatattgttcccgtagcttgtggattttgtcttggtgtaatgcttaatttgagatgattactaaaaccaaaagcatgagatcatcttaaagtttacaggcgagcgcaaagtcaatgaaggatttaaagattagaaacctaaacgatgttaaaaggtcatgacaatttatattcgagttatttaggtcggtttatgggaaaaaagctgaaaaatctccatttaattttaatttgcctatttaatatccgtgctactaaatttgtccaaaatacctaaattagtttttatgtcttttaaatatttttattttttattttttttgacaaaatcagacatccgaattaacgagcgttaacagtggtaacaaaatcgttatttgcagttaaaacttaatcatgtgatgtttattagttatatacaattgttttttctaatgcatacgaatatatcgttttagtcaagtagttatatgagagtttattatcttcatgaacacgagtacgagtcccatatccgatgtttttttgttgcacttgatacttgtcttgaaagaaaactgtcacagaatcacaatctacgaaattccgagagaaatatctaagtgcaccacttagaaacgtagtggcctattagctcagttggttagagcgtcgtgctaataacgcgaaggtcacaggttcgatccctgtataggccacattttttggctttcattttgatcagactaaaacgttgtcgtgtgtttcagcttctttttttttttttttttttttttaatccttttttccggagatattttgttttttttttcaattttacggatatcgttatctgcttctcacactaacacggcgaagcagaaaaagagctcgaaacaaaaatg

SEQ ID NO: 18107 - DNA, 3000 bp, Unknown; identical to SEQ ID NO: 4613
  misc_feature (1)..( 3000): 2750-1469P.txt file - cDNA_ID_1815328; gDNA_ID_2926189; Annot_ID_140922

SEQ ID NO: 18108 - DNA, 3000 bp, Unknown
  misc_feature (1)..( 3000): 2750-1469P.txt file - cDNA_ID_1815340; gDNA_ID_1621102; Annot_ID_55912
cagtggttacagcgactcagatgcttgagtctatgatcaaatccccacgaccaacaagagcagaagctactgatgttgcaaatgctgtcctcgatggcacagactgtgtcatgcttagtggtgaaaccgcagctggagcatacccagagcttgctgttcgtacaatggccaagatatgtgtggaagcagagagcacacttgactatggagacatcttcaagaggataatgcttcacgctgcggtccctatgagcccgatggagtcacttgcttcatctgcggtcagaaccgctacttcctcaagagccactcttatgatggtcttgaccagaggaggcagcacggcgaggctggtggctaagtatagaccagggatacccattttgtccgtggtggttcctgaaatcacgtctgactcttttgattgggcgtgtagcaacgaggcaccggcaagacacagtctcatctaccgtggtttagtcccggtgctgtatgctggatcggctagagcctcgatcgacgagtcaacagaagaaactctcgagttcgcgtcagagtatggtaaaaagaagcaactctgcaagaccggagactctgttgtggctctcttccgtacaggtaacgctattgttatcaagatcttgaccgtcaagtgatcccatttgcgtttgagttttgccggtgtttcttagcgttttggatgtttattcatcatggtgactaatcttgagatgaaactcaaagtctcttttgtttctttttttgtgtgtggctcccacacactacataatgttcttggatcatactctggttacaagtacattagtttggtacgagtgcaattgcataaacaaagactattttttgaatatattttacaaaaatgtgtgatcacatttggctcgtgatcacacaactttgggattcgtatttggagataatgcgattcatgcagtcaacaaccatactcacagtcacatgcctctccctctcaacataaatacctgtgttcatctttttatattttactaaattaaaagggatacttttaacggaaacccaaatgatcatcagatattataatacaaataaagaaaagattccattcctcgaaagtgtttatttgttatgcagtattcaacaatctgagtgaacaagattttatgtactataagctgaggaatagcagtttacgagttctcaccgagatgagatgaccccgaggccgatgcggatgacgaagaggatgaagagaataatccgctgaacggccatggaaaagagaaccttctctcgctcacattactgttccttgcatcatcttccacattctcattacttacgttgatctctagagttcttgttctcggtcttacaggattaaccttggtctcatcatcaggagggagttcatatcggcacacgggacatgaactgtgaagctcgagccacggtactatacaccggatgtgaaacttgtgcttacacggcatctctttagcttcacttcctttgtcaaaatcatccaaacaaatcgagcactgcaatgattcacttatcttaaccgttgggagattatccacaacttctttacgtgctggaagactcccgtgcctgattgaatcattatcagctagatgttcaagcaaatggtctaaactggatccaacaaagtaatctccaattgcagaaagagaagtattgttccggttttgattcaaactcgttgaaccctgaacaacagctgattgatttaacaggtctcgatccgagctctcatactcagaagcaatccctgcacgaataccctgaagcaactgcaatatagtagctgagcttctccgtctcctcctaaggatagactcaaactctctgtctaaatcaatctctctaccttgttgcctgtggcgatgacgacgatgatgatgtcgatcaatatcgacgctgtcatttccatcaacatcatcagatacattgacctcatcattatccacaccaaactctgtcctcctaaaccttctacgtctacgaggattactcatcattccaagcaagattggaccccatagagacaatgcacggtctgtaccaaaatcaatctcagggtcttgaacctcccttagactgctactgctgccgccattaatctcacggctcatttcctcgacaaacccgctttggcaaaaggggcatttgatctcggcaccaataactggattcaccatttgtgaacacatgtgacaccaatacctagctgacattgcctcttcctccttctttccttccccacccaaacctctcgtttctgaaacaaccagaagaacaacaaaaaaaaaaacatgaagaagcaaacctataaagtttcgacctttgtttcatcagatctaaataaagagaatggtattcccaaaagtttcactaaaaagaggataatatcatcttcaccaacatcattagctcaagtttcagacaacaaaacgcaagctttctatgcaaatgcgaataaacagatcaaccaaaatttgcctctataaagagataacaatagaaatcagggctaatccatgaaaagaaaactctcaattctcatggagtaattaaaacaaaacaaatacaaaaacaaaccttgtaaatgttcttacttttggagatccagagggaagaaatgtcttcctccttcttttagatctccacgaagataaatgagagcttttttatttgtcttcttctgcagaaatggtgggagacgaagaaaagaggaatgaaggaggaaaggaagacgaagatgaagacgaagaaaagggaatgtaatgtatagttcgcagacccaatcttaaagcccattaaccgcaaactgatatataaaggagccgggtctatcttaaccatttaaaaccaacttctaatttggaatcaaattgaaccgaatcgaaccggttgaagttgaaagaaggagaaaaggcgttgtctccgtgcgagaaaggcaaatcggagacgatg

SEQ ID NO: 18109 - DNA, 3003 bp, Unknown
  misc_feature (1)..( 3003): 2750-1469P.txt file - cDNA_ID_1815340; gDNA_ID_2926189; Annot_ID_140926
agccagtggttacagcgactcagatgcttgagtctatgatcaaatccccacgaccaacaagagcagaagctactgatgttgcaaatgctgtcctcgatggcacagactgtgtcatgcttagtggtgaaaccgcagctggagcatacccagagcttgctgttcgtacaatggccaagatatgtgtggaagcagagagcacacttgactatggagacatcttcaagaggataatgcttcacgctgcggtccctatgagcccgatggagtcacttgcttcatctgcggtcagaaccgctacttcctcaagagccactcttatgatggtcttgaccagaggaggcagcacggcgaggctggtggctaagtatagaccagggatacccattttgtccgtggtggttcctgaaatcacgtctgactcttttgattgggcgtgtagcaacgaggcaccggcaagacacagtctcatctaccgtggtttagtcccggtgctgtatgctggatcggctagagcctcgatcgacgagtcaacagaagaaactctcgagttcgcgtcagagtatggtaaaaagaagcaactctgcaagaccggagactctgttgtggctctcttccgtacaggtaacgctattgttatcaagatcttgaccgtcaagtgatcccatttgcgtttgagttttgccggtgtttcttagcgttttggatgtttattcatcatggtgactaatcttgagatgaaactcaaagtctcttttgtttctttttttgtgtgtggctcccacacactacataatgttcttggatcatactctggttacaagtacattagtttggtacgagtgcaattgcataaacaaagactattttttgaatatattttacaaaaatgtgtgatcacatttggctcgtgatcacacaactttgggattcgtatttggagataatgcgattcatgcagtcaacaaccatactcacagtcacatgcctctccctctcaacataaatacctgtgttcatctttttatattttactaaattaaaagggatacttttaacggaaacccaaatgatcatcagatattataatacaaataaagaaaagattccattcctcgaaagtgtttatttgttatgcagtattcaacaatctgagtgaacaagattttatgtactataagctgaggaatagcagtttacgagttctcaccgagatgagatgaccccgaggccgatgcggatgacgaagaggatgaagagaataatccgctgaacggccatggaaaagagaaccttctctcgctcacattactgttccttgcatcatcttccacattctcattacttacgttgatctctagagttcttgttctcggtcttacaggattaaccttggtctcatcatcaggagggagttcatatcggcacacgggacatgaactgtgaagctcgagccacggtactatacaccggatgtgaaacttgtgcttacacggcatctctttagcttcacttcctttgtcaaaatcatccaaacaaatcgagcactgcaatgattcacttatcttaaccgttgggagattatccacaacttctttacgtgctggaagactcccgtgcctgattgaatcattatcagctagatgttcaagcaaatggtctaaactggatccaacaaagtaatctccaattgcagaaagagaagtattgttccggttttgattcaaactcgttgaaccctgaacaacagctgattgatttaacaggtctcgatccgagctctcatactcagaagcaatccctgcacgaataccctgaagcaactgcaatatagtagctgagcttctccgtctcctcctaaggatagactcaaactctctgtctaaatcaatctctctaccttgttgcctgtggcgatgacgacgatgatgatgtcgatcaatatcgacgctgtcatttccatcaacatcatcagatacattgacctcatcattatccacaccaaactctgtcctcctaaaccttctacgtctacgaggattactcatcattccaagcaagattggaccccatagagacaatgcacggtctgtaccaaaatcaatctcagggtcttgaacctcccttagactgctactgctgccgccattaatctcacggctcatttcctcgacaaacccgctttggcaaaaggggcatttgatctcggcaccaataactggattcaccatttgtgaacacatgtgacaccaatacctagctgacattgcctcttcctccttctttccttccccacccaaacctctcgtttctgaaacaaccagaagaacaacaaaaaaaaaaacatgaagaagcaaacctataaagtttcgacctttgtttcatcagatctaaataaagagaatggtattcccaaaagtttcactaaaaagaggataatatcatcttcaccaacatcattagctcaagtttcagacaacaaaacgcaagctttctatgcaaatgcgaataaacagatcaaccaaaatttgcctctataaagagataacaatagaaatcagggctaatccatgaaaagaaaactctcaattctcatggagtaattaaaacaaaacaaatacaaaaacaaaccttgtaaatgttcttacttttggagatccagagggaagaaatgtcttcctccttcttttagatctccacgaagataaatgagagcttttttatttgtcttcttctgcagaaatggtgggagacgaagaaaagaggaatgaaggaggaaaggaagacgaagatgaagacgaagaaaagggaatgtaatgtatagttcgcagacccaatcttaaagcccattaaccgcaaactgatatataaaggagccgggtctatcttaaccatttaaaaccaacttctaatttggaatcaaattgaaccgaatcgaaccggttgaagttgaaagaaggagaaaaggcgttgtctccgtgcgagaaaggcaaatcggagacgatg

SEQ ID NO: 18110 - DNA, 3000 bp, Unknown; identical to SEQ ID NO: 6722
  misc_feature (1)..( 3000): 2750-1469P.txt file - cDNA_ID_1815356; gDNA_ID_1621102; Annot_ID_55908

SEQ ID NO: 18111 - DNA, 3003 bp, Unknown
  misc_feature (1)..( 3003): 2750-1469P.txt file - cDNA_ID_1815356; gDNA_ID_2926189; Annot_ID_140930
acccaagtttcagctttaacttgggctcaagctgaaacgtgattaggtgttacatatatgacacagagcagttaacatggaactaaaatcttaaaaaattattgtaattaaaatggaaacagagcagttttttttatatgcaataagtcttttgatggagatacaagagtgattaataccttataacaatgaagataaaagagtgcttaatacctgatttactaatatacatgcaataagtgacacccatcagactttttatttcgccgtttagacagtaagagagatcgaaacatcgaaacatggacttgtctatgtctctctgtttttatgggttgatcacacaaaatgatcaatataataaatcttctgtagtagaaatctcttgctcttgctctctctctctctcgttcttgattatcgtttaccctcaacacaatgaaaatgtatatcggcagaaaaactacaagagatttacacagcttggttagataaaatttctccttaactctctaacaaacaaaaaagtttcaatttgttttctccaattgtgttaattaatcagttccacaaaaatcaccaacagtttaactatttttagaaatagagttttgtgcaaaacaaccttcaactttataaacgttttcaaattattttttatttttatttttttggtaaaagtagacagtgctgtgcccaatgacgtaaatgttgaagttacaaaaatagatgattttgaagatatttttacacaaaacccttagaaatatacattatactttcttttctctaaacagacacctataagatatgaaataccatttatttgtgtttagtcttcttatgtatatggtaagctatatctttcatatagtctaatcagtgcatgtccatcaataataccatgcatgagccttcctccaactattcacaacaggagctgaatattaaactggcaaattgatgttctaccatatatacctattatatcacaaccagcatagtctatagtggttttactatagctaatgtaattagtactaattaaagctagttgttagaaaaacatgagcaaaaaatctaatttgcaaactatatttagtatataagtgattaagttacaataatcaattaatagaaatacttttttcaataatattccaaccacagaaaaaaccaatttctatcattttggcagataaacttggtttcgctagtttgttaaacgaactagcagtatagcttatttgtttttgtttatatatagaagaaactcaagccagttgggttacctatcttgtttatgaattttcgttaatgtttgcaatatttctgattttttgtgaaagactaaattgtagaattgtatccacattttattctttccgttcatgtcgtagatttttagtttatgtttcggtcaacaagtcgtggagttaaaatatactatacaataaactgaaagttcaaatggaatggggttcaccaactttttaatttacttattcttgtggtcactttctttcaaaatgtactaaataattttatatattctcataatgtctaaatataaacaataaatatgaatatgaaaataaacataaatatgaaaataatttttcttttataaaagaattaataaactaacgataagtgattataaaaaatatatgtctttggaaaccaaacaaaatagtttaggcttcaatcccattaaattctcatctaaaattgatgcatgtagcatgtagatatgatcatgacaaaacgatgatttacaaatttttatttttcatttgttcgtcataaatatttgatcgtttatgataatattattattagacatgactgattgttattgcacaaataatttacattgtatatagaatttgcatcgcatttttatttgcgtatcaatggctgacactgagatttatgaggccacaaacaatttcggttttgggggcttcatgatctatatataaattttttttaccgtttgggcctcaaaagctatacatactacttgttaaaatttgggatccaacaccgatgttccactaggatatgatcagttacggattatttattgtaactcttgacaatattgcacaaaaaatttcttgattgtaaacattcgggttgcaacgtcagaccatctcactttctatcctcaaaataaaacatttccaacatgccatttttaaaattctaatctcataagcatgatattatttggacatgaagtgtatacagttatagtgtacaagcaggagagtagaagtcacgcgtcttacagatgaacttagtgctagtttaccaaagaagctgacgtggcgttttcatgctttccgtctttgtgctaataatatatggtagaaaaaacttttgagacgcaaataaaaatgcgaaaaccccaaaatcgtaatcagcagcgatcgagattttcgccgctgaaatctggagactgattattacaaacttgttcgtcgtgttcttcatcggagagacactagatcggaaaatttaacctcgatttgattgccgttgccgtaacatttgactgttgttttgtggtggggaattctagggttcttgtttgatgaagaagaactgaagtgaaaatgaccattaaaatctcccatgagatgattgtgtccgttcattcttcgaaatcggacaacggaatcgaatgatcgtcatattctgtaagagagaaggttagatcttcaccgaatctggaactcgagatccatcgttttgttcgattttctattctttcgcacaaggattggtctgagaagaacaagttcaagttagaagctgttgtgttctgtccggtgaaacttatttgagctgctgcaaaaacttcaaaagttgttactttttctgaaataacttaagcttcttggtattttgagactaaatggtttcactactcttgtgaattcctggaaatcagaactgttattagttttttttgtatatttagggacaaagatg

SEQ ID NO: 18112 - DNA, 3003 bp, Unknown
  misc_feature (1)..( 3003): 2750-1469P.txt file - cDNA_ID_1815368; gDNA_ID_1621102; Annot_ID_55905
tagtacaaactccgatctcggttcttggatagagttcactaggtctttttcttttatacaagttgtgggtaagcaaatagaaatatagttgaataaacatgccaaagctaaagactttgaagatgactactgactcagagaactgtaccgtattctttttcatttcttcgtcgtgcaattacgagaaatcaggattccggttggtggaccggtcatctgaagttggcacctcccgtgcagctgataagagtaatgaatcattccaaaatgagctttgactttgaaggtacctctaatctcatattctatcttgttgttttccagctgtctcctgagttccaccgcgtggtttacaggcaagcctaccaaactagagatcaaacggattggttccaacctcgtctcatgctttttctgcaagaatggctggaccacttgcgctgcaatcaatctattgaagaagaagagctcaatccgaagcttctcaaacttcacttctatcttcttattagggttagtgaaattcaccagcatggacaaatcgccgttgaaaaactccggcgtgtcgaagtagatcgtgtgtaggtttgcgtttgggatgtcgaaaacaggtattcttggtctaatcgcaagaaacactatcaaagtggcaatcgcaaaaaagataagcaaaaggctgaacacaaaacagaaaccggcaacacaccatatccagagactggtcctgctactccttggctgacggagaatcaccctatctttcctcggctctgcatcaagaccgttgaatctaaccgttgctggctttgttaagaccatttggccaactggtgtggattgtgtgctctgtggtgttctccatggtgtggttcttggagtataccatacagacgatggtgtttcccatgatggcgtttcgggcggttgcaactgcggtggaggaggaagatgaggtagatttggcatgagttatgtgatcaatgaaaggaaaattggaaatgtgtaatggttatggattaaataggaaaataacagaacttttgttttttgttgtgtgtaaaaaagggaaagcgagagtttgggcaaaagaagagagcttttgcataatggggtttggtttttgtaatgagtgggaccatgcgtgtcgttttgaagaactagtaaagcaaatctcggtggattaaagtttgaaaactacatgcgttttcgtttaatattccttcttcttaacaagtggcttttcctaattaaatctgagataaaaggttttgattgattacaggggacagatacttgttaattgaacaaacttaaaagtcttatgtattttaggaaaaggatataaaaattagtataccattaaaaaatatttcaatataggacttatttgacattttaagaataaaaaatttcattaaaaattctagttaatgcctatctaaacaatatcgttagaagcatcatgcatgataaaacactatgataaaacaatgtgttttttttcctgtctattttatgtctagtatgataaaacaacgatgttagataaaaaaaattttttgattaacctaattttattttattttcgattgaaaaactattgtgagtagaaaagaaaaaaataaaaaaataaaaaaaagtaaatgaatacaaaattattctttaagttgcttttaggttttgtctaaggtttgaaaaaacatttttgggctttatctttggttgtgaagataatcaaaatgagtttgttccttgggtaattgtgcttcttttttcttctcactttttgtggtagttgtaatgtgtggttagttgcggatccataaaacacttcagcactaagaaaaagctttttacctatgaaaaagttataataattccatttttgtcttttaacaatgatcatgctttccatagtaatttgataattccaaactcctggattttattaagagtaatggcagtaagttaggttttgttcacaaataaatacaacgataactgcgaaagagactcttattacaactgaaaaacttgttgaaagttgactacctttgattgatcctacaattgagacagacaagaatgagcagatgaagcacaaaaaaagttaacaagaagattgttttgcttttgggttaagaagttttattggggcattaacttggtcaggcccaaataataagcaaaatgctgtattttgctttggtaaagagttagctaattaagagttgttggagtctacgcataagtagtgctgcttgtgtaggtgagtcagtctagtgtctggaggtaaaatgaaagtatgtgtgcaagtgtgtgtagtagatgaaagtctactataagtatgagtgtaagagttgtagtaagattgcataaaagtatgaaggaaaagtttaagtgaaaacgattctaaacaaagagaagaaagttagagataagcataagagctaacctgaaacaaatatgagaataacaacaaaacttcatatttaatcagtaatatactaatatcttgataaaacctcacgtgttttaatattggcaataatttggtttaaccatagaatgaccaagatattttattttacagtgagtaaactagttttctataccgaattaaaggtaataatttgaagtttcaaatacgatatttaagatcctaattatgagtagaattgaatgtgaaacggttttattagtacaagaaaagggtatatgaaagggttaagcaattaggttcgaaatataaacacgcacagaactcgaagagccgaatttaacaatgaacccaaaattaaacgacactgaagcaacctttgtgttgtgactctatatgagtgtatatatatatggtttatagaatacaaagtcttcagatatgtaatggagatttcagaaaaatggataagacactatagtagcacacacaaaatccttctagttggagaaggaaacttctcattctcactatgtctagcttcagcttttggctcggccatg

SEQ ID NO: 18113 - DNA, 3003 bp, Unknown
  misc_feature (1)..( 3003): 2750-1469P.txt file - cDNA_ID_1815368; gDNA_ID_1621102; Annot_ID_171455
tttctataccgaattaaaggtaataatttgaagtttcaaatacgatatttaagatcctaattatgagtagaattgaatgtgaaacggttttattagtacaagaaaagggtatatgaaagggttaagcaattaggttcgaaatataaacacgcacagaactcgaagagccgaatttaacaatgaacccaaaattaaacgacactgaagcaacctttgtgttgtgactctatatgagtgtatatatatatggtttatagaatacaaagtcttcagatatgtaatggagatttcagaaaaatggataagacactatagtagcacacacaaaatccttctagttggagaaggaaacttctcattctcactatgtctagcttcagcttttggctcggccatgaacataactgcgacctctctcgattctgaaggtatgtaaaacccattttatatgaacatttataatatacatctatcgatcactagtcgtaactaatgtattgacttaaatcaataaaattttacatgtagatgaactgagcataaaatatatggatgcggtggataacataaacatattgaagagatacgggtgtgatattcagcacgaggttgacgtgcacacaatgagcttcgataatagtttgagtctgcaacgttatgaccgcattgtcttcaattttcctcacgcagggtctcgtttctttggtcgtgaattgtcctctagggccatcgagtaacgaaatatattctttcattttcttactataatatatagtttatgatttggactgatgtaatgataaaatgctgtgttttggatcaggagccacaaagagttagtgagaggatttcttgagaacgctaaggagatgttggaagaggacggagagatccatattacacacaagacaacgtatccatttagcgattgggggataaagaagctgggtaaaggagaaggtttgaagctgcttaagaaatcgaagttcgagctgagtcattatccgggttatatcaccaagagagggagtggtggacgtaggagtgatgattatttccctgttggtgaatgttctacttacatgtttacccaatcctaactttgggaaatcttgcttaatttttttttggtattatgataactaaaaaaaagaattgggcattacaacatcaacaaggtaacaataatttggtccgactggacacgttcattcagttccttctgaaaactcaaaagcaattggtatataaaaagatcaaaaagttatatgaactatgtactttgaaaaagaaaaaaaagaagaagttatatgaactatgttaataataaagatctttaaactttttaatctcatttttgtttataatacatcgatttttattgagcttatacaagttcccgtaactgactttatatatagtttcatgtattaatttatacataattggccaataagtaggccttttttttgttgttttctcatgtaagtataattaagtgtgtaatcatatgaatctctataatctatatgcatacatacatgtatatagaatatatctatttttcgccaacaagaaaaaggacgaggaaactaaattggttgagattaacactttagtttattggttggtccaagagttggtagatttctttgtcgtttctctatagttggaacatgcatttatgtgaacttcgattatgacgatatgcatccatactacatgtaaaatttattgttgttttccgccaacaaaagaaaaacgaaaaagctaattaaattacgtacgagtaaattgaacacttggagaatcacatggatcctggagctctgctcatgcttaggagtgctcgaggccttagatctttcctatatgtagacgttgatccttgtgatctaaaaggtttcgaggtcttggaaatctatcacccgtccatgtctgatggctttgtgaactcggtaatggtcgcacgcaaactcactgatcgattaattaagtacgagtggtgtactggaactcgatcactaaattcattaaaaaaaacaaggcaagtgatgattccctaagaaattaggtcaagattggagccatacttgtggaacaaggcagatgatgatttccctaatgaggctctctgactctcccttactagttcaatattagttctgtcttttgtcaacgtgttgacgaaatcaaatctatattattagttgttgttttctctctatgcttattgtgattatgatgtcactagatcaaatactcggtttgaatgtttccttataaatgtatcagcatgaccatttttctcatattttacgaaatatttagcctgacaagcattaagcagttctgttaaacataaaacatacaatatccatgaaagaaaatcctcaatgtacatgagtcattaccaaatgcaagccatttgatcagaagtaagctgtggctgaaacacaatgtacagatgagtcatctttttgtttgtttgcttgaatagaaacgcagcgtttttgactaatcgagtaaccaattttttttttacaagaccgaaccggatcaattcaacaaacgtgaaataaatcgaagcgggccaggtcaagtaggtagccctctcaatgattaagagggaaccagctgtatccagagaccctctgagtcagtaagaagcttctaagagggacaggaaacggtaaaaaaaacacgagttatgtccggtaatatcaaaatggcaaaaatcattcatttcaagaaagaaaagagtagagagagtctcacacagctataaaggcccaaaaacaccaatccaccgacgagtattgtagatttagaggtctacaactaaaagcctttgtgtgtgccagattagctccctactaatccgccgccgcacctcctcgatctccgcccagctcccttcttttctatctatctattcagttgtttctccggtaacaaccagctgaggaagaagaagaagtagtagccgtgatgatgatgatg

SEQ ID NO: 18114 - DNA, 3000 bp, Unknown; identical to SEQ ID NO: 4376
  misc_feature (1)..( 3000): 2750-1469P.txt file - cDNA_ID_1815368; gDNA_ID_1620702; Annot_ID_165099

SEQ ID NO: 18115 - DNA, 3000 bp, Unknown
  misc_feature (1)..( 3000): 2750-1469P.txt file - cDNA_ID_1815368; gDNA_ID_2926189; Annot_ID_140933
tacaaactccgatctcggttcttggatagagttcactaggtctttttcttttatacaagttgtgggtaagcaaatagaaatatagttgaataaacatgccaaagctaaagactttgaagatgactactgactcagagaactgtaccgtattctttttcatttcttcgtcgtgcaattacgagaaatcaggattccggttggtggaccggtcatctgaagttggcacctcccgtgcagctgataagagtaatgaatcattccaaaatgagctttgactttgaaggtacctctaatctcatattctatcttgttgttttccagctgtctcctgagttccaccgcgtggtttacaggcaagcctaccaaactagagatcaaacggattggttccaacctcgtctcatgctttttctgcaagaatggctggaccacttgcgctgcaatcaatctattgaagaagaagagctcaatccgaagcttctcaaacttcacttctatcttcttattagggttagtgaaattcaccagcatggacaaatcgccgttgaaaaactccggcgtgtcgaagtagatcgtgtgtaggtttgcgtttgggatgtcgaaaacaggtattcttggtctaatcgcaagaaacactatcaaagtggcaatcgcaaaaaagataagcaaaaggctgaacacaaaacagaaaccggcaacacaccatatccagagactggtcctgctactccttggctgacggagaatcaccctatctttcctcggctctgcatcaagaccgttgaatctaaccgttgctggctttgttaagaccatttggccaactggtgtggattgtgtgctctgtggtgttctccatggtgtggttcttggagtataccatacagacgatggtgtttcccatgatggcgtttcgggcggttgcaactgcggtggaggaggaagatgaggtagatttggcatgagttatgtgatcaatgaaaggaaaattggaaatgtgtaatggttatggattaaataggaaaataacagaacttttgttttttgttgtgtgtaaaaaagggaaagcgagagtttgggcaaaagaagagagcttttgcataatggggtttggtttttgtaatgagtgggaccatgcgtgtcgttttgaagaactagtaaagcaaatctcggtggattaaagtttgaaaactacatgcgttttcgtttaatattccttcttcttaacaagtggcttttcctaattaaatctgagataaaaggttttgattgattacaggggacagatacttgttaattgaacaaacttaaaagtcttatgtattttaggaaaaggatataaaaattagtataccattaaaaaatatttcaatataggacttatttgacattttaagaataaaaaatttcattaaaaattctagttaatgcctatctaaacaatatcgttagaagcatcatgcatgataaaacactatgataaaacaatgtgttttttttcctgtctattttatgtctagtatgataaaacaacgatgttagataaaaaaaattttttgattaacctaattttattttattttcgattgaaaaactattgtgagtagaaaagaaaaaaataaaaaaataaaaaaaagtaaatgaatacaaaattattctttaagttgcttttaggttttgtctaaggtttgaaaaaacatttttgggctttatctttggttgtgaagataatcaaaatgagtttgttccttgggtaattgtgcttcttttttcttctcactttttgtggtagttgtaatgtgtggttagttgcggatccataaaacacttcagcactaagaaaaagctttttacctatgaaaaagttataataattccatttttgtcttttaacaatgatcatgctttccatagtaatttgataattccaaactcctggattttattaagagtaatggcagtaagttaggttttgttcacaaataaatacaacgataactgcgaaagagactcttattacaactgaaaaacttgttgaaagttgactacctttgattgatcctacaattgagacagacaagaatgagcagatgaagcacaaaaaaagttaacaagaagattgttttgcttttgggttaagaagttttattggggcattaacttggtcaggcccaaataataagcaaaatgctgtattttgctttggtaaagagttagctaattaagagttgttggagtctacgcataagtagtgctgcttgtgtaggtgagtcagtctagtgtctggaggtaaaatgaaagtatgtgtgcaagtgtgtgtagtagatgaaagtctactataagtatgagtgtaagagttgtagtaagattgcataaaagtatgaaggaaaagtttaagtgaaaacgattctaaacaaagagaagaaagttagagataagcataagagctaacctgaaacaaatatgagaataacaacaaaacttcatatttaatcagtaatatactaatatcttgataaaacctcacgtgttttaatattggcaataatttggtttaaccatagaatgaccaagatattttattttacagtgagtaaactagttttctataccgaattaaaggtaataatttgaagtttcaaatacgatatttaagatcctaattatgagtagaattgaatgtgaaacggttttattagtacaagaaaagggtatatgaaagggttaagcaattaggttcgaaatataaacacgcacagaactcgaagagccgaatttaacaatgaacccaaaattaaacgacactgaagcaacctttgtgttgtgactctatatgagtgtatatatatatggtttatagaatacaaagtcttcagatatgtaatggagatttcagaaaaatggataagacactatagtagcacacacaaaatccttctagttggagaaggaaacttctcattctcactatgtctagcttcagcttttggctcggccatg

SEQ ID NO: 18116 - DNA, 3000 bp, Unknown; identical to SEQ ID NO: 4376
  misc_feature (1)..( 3000): 2750-1469P.txt file - cDNA_ID_1815368; gDNA_ID_2926189; Annot_ID_200874

SEQ ID NO: 18117 - DNA, 3000 bp, Unknown; identical to SEQ ID NO: 6727
  misc_feature (1)..( 3000): 2750-1469P.txt file - cDNA_ID_1815372; gDNA_ID_1621102; Annot_ID_55904

SEQ ID NO: 18118 - DNA, 3003 bp, Unknown
  misc_feature (1)..( 3003): 2750-1469P.txt file - cDNA_ID_1815372; gDNA_ID_2926189; Annot_ID_140934
aatgaacgtgtccagtcggaccaaattattgttaccttgttgatgttgtaatgcccaattcttttttttagttatcataataccaaaaaaaaattaagcaagatttcccaaagttaggattgggtaaacatgtaagtagaacattcaccaacagggaaataatcatcactcctacgtccaccactccctctcttggtgatataacccggataatgactcagctcgaacttcgatttcttaagcagcttcaaaccttctcctttacccagcttctttatcccccaatcgctaaatggatacgttgtcttgtgtgtaatatggatctctccgtcctcttccaacatctccttagcgttctcaagaaatcctctcactaactctttgtggctcctgatccaaaacacagcattttatcattacatcagtccaaatcataaactatatattatagtaagaaaatgaaagaatatatttcgttactcgatggccctagaggacaattcacgaccaaagaaacgagaccctgcgtgaggaaaattgaagacaatgcggtcataacgttgcagactcaaactattatcgaagctcattgtgtgcacgtcaacctcgtgctgaatatcacacccgtatctcttcaatatgtttatgttatccaccgcatccatatattttatgctcagttcatctacatgtaaaattttattgatttaagtcaatacattagttacgactagtgatcgatagatgtatattataaatgttcatataaaatgggttttacataccttcagaatcgagagaggtcgcagttatgttcatggccgagccaaaagctgaagctagacatagtgagaatgagaagtttccttctccaactagaaggattttgtgtgtgctactatagtgtcttatccatttttctgaaatctccattacatatctgaagactttgtattctataaaccatatatatatacactcatatagagtcacaacacaaaggttgcttcagtgtcgtttaattttgggttcattgttaaattcggctcttcgagttctgtgcgtgtttatatttcgaacctaattgcttaaccctttcatatacccttttcttgtactaataaaaccgtttcacattcaattctactcataattaggatcttaaatatcgtatttgaaacttcaaattattacctttaattcggtatagaaaactagtttactcactgtaaaataaaatatcttggtcattctatggttaaaccaaattattgccaatattaaaacacgtgaggttttatcaagatattagtatattactgattaaatatgaagttttgttgttattctcatatttgtttcaggttagctcttatgcttatctctaactttcttctctttgtttagaatcgttttcacttaaacttttccttcatacttttatgcaatcttactacaactcttacactcatacttatagtagactttcatctactacacacacttgcacacatactttcattttacctccagacactagactgactcacctacacaagcagcactacttatgcgtagactccaacaactcttaattagctaactctttaccaaagcaaaatacagcattttgcttattatttgggcctgaccaagttaatgccccaataaaacttcttaacccaaaagcaaaacaatcttcttgttaactttttttgtgcttcatctgctcattcttgtctgtctcaattgtaggatcaatcaaaggtagtcaactttcaacaagtttttcagttgtaataagagtctctttcgcagttatcgttgtatttatttgtgaacaaaacctaacttactgccattactcttaataaaatccaggagtttggaattatcaaattactatggaaagcatgatcattgttaaaagacaaaaatggaattattataactttttcataggtaaaaagctttttcttagtgctgaagtgttttatggatccgcaactaaccacacattacaactaccacaaaaagtgagaagaaaaaagaagcacaattacccaaggaacaaactcattttgattatcttcacaaccaaagataaagcccaaaaatgttttttcaaaccttagacaaaacctaaaagcaacttaaagaataattttgtattcatttacttttttttatttttttatttttttcttttctactcacaatagtttttcaatcgaaaataaaataaaattaggttaatcaaaaaattttttttatctaacatcgttgttttatcatactagacataaaatagacaggaaaaaaaacacattgttttatcatagtgttttatcatgcatgatgcttctaacgatattgtttagataggcattaactagaatttttaatgaaattttttattcttaaaatgtcaaataagtcctatattgaaatattttttaatggtatactaatttttatatccttttcctaaaatacataagacttttaagtttgttcaattaacaagtatctgtcccctgtaatcaatcaaaaccttttatctcagatttaattaggaaaagccacttgttaagaagaaggaatattaaacgaaaacgcatgtagttttcaaactttaatccaccgagatttgctttactagttcttcaaaacgacacgcatggtcccactcattacaaaaaccaaaccccattatgcaaaagctctcttcttttgcccaaactctcgctttcccttttttacacacaacaaaaaacaaaagttctgttattttcctatttaatccataaccattacacatttccaattttcctttcattgatcacataactcatgccaaatctacctcatcttcctcctccaccgcagttgcaaccgcccgaaacgccatcatgggaaacaccatcgtctgtatggtatactccaagaaccacaccatggagaacaccacagagcacacaatccacaccagttggccaaatg

SEQ ID NO: 18119 - DNA, 3003 bp, Unknown
  misc_feature (1)..( 3003): 2750-1469P.txt file - cDNA_ID_1815375; gDNA_ID_1621102; Annot_ID_55899
tggatgaaatgcccacttctgttcacacttctgcactactgccactacattcttggactgcttctgccgctatattcccaccacaagggaccattcttttattattagacaaaacaagttaaatccgattgaaaagtatacagacaaaaccttctactatagaaataaataacccatatcatattctagattagatccagcgtaacaccctttattaattctcacttaatataatttattggagcagatcaagccattcaacaaagcctctctctcatgtgatgagatctctgacctaattgaatcgtgattagatctagatcttgttacattgtcttcgtcaattatccgcacttaaacatttcttcgttattttacactattagtatacgttgtaacacatatttcatctttctgtactaataaagagtacccacccataaactactctttcataaacaaatgtcttcatcaacaaatgtcttatataacgtgaagtttcatatccaaaccactggttataaagtgttttgtaacgttaactttcactattagactcatcaatgtttgcctatgtaatcatacaacagtagtagttgtataaattataaattggtgtagagaatttaggaataatgtttggatgaaagggtgttgtcacccaacaaggagagggaccattaataaccgataatcataataagatttgtgaaagaaatgtttcactgatttggcagaagtacagttggaggttctttgtcttttctcttctgcaccttttgttctctttacttccttcttgtttgttggtttttgttcttttcttattttttttccctaccataaatggaccattaccattcatttctctctttttcttattatttgctgtatttagttgattttgttatatccgtttaaatttgtgtacatataaacaacgacgtctataagtttttataacaaaaaaaaggattatgttaggtgaaatttcgattcgttttacgtgtaggatcaacgtgaaagaaagtcgttgtaggtatgaaaaatatggaccgactacgatacggctgcttgagaaaattagatgtataacgtaaagtgaaatagtgaatgttaaggcaattagggaaactaaaattaaatattcaattggtatgtagggaaacgactttttatttattcacatgcacatgacctctctatgtcatgtgccttaagttgccgtgttcgatctttttataatttgttcgacccgttaccctaaatttaaaaatcatttctatttttttattattatgtccaaatctgatttctttttcatgtgtcatatatataaaactcattttaattaaattacaaatttgaaaaaatatttttttttgggaaatttaagaccgacaagatgagcaagggacatggttgtaaactaattatttctttaattaatcagtcacaaaaattcctagcttgcatgtgcaatttcactctccaagattccatgttttacttcaacttttatcactagtttatactatcaaagactcaaagtagatgatctgtattctacgctaatagtaaataattttaatataaccactatttacccacttctgttttctctcaaaataaaaacagaatccacattatatacatggtttcttgtggttactagttacacaatgtactagctacaagaagtgcttctgattaaaccatgtacagttttctagttcaaatacacatggttcctcgttactagttacacaattatgtcgacattcatgggaagttcaagggatttggatacttcaattcttactatgagaaaccctatttaaatgtaactactaaaacacaagcactttttgtcgtggatataattggttaaaattatcggtgcgtttaatgtgttgagaattcgttgaacactttattacctattattaaaccaaaaagaagcattaaagttcatcgtgccgctttaagatccacaagttttgtttcttcgattcttcgtggtgaacgttgcagccatctttgggctgtactattgtcattatatttaacgggtcttttcttttgtaagttagagctagtatatatgaattaatgatatagttaaatttaaataacttgtaatgctcggtctaactcttaaaaaaacgtttgaatgtgattgaacctttcgtaacagtttgatactagtttaatggtaaaactggccacatggaacaagacgtcaagacctataaatgatcgcaaccttttatcgaagtggagaacacttctcgttcacatgttataagatcatgatacgatgctctctgattagtggattggagtgaaatttcgacaaaattcgtacatgcaaatgtcgtaaaaggcaattacaatatagcagcggaaaagagaggaggactatttgacatgtcggtctcaaaaccatgaaagttggtgccattgtaagagggctattgttttgacatgtcattcttgattctcagatttcgattttcatataaattatagcatactatttttgttgcataatatttgattattttcttactttcaaaaattttggtggtcggccataatatgtttttccaataaataaataaaaaaggtttatctatgtaaggtatattccttgaagtcaaatccaaatttaattacaggattatgtttcaaaacgttatctaaaacttgatccagctatttcaagagtgaactactttgtaacttaattaggactatttagggtaattgttttttcaattttacaaaaatcaaaagcaaagattaaaataatactaaagggttagtgatagaaactttgttgggatcaaaaaccttcctttgctacttctctctctgctctgtgtttatttatatatttcctataaacaaaataaaaccaaaaccgatggattggttcttcgctttacaatcccaacgcacttctctcattcttcttcctcatcttcgtcttctccgatg

SEQ ID NO: 18120 - DNA, 3000 bp, Unknown; identical to SEQ ID NO: 4372
  misc_feature (1)..( 3000): 2750-1469P.txt file - cDNA_ID_1815375; gDNA_ID_2926189; Annot_ID_140939

SEQ ID NO: 18121 - DNA, 3003 bp, Unknown
  misc_feature (1)..( 3003): 2750-1469P.txt file - cDNA_ID_1815379; gDNA_ID_1621102; Annot_ID_55898
acatgtaacccatgaaatatcactaacagttaccgggaacattgttttgcagtttcgtttcagctatatgatcttaagcagcaaggtttcatagagaggcaagaggtgaagcaaatggtggtggctactcttgctgagtccggcatgaacctgtcagacgaaatcatagagagtataatcgacaaggtgtggttccttcctaccctgctcgatactatattcttgttccactgttgtatagccaactcatgatagcagttgagaataaagtaaagagtggtttctaagtttcttctttcacagacatttgaggaagctgatacaaaacatgacgggaggatcgataaggaagagtggagaacccttgttctcaggcatccttcccttctaaagaatatgactctccagtatcttaagtgagttcctaaaccaagacttatccgaggtttaggcaatgcaacttccaattttttctgtgttattattaacaccgatctctgatattgtgtgcagggatataacaactacatttccgagctttgtgttccactcgcaggtggaagatacctgagaaaaacaatagcatattagcagaggagacaatttgggaattgtgtttgttttctgattatgtatcatgtctatttgtttcaatctctctgaacattttcaagattttgttgttacttgtgtgaattaaaagtaaagaaaacaaatctgtatttttgctactcctgattttgattgctgattttctcctcgcatctgtagatatactactaaccttgagacatgaatcctattaataaagagcaaactgatgaagtgataatagagagcaaaaaagagagaacccaacaccaaatgatcgggtatgctctagtctgaattctgaagtcaaaattgaaatcaccgatttgatcgaaccggatgcaacattacaacaatcggatttgttagtcttgtggttgactttgtcagttagagttgacaaagtaattagcaaagttagtgacgattgtgttctgcataaacacgtttactttgaggaataaattacttactctttcggtctttcctaatatatatgttttccctgtctcaaagatctgaataggtatcagagcgcgttgacaatctctttttttgatcatcgatttgttctctctttcttggctaaaaagtttctatctacacgactctccatggattcaacaagaaattcagcttcttccaactccacgggatgctttacggatcagaaaaagcgaaaggcactctatgaggtgtttaagaaactcagcggtgttgattgccaaagaaacgaggttcgtataaattatatgtaactttcttgctaagtacgcatatgatataaatctgtgtttcttcgttcagggtaacgttgtagaaggcgtaacgtgttattatggtgaaatgaacaaggtatttggaattatatataaatatatatgtctttcttgccacgcactccttcttttcaacaagtcttacagattttccataacgtgtcctgttgtatttctgttgtatcaggaacagtttcatgtagccatattccagactgacaaaaatgagagcttgttttcagagagggtattttatttttgttctcaacaaaaaaagtctttgtaatccatttgcaaacaatgacattaccctatcacacaggtcttcgatttgttcgacacaaatcatgatggattacttgggtttgaggagtttgcccgagctctctctgtctttcatccatctgctcctatagatgataaaattgaccgtacgtctctgatctcaaaaactagacccgatatattaaccatctacaaacaaactgttcacatgctacctatatatattccatgaaagcttattaacggttacctggaacattatttggcagtttcgtttcagctatatgatcttaagcagcaaggttttatcgaaaggcagggggtgaaacaactggtggtggctactcttgctgcgtccggcatgagccagtcagacgaaatcgtagagagtataatcgacaaggtgtgttttccttccttctattttttggttcgactctagtctatagtatagccaactaagtttaagcagctgatgaatatgaagtgaagagtgatttttgagtttatgaggcagacatttgtgcaagctgacacaaaacatgaagggatgatcgatgaggaagagtggatggacctagtttttagacatcctcttcttctgaagaacatgactctccagtatctcaagtgagctcctaaaccaaagactaacccgaggtttagccaatgcaacttcaaatttttctgcatcacgtattattaacaccatgatatctgatattgtgtgcagggatatcacaactacatttccgagctttgtgttacactcgcaagtggaagatacctgagaaaaacaatagcatattagcagaggagactgtttgggaattgtgtttgttttctgattatgtatcatgtttatttgttttcaatctctctcaacattttcaagattttgttgttcctttgtgtggaaaaaaaacaaatccgttgatgattttctcctcgcatctgtagatctactactaatcttgagacatgtaaaagcaaactgctagagcattgaaagggcaaactgctagaaaaaaaagagagaagaactcaacaccaatgatcggctatgctctaatctgaattctcaagtcaaaattgaaatcgccggtttgatcgaaccggatgtatttaacaaaataaacaaaataaacaaaaaaagaaggaaaaatagatcctcacgcgttaccgtagcgcgtatttttttcacaacaaaattcataagcagtgtgggtcccacaggtccactaagtttagtggtgggttgctccgtagctaatctcatctctcactctttttcttatccactatccatagaagaagaagaagaagactgttgacgacgacggcgatg

SEQ ID NO: 18122 - DNA, 3000 bp, Unknown; identical to SEQ ID NO: 4371
  misc_feature (1)..( 3000): 2750-1469P.txt file - cDNA_ID_1815379; gDNA_ID_2926189; Annot_ID_140940

SEQ ID NO: 18123 - DNA, 3003 bp, Unknown
  misc_feature (1)..( 3003): 2750-1469P.txt file - cDNA_ID_1815395; gDNA_ID_1621103; Annot_ID_55935
taaagaataaatcagattattgagattcacaaaaatccatcatcgcaagttcttacgtattcgaaagacgttactacggttactaacttactgtatatgtatgtgatgtcgaaaaagaagaagagaagacgttacgtcactacttgtatgttcatcgatcagtccacgtggctttttgtaaggtccgagagaggaaagtgaaattcagacgccgcttttttttttttggatgaagttccaaaattagccattttatacagtggttaagctcgttggaccaatatcaatggcgtctgcaacgactcttctcttccaccacggttccactcgagtcctcgtcgctcgtagacggtgccaagcttcagtccttagaccctacggcggtttaaagccctttctttccttctgcagcttacctaactccactgcgccgttccgggattcgttgagagcaaaatccgatggattggctcgggcctatgttaccggagcgccgcctatcgtggaagaaccagacccaaagattgaagaatccaaatctgaggctgaatcgaaggatttaattagttgggggcttctgtggagcttgatgagcaagcacaagctcaggctcagtgtttgcttattgactctccttggatgcagtacttgcactctctctatgcctgttttttctggtaatcggttcttcaatccactctcccaccattagcaaattgtaactgtactctttttttctctttgggtttgatgtagtttaagtttgggtatgatgatttagcttgtcatctgtgtttctctttatcttggtgaagctgttttataatggtaagtgttattgttttgagtaaaggtagattctttgaagtactgattggggtgagaccggagcctttgtggcggctgctgagcaaaattgctgttttgtactcgttggaacccatctttactattgcttttgtgaccaacatgactgctatctgggaaaacgttatggcaatattaagagctcagattttcagaagggttttgatccagaaggtatgttttgtttagtatgatcaaagttcgcttaagctatattgttggctgtattgaaatatcattgatgggtttcttttttttgtcttttatatattcaggcagagttcttcgacaaatacaaggtctgttccttttattcttggtttgctcaggtttgagacattttggcacaaaccttccttatgttagattgagttcatttgttttaggttggagagctaacggggctactcacgtctgatcttggtgctctgaatagcattgtgaatgataacatctcacgagatcgtggatttagggcatttacagaggcaagccatttctttactatgcaaatgtgagatttttgtgtttgtacatacatttttcataatgaatacagatttaatcttagcctggtgttggtgtctgctgttatttttggagttctataaatgacaaagactatcctgttgcatctcaagaatgcccagttctcatggcttatgcgttatcccttttgtaggtttttggaacaatatgtatcctatttactctatctcctcaacttgcacctgtacttggtctattgatgctagctgtgtcagttctagttggtaaattctctatgtctttttcattctcctaaactttttatttttggtaattactttggtcatctttgcttactttgcttacctctacatctactccctcggtcaaatctcaaaagctgtgtacaagagatcgactgttcctgtttataaatcgcatggattagctcaagcaacaatgtctgattgtgtatcagaaacgttctctgcaatccgaactgtaagttcttgacttcatcgtatttgtatcttttagggcagattaaattatctgaagaaactttgatttacccttgaagactcaagtaatttgtatctctttataggtaagatcattcagcggcgaaaaacgtcagatgtctatcttcggtagtcaggtcatatttcagacttcttactagctaaaactgatttcttctaaacaattgttcttttttctaactgatccataatctattaatctaaacttttgtttgatgtacagattcttgcttacaagcttagcggcttaaagcttggtactttcaagtctataaatgaatctataacaagagttgctgtttatatttctctgttggctctttactgtcttgggggaagcaaggtgaagacggtaagatatacctgcctgtaagacttgttgattgccattatgatcattcaagttgaaattatgcttcttgccccctaaaacataaagagaatcgtgtttttatgaatttctattgcagaagatagtgttactcgttgtttatactttctggaacaaatgactggatgtttctagctagaatcaagttactaccttctgaatttttaaataaaaaaaaactaagaatcaaatttctctgtatctctcttttgtgtagtttcttatgttgttacattttagctcttttgcactttatttttcttggttcttattcttaaaatttctccaacccagggtgagctcgctgttggaacagttgtttcgttcattggatacacattcactctaacatttgctgtaagtacctctgtctacacatcatttactgtcacacatatgctatacatgtaatttagtttaccataaccagtgattctgttatccaggtccaagggcttgtaaacacgtttggagatctacgtgggacttttgctgctattgacaggatcaattccattttaaacgcggtggacatagatgaggctcttgcctacgggttagaaagagatatacatacaaagaaagtccaagatgaaaaccttaaattgttcttgtctgctggcccaaatgtgaatatccgtcacctcgataagtactacatgtcaaatctgaaatcaactaacaatctacgtaccctaacatgggctggagatg

SEQ ID NO: 18124 - DNA, 3003 bp, Unknown
  misc_feature (1)..( 3003): 2750-1469P.txt file - cDNA_ID_1815418; gDNA_ID_1621103; Annot_ID_55928
acataagcgaaaaacagacaaatcgggaaccaaaatcattctctaaacaaaatgtaaaaaaatctgatttttggctgaaaaaaacaacaaaaatctgattgtcagtatcctacaaatcgataaatcgtaagaagaaaacataaaaataatattaaagttgtgtgctaaaagcaaccttaaacaaccaaatagcacttcgaccaatgtcgaaaagcaaaaaccgtaaagcggtgctcgtatgaatgttgaatgggataaagagcggcgcaagatctgatatttggctggaaaaaacaacaataatctgattgtcagtatcccacaaatcgataaatcgtaagaagaaaaacataaaaataatattaaagttgtgtgctaaaagcaaccttaaacaaccaaatagcacttggaccaatggcgaaaagcaaaaaccctagagcggcgctcgtatgaatgttgaatgggataaggtatatatgagattctcgacggaaagatgtatgggcttcgataaagaatatatgagattctcgacggaaagatgtatgggcttcggcccataactctttgatattagtatagaaccataacaaaagaaaaaaaaaaaaccttaaacaagtaaacactaaacccaattgattctttactaaatttagtaatcaatggttattgtgaaatgaaatttaacttttctttcatatgaaaaaaaaaattgaaaccatccatggatggcctagttttatttagataactaaatatctatgttttgaaatagtaatctattacatgacacaagaacgaagattaactaaatcgagaaagaaaaaaaagtgtagatttggtagacgctgaatatataaaaaaactaaagtgataaaacaaattgtctttttaaaaaagtatggaattttcaaatttcccattctttcggtatatgatgagaaccttcacatggattttatttttaacaacaaaaatcaatgttgaaaagtgtatgtacctatgaaacaaaatcagggtcttaactagttttttgttttggttttggttttaatcttttctagttgctttgccttatttataagcgcagatgaggaagagaaaggcgaaggcacatcagctgcatgggacgttgctgaagctgtggcgctctcattgtgtgatatcttcaatctctgttaatagctttgtaatggtggtaacaatccaaaaatacccaattacaatcttataagtaccaatcatcatccatcctatggtttttcttttttaaacaaaatccgatataaaattaataaaaatctattgtattaacactaaaggtctatttacgaaaatttatagttacaatgatatgaaatgatagaaaaaatgaaagattataaaattgtattgaccgaaaaaagaagtttaatatatatatatatatatagggatactcattagaaaatctatatgcttagtgaaaaatgactccttcccataatattaaaaacagataaacgaaattgttaactaaatttattcaacaataataaacttttaacaatgacaggtcacactttaaatggaaatatgcattgatagactttctcggttgaagttgtaactctagatttatttttgtagaatttaaagatgtattttgttccttttgttgtgagctatgaaattaataccttataattgtaggttttaggaagcggttgatgtatagcatgtgcagagtaagctcgaaatggctgagacgaaaaaaagtgtcgccacaatgatttactttttactactatacttttgatcattgggacctaatggatgaatgttgtgtgttgtggacgagtttatgacacataacaatattgtagacaaattgtctaatttgagtagagatactaaaatttatctccatataattgtatactgtatatgtataacaaataattcaattcattggcctaagatgttttattgtatctttgtagaattttacactttagagaaaaatcattgcaataactcgatgaaaaaaaatgtttatcttatcctagttacaactaactatctatctatctctttgtggtaggagatttgcatctgatcgaacgattcatatggtgccacgtaactatggtcccacttctattacgagatctactaagacatcagcacgtgtcggtgtcgtttgatccacgaggtcggtgacgcttagagctagttgaccggtacagtcggttattaccggttatactatatgtatgttttttggtcaaagatttggagctattttatagttaataaatcaagagttttttttttccacaactaggtcttaatttgtgattgtttttttcttccatttttccaaaattctcttatcaatttcaggttagtatttttgttactgtccctagcttttgactattgtactactgtataccctttttttttggcttgagaaattagattttgttatgtttgcgtaaaatatttgtgaactcaaaaataaaatctctttttttttcattgccgatattttttcttccatgaatgctgctgtaaagtattaatttccctctctactgagtttcttccaaatttctgatttttgggatttgtgcaactcccaagtcgatttcagtttctgggttttgatttgagttcgccgattggatttgaagttttagtctttgttggtaagttctatcctttttgagatgttgaatttgctcttctgataattagggcttctgattattagcctaccaatctttgatttggttttcatttccttcagctaaatatttgtaattcttggatcctgaatgattaaccatcttagtttgattggtgaaagtataccatagctgcttaggatccgtttggctttgttatttgctcagattctgaaaggaagggtttaaagtttcaagcttttcattccgctgaatcagtccttgtatttggacggcttgatctgttatctgctctcgtgggtggggcatg

SEQ ID NO: 18125 - DNA, 3003 bp, Unknown; identical to SEQ ID NO: 18124
  misc_feature (1)..( 3003): 2750-1469P.txt file - cDNA_ID_1815418; gDNA_ID_1621103; Annot_ID_171493

SEQ ID NO: 18126 - DNA, 3000 bp, Unknown
  misc_feature (1)..( 3000): 2750-1469P.txt file - cDNA_ID_1815418; gDNA_ID_2926187; Annot_ID_200730
taagcgaaaaacagacaaatcgggaaccaaaatcattctctaaacaaaatgtaaaaaaatctgatttttggctgaaaaaaacaacaaaaatctgattgtcagtatcctacaaatcgataaatcgtaagaagaaaacataaaaataatattaaagttgtgtgctaaaagcaaccttaaacaaccaaatagcacttcgaccaatgtcgaaaagcaaaaaccgtaaagcggtgctcgtatgaatgttgaatgggataaagagcggcgcaagatctgatatttggctggaaaaaacaacaataatctgattgtcagtatcccacaaatcgataaatcgtaagaagaaaaacataaaaataatattaaagttgtgtgctaaaagcaaccttaaacaaccaaatagcacttggaccaatggcgaaaagcaaaaaccctagagcggcgctcgtatgaatgttgaatgggataaggtatatatgagattctcgacggaaagatgtatgggcttcgataaagaatatatgagattctcgacggaaagatgtatgggcttcggcccataactctttgatattagtatagaaccataacaaaagaaaaaaaaaaaaccttaaacaagtaaacactaaacccaattgattctttactaaatttagtaatcaatggttattgtgaaatgaaatttaacttttctttcatatgaaaaaaaaaattgaaaccatccatggatggcctagttttatttagataactaaatatctatgttttgaaatagtaatctattacatgacacaagaacgaagattaactaaatcgagaaagaaaaaaaagtgtagatttggtagacgctgaatatataaaaaaactaaagtgataaaacaaattgtctttttaaaaaagtatggaattttcaaatttcccattctttcggtatatgatgagaaccttcacatggattttatttttaacaacaaaaatcaatgttgaaaagtgtatgtacctatgaaacaaaatcagggtcttaactagttttttgttttggttttggttttaatcttttctagttgctttgccttatttataagcgcagatgaggaagagaaaggcgaaggcacatcagctgcatgggacgttgctgaagctgtggcgctctcattgtgtgatatcttcaatctctgttaatagctttgtaatggtggtaacaatccaaaaatacccaattacaatcttataagtaccaatcatcatccatcctatggtttttcttttttaaacaaaatccgatataaaattaataaaaatctattgtattaacactaaaggtctatttacgaaaatttatagttacaatgatatgaaatgatagaaaaaatgaaagattataaaattgtattgaccgaaaaaagaagtttaatatatatatatatatatagggatactcattagaaaatctatatgcttagtgaaaaatgactccttcccataatattaaaaacagataaacgaaattgttaactaaatttattcaacaataataaacttttaacaatgacaggtcacactttaaatggaaatatgcattgatagactttctcggttgaagttgtaactctagatttatttttgtagaatttaaagatgtattttgttccttttgttgtgagctatgaaattaataccttataattgtaggttttaggaagcggttgatgtatagcatgtgcagagtaagctcgaaatggctgagacgaaaaaaagtgtcgccacaatgatttactttttactactatacttttgatcattgggacctaatggatgaatgttgtgtgttgtggacgagtttatgacacataacaatattgtagacaaattgtctaatttgagtagagatactaaaatttatctccatataattgtatactgtatatgtataacaaataattcaattcattggcctaagatgttttattgtatctttgtagaattttacactttagagaaaaatcattgcaataactcgatgaaaaaaaatgtttatcttatcctagttacaactaactatctatctatctctttgtggtaggagatttgcatctgatcgaacgattcatatggtgccacgtaactatggtcccacttctattacgagatctactaagacatcagcacgtgtcggtgtcgtttgatccacgaggtcggtgacgcttagagctagttgaccggtacagtcggttattaccggttatactatatgtatgttttttggtcaaagatttggagctattttatagttaataaatcaagagttttttttttccacaactaggtcttaatttgtgattgtttttttcttccatttttccaaaattctcttatcaatttcaggttagtatttttgttactgtccctagcttttgactattgtactactgtataccctttttttttggcttgagaaattagattttgttatgtttgcgtaaaatatttgtgaactcaaaaataaaatctctttttttttcattgccgatattttttcttccatgaatgctgctgtaaagtattaatttccctctctactgagtttcttccaaatttctgatttttgggatttgtgcaactcccaagtcgatttcagtttctgggttttgatttgagttcgccgattggatttgaagttttagtctttgttggtaagttctatcctttttgagatgttgaatttgctcttctgataattagggcttctgattattagcctaccaatctttgatttggttttcatttccttcagctaaatatttgtaattcttggatcctgaatgattaaccatcttagtttgattggtgaaagtataccatagctgcttaggatccgtttggctttgttatttgctcagattctgaaaggaagggtttaaagtttcaagcttttcattccgctgaatcagtccttgtatttggacggcttgatctgttatctgctctcgtgggtggggcatg

SEQ ID NO: 18127 - DNA, 3000 bp, Unknown; identical to SEQ ID NO: 6734
  misc_feature (1)..( 3000): 2750-1469P.txt file - cDNA_ID_1815437; gDNA_ID_1621103; Annot_ID_55922

SEQ ID NO: 18128 - DNA, 3000 bp, Unknown; identical to SEQ ID NO: 6734
  misc_feature (1)..( 3000): 2750-1469P.txt file - cDNA_ID_1815437; gDNA_ID_1621103; Annot_ID_171487

SEQ ID NO: 18129 - DNA, 3003 bp, Unknown
  misc_feature (1)..( 3003): 2750-1469P.txt file - cDNA_ID_1815437; gDNA_ID_2926187; Annot_ID_200736
ccgattattcctctgagtttaccgactctaagcacagtcaagctccaaatgtcgaagagactctctcagcttatgaagaaatgggtgatgttgatcagttccattacaacgaaatgatgatcaacaacagcaactggactcttaacgacattgtgtttggttccaaatgtaagaagcaggagcatcatatttatagagaggcttcagattgtaattcttctgctgaattcttttctccatcaacaacgacgtaaattgcgtttattgtaatgtaaatcaaatttctaaggcaaaaccggaaaaaaaatgttttgttttttgttttgtcttaaatgctttgacaccaataaggcaaatagcatatatggttaaaggaatggcaatatgaaagaaaagaaaagaaaagaaaatgatttaaaagattcatcaatatcattgaagattttacacaccagaagtagcaaagccgtaacacacaaagcttttcgctacaaatgcatcatacataaatggagttttgagagtacaaggggcgatacagatgtaacgtggaatgtagaaagtgttttatatagcagaataactgaagtcaacactatcatcattggagacggaaggagaaggagaaggagactcagcagaagcagtgagtaccacaaaggcaccaaagagaatagtgataatggccgtgaagttgataagaaatgcttcggatccatacttgtcaagccctccattctccaagaaagtcagcttttccagaaaccctaaagctgcattcccgacagcaagtatgtaaacaaacaggccaagcattgcgtgccacggaagcaatccgcttttcaaatttgttgatcctcctgggaagaagaacactatgaagctgtacacccactgtaaagttcaaaactcttgttctggtcaggaacaatatacaacaataggtaaaaacatttttccatagaaattgatcaacttgttagccattttctatgaatcagccggtccaatagctttatatacagtgttttctgctgtctgtaattgttctttcagtttgatacagagaactcagaaacatttataaggttgatttagtagctgaaccaaatgaaacacttatcaaaaggattcctatgtaaactgattacatgtataatgggaaaatgtttgtctaaggagcaaaacgctatggaatttacctggaagccataaagagaaatgactccaataccaatccaggaatggagactgtagagattagggatatggctttcattgtggttcttaaaggctgcacagatgccaaatatcccaagagccagagcaatggcatggagtataaggtggatcaacttcttcactggtttctccagcggaagcgatttgtaacttatgatggctgcatttccattttcaacaaacaggtttatataaagtgatcatcatcaacaatactaatcaaaactgaaatgaaagtaatatcttatttctctcgttgttgaacagatgttgttatcagttaccttctcctcccaagattataaatccgatgagcatcagaacaggatgcagctggatcacataagaaaacaaaatggatcagaacacaaacacagacggattaaaaacaactgaagagatgtcccctttgctttggtaacacaacgataatgtcgatttttggatgctagttgtgaataccatcaactaaacctaaaccagaagatcgaaacatcatcttacgtacattcactcacactgtaataaacagaatacgaccccaacaacactcatagatcctaaatcacgtccatagcaaaacttgggacaaaccagaggactattgcttccaaaagagtcattttacaagctataacagatatcaagacaacaaaagaattctcctttacataataaagtcactcactcagaaacagtactgaggaacaaataagaagcttcgcagtcagatacaagacatacaaaaagtcaacgcagatgcgagagacagaaaagagaaaactttaaaggagattaaagaaagaaacatacattgaagatgagattcttgttagtagcttcccaggccaatccacctctgtaactgatactccaaaccagtaccataatcgccgctattaccgccagcgcgtgcgccacaaacgtcaccgccatcgcgtttatccggacagccatatctctttctctcctgcaactgtgtttctttcttcttgtcgttttttctactcttctaatctcctttgtccgattaatcttcaacctcggcctctgagacgaatcaatcctcagattttccatttcttcttttcaataatccactgtgggcccttcttcgcagacacgtgggcctcacgatccattttcgatttatctattcagacgtgtaatttcgtggggcagttctcgataaacgactaatgtttcgccacgtggatattgtagtagctgcatctactagttccgcttccgcgcttcgtgtctgtttcttctaccaccaaccaaaccattaaaccgcgatagagcatactggatcttttttaaggcccattatgtacatttctgttggaccaacccattgcgcaatggaaactattcatatgatatcatttcttgtcgttttcggatttcagtgactgtgttatgctgtttttccaatgatcgaaacggcatgttgttggaatgggctagtgggctaacttgtgaaagaaggtaacatcgacggttcttctcggataaagattaggctgagagcgccacgcacacaatcaagagcctgatacgtggcatgacacgtggtatttcgtaagataaagtacagaggacacagccatccagaggtagttcggctatgcgtcttcctcctctttcccatactctctgactctgtataaaactttgaagaagctcctcatattttctcagaaacaatttggatgcatagaaaggaaaagaacaaaatcaaatctagcaaataaaatg

SEQ ID NO: 18130 - DNA, 3003 bp, Unknown
  misc_feature (1)..( 3003): 2750-1469P.txt file - cDNA_ID_1815454; gDNA_ID_1621104; Annot_ID_55954
tttagccctgtttctgggtcattgtttcttagaggacgaaatgtaaaaggagagttttttaggttctatattagggatacgctgcttattagctcttttgggatgattactcttcaggacgccttatgtacaagagcaagtcagtattggttcaggaccaccaggttctaaaatcaggtggtttaggtctacgagcaatgagtcacgttacatcaacactgttacatttgatgccaaggagggagctcctacactcgtcatggttcatggttatggtgcttctcaagggtttttcttccgtaattttgatgctcttgccagtcgatttagagtgatcgctattgatcaacttgggtaagcaactttggtatcattcaacttgtcttcctcaactgtattagtcacaatatggccttttggttgcttcaagtgttaaagatttcatgctgttgccatcacttgattttaatgtcttaaaaatcgaagacaggatattgctgcccattttaaactacttgtatacattgtgaatgtataataaggtagttctctctttttcttcgtaggtggggtggttcaagtaggcctgattttacatgtagaagcacagaaggtatttattccctctactgttaatgaatcgtggctaaactttcattggtaccctctcagtctcttaatggcttgtatatgagttgatataccagtaatgaaactgcattgttccttctttaattgtgcagaaactgaggcatggtttatcgactcctttgaggaatggcgtaaagcccagaatctcagtaactttattctattaggacattcttttggaggctatgttgctgctaaatacgcgcttaaggtgaattctcatatttggtataactaaattagtaagtggtgacagtttttgattattatgatatctgacttttcattgggcatatctctggatctttcagcatcctgaacatgttcaacacttaattctggtgggatctgctgggttctcagcagaagcagatgccaaatcagaatggctcactaaatttagagcaacatggaaaggtgcagtcctaaatcatttatgggagtcaaatttcactcctcagaagctggttaggtatgctcatataatcatttcccattcaccaataggttgattagatagatactcatttcgttgatacaaatttatggcactcaattgagcatgggaacacttattcgatgaaattagttggcaggagtaatatattcactatatttctgtaaatgtgctttgtgtgcagaggattaggtccttggggtccaggtcttgtaaatcggtatacaactgcaagatttggtgcacattcggagggaactgggctaacagaagaggaagccaaattgctaaccggtaagtaattgtttctttaagttccatagaagttatggagagtgataatgcaatcgctgatagtgatggttcgttttgcaatgtagattatgtgtaccatactttggctgcaaaggctagtggagagttatgcttgaaatacatcttctcatttggagcatttgctaggaagcccctcttacaaaggtatgtccaccaaaaacattgctgataaagtttctgcatactcacactcgatgactcctcttttgtgtgcagtgcatcagagtggaaagtgccaacaacgtttatctatggaatgaatgattggatgaactatcaaggtgcggtggaagcgaggaaatccatgaaggtcccttgcgaaatcattcgggttccacaggtaaatctctaaacacattcatttgttttctcatttaagaggtgaatatagagaagaagatgacgcttacaagagattttgtttgatcgcagggtggtcattttgtgttcatagacaacccaattggttttcattctgcagtgctttatgcttgccgcaagtttatatctcaagactcctctcatgatcaacaactcctagatggtctacgattggtttagtcatagtatcttgttccttttaccttccaaatttattctatatgtgtatacaagtatatatgaaaaagaacataaaaaagaattactttctttatttgaatattcggttgtgtattggagtttcaagtcctctttccatgtctaaaagttctatttgtaacgttcttgatttcactctaaaacctcttaaagtgtttcaaatgtgatctcattatcgacatccaagttgtaatctttcacaatccacaataatcttttatctcattttttacattttacatatgaaacaaaattatatgtgcttgaaatggggaccactaggtctggtaaattcttattgttttagacttttagtcatcaacataaggttaactttccttgtacagcaaggaaatagtgtatttaccgtagcgggaagggtaaagagaggttacaatttggcatcattcttattttagtagagagacctggacttggtggtcgaaacatttccaatggccatgccgacatgttctctctcagacagctcaatcagctgaaaacttgaggaagaagaaactagagagggttttttgacctgattatttattttggctgactcattcttctcacatcccaacaaattttcgttgatatctgtctctgtcttcatttccgacatggaatttgttcaacatcaattcttttctttagctttatgatccctcacaaataaataatgtccctctctcaatttgcagcaaaccgctgacgatcaaaaggtgagccaagtcttttacatgtcgataattaggtttggtcaatgaaatgtttgaatgtttcattcttggtttctgatacgatgagaagaagtttggtttcaacacatttttttgttgttgttgtgatatctaaattctgatcatttcaatttgatcaaatgatcatcaactgatttaagcatccttaaatgggtttggatttgcacaatagagaaatatagaaagcaaggaaagatg

SEQ ID NO: 18131 - DNA, 3003 bp, Unknown; identical to SEQ ID NO: 18130
  misc_feature (1)..( 3003): 2750-1469P.txt file - cDNA_ID_1815454; gDNA_ID_2926185; Annot_ID_140727

SEQ ID NO: 18132 - DNA, 3003 bp, Unknown
  misc_feature (1)..( 3003): 2750-1469P.txt file - cDNA_ID_1815458; gDNA_ID_1621104; Annot_ID_55952
ggagatatcctccagctcaatcttggaacgtccgctacaagaaaatcaaacgaaagtaaatttcaaatattctactcctagggaaatattggccagtagttctaaaaaaaatgcatgtcaaatgttatagtaaatatgttaaatgatagtaagatatttcgttgaggtaaaaaaaaacagaacaatcacatgtaatgatgtaaaataaatagctatagattatatgagttttatttatttattatagatatctattatatattagacgaaaagattcattattgtctcttgaaatattacggttaataaaacctgtttagaggctctttttaataaacacatctttgaacaattctgatatagtgatatgagtacattttgcattaattaataaaacataaacaataatgaatatatatacccgagttcttgaagcggagaaagagtgaggatcttggactcgccattattgtgagacaaaaggatcttccctcgagttgtggtgatgggttccttgtccgacaagcaatagcaaggcttccactcggcttcgaagagataatcagctgctttgtagaggagacaaagaaatgaatcaacgatgtctaagatacagaacacgacgaagctaacggcttcgttcagccatgttcctgctacggtcgctgctccttttatcttcatcacagccatggctcaacaaaagcttagagagtttgatatacaaatcttctttatatatttgaagagagatccgtgatgatttttccacttgtacaattgtgtaatgtactttatctataatatatagaacctctctctgtctttctgtttttctctctctatttgagagttgagactaggagatattatggagagaaacgaagaatcagagagtcgtatgaatgtatatagtctatagatgatacgtgattaatatataatatgatgtcataagttgagattttgttaaagactctagaattactatataaggtcacggatccaccggtttgaccggtctggtattaaaaacattggctaaataacatgtggctgtgagttaattttagactctccttatatgaatttgtcgaaaaatctatatatgttgataggaagatggcgaatttattgcaattaactttattttttatacataaaaaaatggaacttatttttgaaataagaaaataacttttgctggaaacgaattcagaaggttccatagtaatgcgtgtaagagaaactatgtgtattttcttaacttgtgagttgtgaatgaagttgggagtgacaaattggtggtttttgtttcttctatatgtatagatgtggtacataattgtatcacatgactatattattctccatatataaatgttttctatcataattgtacacacagtattgtttgtcttgcagtgaaaacatttaaaactttcttgaatgtacaaaggtgccagattcttcagatgaacaaaatacttagtatggaaaaaacttagaaattgagaaagattggaagataaaagaggtaaataacagttgtaaccaaataaattcaaaacaaaaaaggatataaaaagataaatgtggtttgtgtcattaaacgcccaaagaaaaagaggtgcatggtggttgaaccgtcctgtgaaacagaagaatcagtccatgacttggctttatcaaatgatcatgcacaattcttcatttcaataagcttttattttcttacaaaagtatttacttttccatttgaataatcatttcttgttcctctaaaccttgctaatccaattatttcttatctaactcgtttatttctttgtttcatgacacgcaattatatctattttcagaccaacgtagaggttttaataaacaatatatcaccaattcttttttttgtttgtttgttacattgccgtttctggacgtataaggttttctaatggcgatatggttgattcgtccttatatgtgaaaaattctattcactcgtaccaccaaggcaacaactaatataccattatactagttatgacaaatatatatcaagacttcctaacattccggtgttaaataaataatcgacacatctaactgtaaaacggtacggatcacgtaggttaagaaaatgacatacatgatctttggggtatgatgtctttctatcaaattaaatttgtttctttcactcccgagtgtattttaattttgacgcaatactatttctttgttgtataaatttggatatttggttatcgtactgcgtggcagtccatgcaatttcatatatatatttagaatttttatttcccttggatttgcctatatatttctatctttcgtttagtccataaaatttactacatatactacaatacaaatgttgaatgttttaaccagaaaaagaagaagaagatcaatttccattttaaaaagttcataatttttgttctctctcatgatcatactttggcggggaatttaaaacatgtgttaagttattgattactcaataacagaaatatggatttttagtagtgggccattattgagctattatagcggcccatgcgaggctgaaggtgtcgtgatcggcaagtcaagaaaccctagccagagattgtacagataccaaacgtccgtcgcatctcagatcatcgacgatcttatgtcactagacactagtctttttgtaatacagatcagagtcgctcgtgtttgttttcctctcctattgtgcccaaattttattttgttgttacttgcagttttgcattcaacttgtttgattaatgtctctgagagaccaagttcacgttaagacgtgtctttttactcagaagacaatggaatatgaagagacaaaatgtctatcattttttgaagtgatatttctcatacaagagtgcatttaacaagtaagattttgtcagcaactaagatttgtttgagaaatgcacaaagtttgaaattctagtcattccaacaatg

SEQ ID NO: 18133 - DNA, 3003 bp, Unknown
  misc_feature (1)..( 3003): 2750-1469P.txt file - cDNA_ID_1815462; gDNA_ID_1621104; Annot_ID_55950
ggactaagattctcaagaaatcaggatttgttgcgaaaccattcacaagacaagagaacacaatgattcagacatctgctgttgcttgttacggcatcgctgtcggaggttaatttaagaacataaatttgcttttatttatttcttaatagtttattttcttgcgaaacaagcaaagattcagtgaaaggatctgtgaaacagttccaaacatactaaaatatattaactttttgaaaaacttttgggttagttgagtcacaaaaaagggttgatattgcttttgcttttgggtatgatataaaatctaagttgtaaaattttgatttaaaatatttgagtatttgtttttctttttcaggtgggtttgcttcatatcttctggggttaaaccataagacatatgtgttgtctggtgtgaacttggaaggtaactctccaaagagtgtgaaagaacctggccttggttggatgactgcttatctctttgttgtctgtttcatcggtctttttgtcctaatccctctccgaaaggttatgattgttgaccttaaattaacatatccgagtggtttagctactgcggttctcatcaatggcttccacacacaaggagatgcacaggccaagtaagttcattaacctattttacaaaaagtgatattgttacataagtttcctaatctttaattggaatcgatttgcaggaaacaagtgcgtggtttcatgaaatacttctcatttagtttcttgtggggtttcttccagtggtttttctctggtattgaagattgtggctttgctcaattcccaacctttggtttgaaagcttggaaacaaacgtaagcattaattatacaaaaacaaaacaaaaatatttcagtgaaacgagttcttgaatcatataataactaaaaacttttttttggtaggttcttctttgatttcagcatgacatttgtgggagcaggaatgatttgttcacatttggttaacctttctttgcttttaggagctatcctctcttatggcttaatgtggcctcttcttgataaacttaagggctcttggttccctgataatctcgacgaacacaacatgaagagcatttacggctacaaagtcttcttatccgtagctctaatcctcggcgacggtctttacactttcgttaagatcctctttgtgaccattgccaatgtcaacgcaagattgaagaacaaacctaatgatctagatgacgtaggtcacaagaaacaacggaaagatctcaaggaagatgagaatttcctcagagataaaatcccaatgtggttcgcagtttccggatatcttacattcgctgcggtctcaaccgtcgtggttcctctgatatttcctcagctcaaatggtattacgttattgtagcttacattttcgcgccttctctggccttctgtaacgcttatggagctggacttacagacattaacatggcttataactacggcaaaattggtctttttgtcatcgcggctgtgacgggaagagagaacggagttgtagccggactcgccggttgtggactgatcaaatccgttgtttcggtttcttgtattttgatgcaagatttcaagacggctcattacacgatgacgtcacctaaggctatgtttgctagccaaatgattggaacggtcgttggatgcatcgtgacgccgttaagtttctttttgttctacaaagcgttcgacattggaaaccctaacggagaattcaaggctccttacgctttgatttacagaaatatggcgattcttggggtgcaaggcttctctgctctgcctcttcactgtctccaaatgtgttacgggtttttcgggtttgctgttttggtcaacgtcgtcagagatcttactccggcgaagattggaagattcatgccacttccgacggcgatggctgttccgtttcttgtcggagcttatttcgcaatcgacatgtgtgttgggactttgattgtgtttgtttgggagaagatgaatcggaagaaagcagagtttatggttccggcggtggcttcagggctaatctgtggcgaagggctttggactttacctgcggcggtgcttgccctcgccggagtaaaacctccgatatgtatgaagttcttagcttcataggatcagtcaaagagataagaagacttgtgaagttagagtacttagaagacgtcaatgatattaaaatcatcctattcttagaataacaggtagacttctgaacaagaacatctcttcttctaggaattaagactaaaatctacttacatccggatgattcatgctctgttttttggtttggtataatttgtcaacacatctagatctgttccatttccggttatcttctattgggttatctctgaaactgttatgggctcggcccataaatttaaaccttggtgtaacaaaaagtaataaaatcagctatttaatcctatatatttgtttctttttttattatataggaagaaatccttgcctttagattgcatacactagaattttagtattttcaaaaaagaacactatatttcaaataaaaatggtatatatgataagttttgttaagatattatattcaataaattgcctaattcaataagcatattttagtaaaaaatcgcaaaatattcatcatctactaaacaggtcaagatgtatttgactatcttaagaaagaaatattaattcactttgaccaaataaatggacaattaggtaaccaaacaaaaaccacatgaaagtaacaagacagagaattaggcaaaccaaataaataactcacacaacccaccgctcaaccacctaccccttgtaatatatctctccccttcttctttttatttcattatcttccaaaatcctcaccacaaaacattatataatttcctcttcatatttcaagaaaactttaatctttttttgtgtgtagaattctatatttctggtaactaaatg

SEQ ID NO: 18134 - DNA, 3000 bp, Unknown; identical to SEQ ID NO: 6209
  misc_feature (1)..( 3000): 2750-1469P.txt file - cDNA_ID_1815462; gDNA_ID_1620864; Annot_ID_51303

SEQ ID NO: 18135 - DNA, 3003 bp, Unknown; identical to SEQ ID NO: 18133
  misc_feature (1)..( 3003): 2750-1469P.txt file - cDNA_ID_1815462; gDNA_ID_1621104; Annot_ID_171527

SEQ ID NO: 18136 - DNA, 3000 bp, Unknown; identical to SEQ ID NO: 6209
  misc_feature (1)..( 3000): 2750-1469P.txt file - cDNA_ID_1815462; gDNA_ID_1620864; Annot_ID_170413

SEQ ID NO: 18137 - DNA, 3003 bp, Unknown; identical to SEQ ID NO: 18133
  misc_feature (1)..( 3003): 2750-1469P.txt file - cDNA_ID_1815462; gDNA_ID_2926184; Annot_ID_140724

SEQ ID NO: 18138 - DNA, 3003 bp, Unknown; identical to SEQ ID NO: 18133
  misc_feature (1)..( 3003): 2750-1469P.txt file - cDNA_ID_1815462; gDNA_ID_2926184; Annot_ID_200509

SEQ ID NO: 18139 - DNA, 3003 bp, Unknown
  misc_feature (1)..( 3003): 2750-1469P.txt file - cDNA_ID_1815466; gDNA_ID_1621104; Annot_ID_55949
actcacacttcttcaaaagcgaatttgcttgtaacatgttaatataaaattattattaaatctataggattgtccttaatgggccggccttttacgatataaaatttggttcaaataaatgtcgaatacgtcttttcgttcagcccatgaattgactaaacaaaggggattagaatccaaacaatcaaatttcttctatagtttagtttagaacaagaccatgaccatgaccaatattatatatatcgattattcgtttttatatgttctatatgcttaaaccaaacttaaaatgtaaaagaaaaacactgtgaatcattttcagagttatgatgtattttgttaggaaaccaaacccctgttaaaaactaatactgaaagtctgaaactatgacgatattcactttcaattggattttttttttctatttgatttaaggaagtacttttgaacccgaaaactaactgaaacttaaccacacacaaaaaaaaaggatttgtatcttatattgaacactacagaatttcgacattagattttttatgattttggttttcataagagtttaaaaatgtgatcatctgttttggacactgcaaatagagattttaaaacaataaaccaagtagatataatagtccgtatagtttgtccttatatataacattataggtgtaaaacacggactacataaaagtggacacataaatgcaaaattgttactacgaaactttacactgcatgtgactgatattttacgctcattacatttggatcattcgtagtgataaattaattcagggtaacatggcaagtaagtgagaacgtggtcattaatttcccccaactagttactaaaataactaaggtaaccttcgaacaaaaacaaaactttggtaaaccaaaatacaaaaacttaggtaacatgacaatgaaagtaaagaatatatagtacttgttgataagaatatagtactcgttaataaaacgctgtcggtagaagcgggtttggacgcaatcgcaggaattagatggaaaacaaacaaaaaagaaaaagaaatagagttttagcaaagagtcaaaaagagtcattttcatatatagtttggggtcaatgtagggctataggaggataagttgtgactttaagagtgaatgagattctttctcaaatgaatggtgtcaaggactagtattcattttttcttctttcgtctccatccacctatcaatatccccaatcttttttacatttttgaaatgttttttgttttgttttgttttcctcaattttagataataagtagacgaatctaatccctactaggcctaatccctatataatacacgcattttatgtcatattagaaagcaacatgttagttgaaaagtttaaagtgttttggtttcagctttgtacccactattagattttaattactaatttttttttgtaactgatttatcgtttttagtattgatagatgttaggaactttatatcaaaaataaggtgagacctaatgtataaaagagaagcaatcaacacattaccaattcagtttaaatagaaaatttgctaaacttaaccccgcatgcccttgcgtaaagcattcaaagcacaagtgaaaataaacccacacttcagaagttatatgttagtcaattgtctaattttgattgctattttccttttctctttctttattttcttcatcgccgatgtggtgttccacaatctattattcacgtttacttaggttttgttaatatatattttcttcccctcctacgtgttttcaacatattttcattaattttctctattttcattctgggaattagatctttaacatcgtcactactcatcactgtcaccagtaatgagaaaaaatacaaaataaaaccacacactctcaaagctggatttcttgtcattgaactatcgctaattaatactgtggaactcgtagaataatcaagacgaagggattgcgtagaaagagaaacgaaaaaaaagaaagaagaaagtgcattgtccttgtcatgacatgtggaagtatcggtcttatatggtccattgagccacactcatttagaatctcactactttttcaccattttcacatctatacacgattatagcatctatatacatttactttttcaattattctgctattatgggttttggatattcatgtcctaatcattataattctcttaaacaaatatcgaatttcgaatattttttaaggttattggctatatgtactatatttctatagaatagtttttgttaatatcatcgatcgatcttcagtcttattttgaactatctaatatattcagtggcttttcatatggacataaaacctaggccagtgtcgaaagttcataaacttcgaagtcaaaactagctataatggttatctttgaaaagtaactcaaatataaggagagtagaaattctacacgtaatgctgtccgagacatttaattatggacgatgtgattgcagaaacaattttgttttcaaaccctctcttgatcaaaaaggacatttaaatcattgcatccacttcaaccacacacattcatttggctgtaataacatttcaaagattcttacaaaacaagtgaaatgtcattaaatgtccttttagaacaagatgctaacgacaatctacttggccacttgacttgtataccaaatttctcccaactttttgttcacagaatttgcgtttacaactttggcgtttgtgttttgacggattcgtctaagtgggacaatgcgcgtgtcggacatgcgcacttaagagggtagagacagtgagttctttagctttccttatattctctttcaaaccaaaaaagagactactattttttgtacacttagactaaggaaagcaaagtttcatattcctaaaaattctggttttataagtatcaaagacaaattcagtctccatggaaatagagcaaagaaggatcatg

SEQ ID NO: 18140 - DNA, 3003 bp, Unknown; identical to SEQ ID NO: 18139
  misc_feature (1)..( 3003): 2750-1469P.txt file - cDNA_ID_1815466; gDNA_ID_2926184; Annot_ID_140723

SEQ ID NO: 18141 - DNA, 3003 bp, Unknown
  misc_feature (1)..( 3003): 2750-1469P.txt file - cDNA_ID_1815470; gDNA_ID_1621104; Annot_ID_55947
tcgggtcaaccgatgtgtcgctgtacaagaaggctgtggttgatgaggtcaacgcttttaaagcgtagtgtcggaattagattagagtctgaataaaacgggaattagagtgctttgtaataagtgatgagtttatgtaccccatgattatcttctactttgttagttatgtctactactttgttagttttgacttttgagcaagtcttgttaagattcgcattatccaaaagaaaatttaaagccgcattaacagtgtttagctctggtgttactaaagaaaaagtgattatgcgggtcaaacacttctcaaatagtttgctttgatttctttggagaactgaaatgcatgccgtttcgaaatattagaatgcatgtcgtttcgtggatttcagtaccagtaaaggctaatgctgatgcatcgttgcattttaaaaatcgtgtcgtttttcattccgttttagtggccactcttcgcaaccagataagaactcgaagattttctttttctttatcaaaatgcaatctttatctctgcaatcgcttccatggaaaccaaattcagtgactttacctgaaattaatcttttgaatcccaagcaattgactgcctcgagttctcagtatcgtagaactcgaaactggagaattagaagttcgtcggaagataatgtagcaatttcgagtgacggcggagatttgaagaattctctgtccggtattgtgggaaatcaagtggaggagctattgagcagagaagagaacaaaggtttgcttgatggtctggaaaaagcttcgttgagagtggagattgcgaagagagagctcgaagatatagagagacaagaaattgaggcgaaattgctacaggattatattaatcagctcgaatcaagagccgcagaggtgagagcttgttctcgaaatggtgttagatatgaaaatgattgaacatttgattcttttgctctttggaatttgaggtttttgggaggttctactatagagtatagattaaggttgcattgagaatgattggtttatattacaatggactagtgaatttgtgcagtatatatttatatgccaggataagctcaagttgtgcattgtatgcttaggataggataggtaattcaaagtatcaatcaatatcaatggtgttgcttttgtgcttgaaacctggaaatggggtttctcttagtttgtgtgaaggtacttcattagataaggttactaactaaatcatgagtttggttgcattttgtgttttctcgtgttttggaacaaagtctctagtttggttttgtatttgtagacagagcatgttaatcttattcaatatctgattcaagattgcagaatgccagcaggagattgacgcagcaagatcaatggttgaggaagcagaacgctccttgtcattagcagataactcgacaattggaagttcggagaaaggttattcgattgataaagacaaggagaggttagaatctgcaaaagcggcagtgatcgcagctgcggttgggaccattgcggaactcccatttgctctttctcaagtcgcaagcatggagcagcttgttctgcccctgggaatagcgtttgcaagctgtgcattgtttggagtcacattcaggtatgcagtcagaagagacttggatgataatcatctcaaatccggagccgttgcagcttttgggtttgttaaaggtaacaacacatttgattactgtttctatctaacttctttgaattgttcaaaagcaattgcgttttgtgattgaataagcttaacagaaatggtaaaagaaaaagactttctttgtctttgtcatgttatatattgtgtggaagtatgagctggcaaagttcccatcgttgtcccgccctttggttgtttttaaattataatctgccagtaatagattactaatcaacgatttgatttattctaaataattgatgagttgattattagtctctgacctgtattatttggatctgtctttttttaaaaacagatttattatagattcgattttttttaatgtgttatataggacttggtatgttgagcagaggaccgccattggagctgagctgggaaagcttgttttcacatgggatagacggcgccgttttggtgtctcagagcgtcttgatatttgcgtttgcgtccataggtttggacttctgtttcaagatgaagctcttaagaccatttcctagctctgactagattgaagagcaaattaaaaatgtagaaatgaacaaaatcttcttttgaagactttatttgtttttttttatattattaattttggtctaaaatgtaaatgtttcatcctagatttttatgatctttaacttgtcacaaaaaaagttacacctgattttaaaagcatgatcataaggaatattgaatttagaatgatgaatccatacataattcaaattttgctataaaaaatgaatcagttgggataattctttcttttaactttgtataaaaagttatgaggaatatttatctttgtcaagtgatgaagtgattagtgacttgtgaacttaaccaaagaggtagatggggtcaaggccattcctagccattcattatttatagtaaagccacgtgtaataatcttagaagcttacagatataccacgtcagcacaaaacagttcttttgtctttcgatcgctctcaaatcgcgttttgtcgtggaggtcaactgatcagaaaaatatagcaagcagaaagtgaaaaacagctgaattattatttttctatacaaaaaattaaaaaattagtatccaatttcaatggggtttcgacttgttctcgagtaaactactagtctctatctctctcagctccagattttgtttcttcttcttctgtgttaaattcatttgatttgttgtatctgaaggcgaaattactggtttctgatttttggtggtattcagggcggttttaaagcgacggaagaagatg

SEQ ID NO: 18142 - DNA, 3003 bp, Unknown; identical to SEQ ID NO: 18141
  misc_feature (1)..( 3003): 2750-1469P.txt file - cDNA_ID_1815470; gDNA_ID_2926184; Annot_ID_140721

SEQ ID NO: 18143 - DNA, 3003 bp, Unknown
  misc_feature (1)..( 3003): 2750-1469P.txt file - cDNA_ID_1815474; gDNA_ID_1621104; Annot_ID_55946
gtacggtaaagacaaactctcgatgtctctgaaagatacatgtctgcatcctcaggcgagtctcttcataagcaaaaaccagataattctcttttgtttcttcgtttttatgtttcgtatatgcatgagaatcttgagcgcttaggttagatataatgtaggggatcctctagagtcgacctgcatttggtactcatgaaaaaaaaaaaattggttgattatttttccaaacataaacgatatactagtaatcttgaatgcacaacacatcaatatatgaaaaaatcattaaaatctcaattaaataaagagctacattatgattaaacaaaaaaaaacttcatggcgaaataccgataaatatagcaggagcgatatgctattctatagaattaattttcataattagatagttcataatagaaaatagttaagaagcagtaggatgaacccgatcatgataaccaatacaaccccatagagcaaacgcgatgaggatgatgaccataaggatggtggcaacgattgttacgatgaacgaagtatccatattgtttcttcaccgcaccaaattttttatttttttctaacctttcctcgtgtcttcttcttcttgaaattacatttatattgtaagtaaattggaaatagtggaagtaatttacattttgtcatcaagaaacatactagcaaattttttgaaattttacatttagtctcttaaaaatattacctaggagtaaaaattttgtaagtaaatcgggaaaagtggaagcttttacatttgtcatcaagaaacatactagcaaaatctggaaaattttacatttagtcacttaaaaatattaactaggaatatatataatagaaattttacatcttttggtattttgttggtcgtcaaagtaaacatgactatgttgattcgcttgtgcggttgtacgaagacaatgtactgtagagacaaactcttgatgtcgacgctatctggagactgcagtcttagataaccttttcatcgagttggaaataattagagaaaccaaacaaaatgcaagaccaacttaattctcttctcttgtaattctggagcttaagttagagattgggtgttgtcatattaaatttgttaatcatactgattactttcactcacatttgttcttgttattgtttatgttaaatcgtcactcacattgtatgcacatgtcagattcagaccaatgttaaaagtgcattattttgtttggaagcgtgtgagaaaacaaaaagtttatgtacataacataaatccaaaagtactactcgaataaagtacaaactttatatcttttaaactccacgtaataactcatttttgtttgttttaatcaaaaattcaaacgtctaaaatttcgtcttaaataagaaatgatattaagaaaaatatctttggattaataacagatcaccgaaaattagaatatggttttaccaacccaattaaattctcaaattaattggaaagagaataatgttgacaacaacaaaaaggaaataaatcgcatgcaatgaaaggaatgaatcttcttcttcttcttctctattaacgcttcttcttcttctccttcttcatcaccctcctccacttctctcagtcacaatggcgaccaaaaaatctctgaaatcacgtctccaagatggagaaaagcttctcggccactttcttctctccttttctccggagcttgcagagatcgctgcaagagctggatttgacttcattgtcgtctaccttgagcacggtgccggcgggattcgtgaagcgcttcactgcattcgagcaatcgaagccgctggttgctccactgtcctccgtgtacccgacattagtcaggcttgagctaagaaagcgttagatctcggacccgacggcattatgttcccaatggtcgaaaccggaagatctgcatccgaggcggtctcgttttgcctgtatcgtcctgacggtgttcgcggctgtgcttactccgttgtgagagactccagcttcggatttaacgaagggtatttgggtaattacgctgataagctcttcattatgtgccaggttcgatcctcaaatcccctttgattttcaattttattggacgaaattgttaaattgaattctaaaatgcctacttgtgaaaaaaatggaagttagaatttttatgcaattgatatattttgtgcagattgaatcagaggaaggtatgaaaaatgtgaaggagatcatagccgttgatgggatggattgtgtgatgatggggccgagagatctgagtgcgagtttggggttacttaacgatccaggaaacccgaaggtgaagtcggtcatgagggtggctgagacggcggtgttggcctctgatccggcgaatggtggagcttacttggcagggatggccacggctcaggacaaaaccggtgatctcaaggcacgtgggtatcacgtggtgctcgggtcaaccgatgtgtcgctgtacaagaaggctgtggttgatgaggtcaacgcttttaaagcgtagtgtcggaattagattagagtctgaataaaacgggaattagagtgctttgtaataagtgatgagtttatgtaccccatgattatcttctactttgttagttatgtctactactttgttagttttgacttttgagcaagtcttgttaagattcgcattatccaaaagaaaatttaaagccgcattaacagtgtttagctctggtgttactaaagaaaaagtgattatgcgggtcaaacacttctcaaatagtttgctttgatttctttggagaactgaaatgcatgccgtttcgaaatattagaatgcatgtcgtttcgtggatttcagtaccagtaaaggctaatgctgatgcatcgttgcattttaaaaatcgtgtcgtttttcattccgttttagtggccactcttcgcaaccagataagaactcgaagattttctttttctttatcaaaatg

SEQ ID NO: 18144 - DNA, 3003 bp, Unknown; identical to SEQ ID NO: 18143
  misc_feature (1)..( 3003): 2750-1469P.txt file - cDNA_ID_1815474; gDNA_ID_2926184; Annot_ID_140720

SEQ ID NO: 18145 - DNA, 3003 bp, Unknown
  misc_feature (1)..( 3003): 2750-1469P.txt file - cDNA_ID_1815488; gDNA_ID_1621104; Annot_ID_55941
tttcttatgatgtgaaataacatacgttagtaagagtgtgtttttccatagttggtacggacgaatatatctatttaatgtcactatcttatttatgtcattcgaatgagcattctttgtttaaaaattttatgtttaaaattttataatattgctttaaataaaaaaaaataaaaaaaaaagtaaacgaggaaatatggatctacaacagacggattaaatcatgtaaataaaacttaaaaaaggggatcaaaatggctgccaaaaaaaaaatcggatcaaaatgacatggaactaggtatgcatgtcaaaacaacttttaacagcatgaaaactttgacttttgaggttaagaaggatagagataccaaatttgcttgctcaaagaatatagtactacattgtttaaaaccgaaccgaaccaataacccaatatgtttattaatttaattaactaattatattaataatattgtaataactaaactaagtaattattatctacaaaattctaacctttaaaaatctaaggttctacttctaactaaataactaaactaaagtatttattatttctaaaactttaactcttaaaaacctaaggttatacttctaacttctaaaaaataaaactcaaaaaaaaactttcgtatttcatttgttctttcgtttatacggctaattgatttttttgaagtaaactaataccaaaccaaatccaaccgaactaaaactggttcaaacacaaaccaaaataacttcggttgagtatggttagagtattacaaaacccaaataaaccgaacccaaaattaaaccgaaatgcacccctgataaatattattactatataaaatatatataactttaataattacataataacacctaaaaatgacataaaaagcaaaaatcccataatcatattttctacaaaattgtaaaacgaaaacctttatctgcgcatccagggaatcgaaccctggtcagtaccgtgggagggtactatgataccactacaccagatgcgctatttctgacaaacaataatcgttttatatacttatatttacattttctcggttcaaaatcgttattcctgtaatatattgatccatcccacgatcttcttttcttggtcgtcttctgaaacgctaatcggatccagaagccatggacaaaagcatcagcatcacctccaacgttagcacgacgacttccatggaaaagatcgaccacgccgctagctggatcagcgcaaccgtaatatccgctttcttcacctccctcgaacgctgcgcctgcgtcaatctctccacctctcatgacgacgacgacgacgacgacgacgaatcccatcaccgtcctctcgctctctccgccgctcctcatccaaacgacaccgtttagctctgttttttaacctctggtaatttataaatttaatccctcgtttgtttcttttgataatcgattggtgtggatttgtaatttcttgatttgaaaatgtatgtctactgtgtgtaaatgtgcatgtctcagaatttgattgttttgcgtgtatctgactttatatacttgggtttaaaatcagaatgaatcatcgtttttgcatttacattgaaaaaatatcaagaagagaatttggtagagatcatttgtttgttttgaagttttcttttgtgatcaatgtttctcgatttacctttttcatttcatttctgatctctgcgttcaactattaaaaccggaacagcatcagtttcatgttttattttgtcaatgtgtcagagatcctgtcactttagatttcatagtttcaaaagtgattatttgatcatgtgggtccctgctgtgagaaccagtgggcactggcctttagtttggttaaaagcaggattcaaaacttcatactagtttctttgttctaaaatgtatttagcctttttcaaactcaagttgcacttgttgtacaaaagacacttttcttttgaatctaatttaacattacattcaaaaaaaaaaaaaacttcatactaagtaaatgtcgtgtttgatccaaacttttcccaatttgtttgcttagcagggtgcaatcttgtttaaatatctttgtcatgtataatgtgattccatctcttcatccatatagagaaaatcttgtttaaatgtcttttgtcatatgaccatattctcacttgggtttctagaaaaagttttgggttctttgagtttgttgaattggatctccttatggcttagaccgtcgttccaactgctgaagaagcaagtatgttgactcaaaacagtcacgttatatctctgtctctttgataattcttggcttttatgtgttgggtgcctagtatcatttgttttaaaggtttagggaacaaaaggtcataaactataataagaatactttttacaatgttatttcctcagcaaaagtagcacgcattcacattctccaagtttcatcatttgttatttatgaacgcaaacaaaaaaactgtactattaacaagcttttgttaagaaaaaagtaaggaaaccctcttaggatatgtatgtttcaacaataagcttatatctttactcattaagcccactagacaactttgtgagatagatcttataagaagcgtatcactttatccccgtgattacttctcaaaacaacgagttttgatttgtgctactttattaaattcacgttctgttttcagaaattttgttttttctgataggttcgtattgaaattgacctctttggaaactggatctttcataagatagaaagagaggtccccatttcccaagtttatcaaacaaaaagaaaaaaaaatctaaattgttctcatcttgagacaaccaatcagaatgaaccatctgagtcagccaaagggtttaatagtcaccatttgccaattgtattcatactctttcctttttggtgcgttattctaagagccctagtcagaattcaaacatttggcaatg

SEQ ID NO: 18146 - DNA, 3003 bp, Unknown; identical to SEQ ID NO: 18145
  misc_feature (1)..( 3003): 2750-1469P.txt file - cDNA_ID_1815488; gDNA_ID_1621104; Annot_ID_171515

SEQ ID NO: 18147 - DNA, 3003 bp, Unknown; identical to SEQ ID NO: 18145
  misc_feature (1)..( 3003): 2750-1469P.txt file - cDNA_ID_1815488; gDNA_ID_2926184; Annot_ID_140715

SEQ ID NO: 18148 - DNA, 3003 bp, Unknown; identical to SEQ ID NO: 18145
  misc_feature (1)..( 3003): 2750-1469P.txt file - cDNA_ID_1815488; gDNA_ID_2926184; Annot_ID_200500

SEQ ID NO: 18149 - DNA, 3003 bp, Unknown
  misc_feature (1)..( 3003): 2750-1469P.txt file - cDNA_ID_1815496; gDNA_ID_1621104; Annot_ID_55939
aatggcttttacgccggataatgagaagctcgagtaaagtttttgaaaaaacgttagaatagtgattgacaaattgttgaatactataatattgaagttgatctttaggaattacgtcaatttagaaactggtcggtagcaaattaaaatgtgttgtattgttgtatacgtttggttacgtgagacttgtataaatttacttaattgatataactaaaaaaaaggacttggtgtggtcaaatacgtgagttaattgatgttgcgttgggttctttacacctaaagtttagccagcaaaatctgtttaaattttttaaaaaacttattaatttgtaagtaatctgtttcatggcagaacgatcatacatatatatatatacggaaatcttgaaagaaatcgagacgataattccagatcatgtgatgatggtctgatggatctcatataacttcccgaccactacttctgtattgatgtataaacgccaaagagaatggtgagggtgacatttcttgtctaaaataatttaattgaaatatttaaactcgaaattaaaagatgacatattctacaactaaaagtaaatgaggttgtgggttttctttacatttttaatcattttttatggttgaattttatgattatcataatcataatacacaaactatcgaaagtggaacccgtatcacgatttttttgcctttattttattcgttgcctattaaaattaaaaggaagactaatgatactatcgcctgttccatttagatcctacacttcatgcttttttatatttctccttttggacatctaacatgtttataattactatagcctttaacgaaattttaagaaataaagccagcctataaatgaaatacaaaacggatcatatttgaggaagaccaatgtacatatgtgttgttatttgaacaaaaatttgtttctaatttttttcgaaattaatcttaaaagaacaaatgattcttatcagactttcaacaatattgatcatagtcgaaactcaaaatttcaagccaaattagaatcttaaaacctaacaatgaaaatatatgatccctcgtttacaaaaaaataaaaaataaaaataaaatatatagatatgatccctagtccttatttccgtaccaattatgatattgagagatagttttgggataaccattttcgtttactcgagataaattcactcatcagtttaaaataaaccaaaaccattaccacataagattcttatcccaatttaactattatatttctgctaattaattgattacatgttgtgaagtataaattgggccaactatagaggaatggtgtttgtttatgttttattttggctgctagtgtggttttcttaacttgttagcaatcattttactttttgaaaaaattgttagaaaactattaatgtgaatagttatttactcaataaatcttattgttaaccactgagaatttaaagcatttaaacatctgattattttaattctatgttaattccaggcattaaattttaagcgtaatttatagaagaagaaaaaaaatctagttacattccatctaagataggggtacaaatccatacaagagtctatcttctgtaattcttagcaagttgaacatttcttaatttttattttattttatttttggtcaaacgttttctttaatacaagtggcaaagatattctataacagttataatcatttatagttagggattttttaatcattttgtagtatttgtttttctcttttttcctaacaaagtttttggaacttttgatcatctctcgattgaaagcgaacatataaataatttttactactgcaaatttttaaaaagttaatattcgactttataaaagagatgagagtcaacaaaacaaaaagcaactaattttggacgtacgaaatgctttgtaaatacattgatatcacttatgtttataatatcactcatcccaagtgttggtcaacatttctttgataaaaattaaactattcaatagaacgaaaaccacaaaaaaattataaagaattattgataacaactcttcatgttaatcttatatatttttttaaaaatatttgtttttaggttttaatacaaacaacatgattctagtttattaaactaattaacgcaacttgatggattataaaaatatagcttaactaatccatcaaattaacaagtgaatcgcactataattctaaaagaatcaggtaggtccaggatttgtcttttctccacttctcaatttcccattaataatcccgaaaaggcattacgtaataattaatattttacgctgtagtattattttatgataaacatttccaaattttccaacacttaatcataatttaaggattaaaggaaatttgattggtgcattcccaccacgagtttgcttaacgtgtcgttaaatgcagccgtcggacttgacaatgcaaaaatgctacataatctaaataattaactctcgcaataagattcactaataataacatttttaacgacgatatataattttacaataagaaaaaaaatatgaatctaatatttatttaatattaatttactccattatctgaataatctagaatatgtcaaatatccttttattattttgtagctgtcgaaactatggtgaataaaatctcgaggaatatattagaaaacaaaaaagatctagaggaataataatattttaaatatttggggcacagttgtattgtgaagcagagaatcggttctcaatatattatccgaaaatgtcttaattttaaattttgttttttgtttgattctgcgatattggaatcacacactctgccaatttgacctttctctctcgcttctctttctctatccaatcggaaagagatcaaccaacgatagaggagaagaagaacttgcatacgcaaaaaaactttcccgggaaaattccagaaactgctttggaaaaatg

SEQ ID NO: 18150 - DNA, 3000 bp, Unknown; identical to SEQ ID NO: 6214
  misc_feature (1)..( 3000): 2750-1469P.txt file - cDNA_ID_1815496; gDNA_ID_1620864; Annot_ID_51312

SEQ ID NO: 18151 - DNA, 3003 bp, Unknown; identical to SEQ ID NO: 18149
  misc_feature (1)..( 3003): 2750-1469P.txt file - cDNA_ID_1815496; gDNA_ID_1621104; Annot_ID_171513

SEQ ID NO: 18152 - DNA, 3000 bp, Unknown; identical to SEQ ID NO: 6214
  misc_feature (1)..( 3000): 2750-1469P.txt file - cDNA_ID_1815496; gDNA_ID_1620864; Annot_ID_170426

SEQ ID NO: 18153 - DNA, 3003 bp, Unknown; identical to SEQ ID NO: 18149
  misc_feature (1)..( 3003): 2750-1469P.txt file - cDNA_ID_1815496; gDNA_ID_1620724; Annot_ID_165914

SEQ ID NO: 18154 - DNA, 3003 bp, Unknown; identical to SEQ ID NO: 18149
  misc_feature (1)..( 3003): 2750-1469P.txt file - cDNA_ID_1815496; gDNA_ID_2926184; Annot_ID_140713

SEQ ID NO: 18155 - DNA, 3003 bp, Unknown; identical to SEQ ID NO: 18149
  misc_feature (1)..( 3003): 2750-1469P.txt file - cDNA_ID_1815496; gDNA_ID_2926184; Annot_ID_200498

SEQ ID NO: 18156 - DNA, 1554 bp, Unknown; identical to SEQ ID NO: 6785
  misc_feature (1)..( 1554): 2750-1469P.txt file - cDNA_ID_1815504; gDNA_ID_1621105; Annot_ID_55974

SEQ ID NO: 18157 - DNA, 3003 bp, Unknown
  misc_feature (1)..( 3003): 2750-1469P.txt file - cDNA_ID_1815508; gDNA_ID_1621105; Annot_ID_55973
acaatgcgactagcagaatgtatgtactacataatcagattttatatattcttgataatctcttacagattttttataacaactgattatatgtaatatatgagtttagtgtcaaagaaaattatgataatatttttagaatcttgaaaaattaataacaagttatttacgtatggctgtggctgcttcattagtcattacgttagtcttttgaaattttcatgaccacaagaaaatatttcttccggttttgagatttttcgtaacaaacaaaattgaataatcgatgtacatcactaacttctacgtggcttgtgaccaagacaaatgactgtataaagaaaagaagtcgtcgttagggggaactcattttttatatttctagggctgatatttgatttgacaaaaaatattgtccaattatatgaaaaagtattacttaacaattcttctaaccattataatgaaaacatttctagggctgatattttagttttttgtaagaaaatcatgaaatgcattttgttttgtttgttttattacatgggccaagatatgaactctcaatttccaaatacagagacagctgaagatcaaaggataaggagtattttctttttctgtatacgtttcttggtttcatatgaacaaaattgattatgagaaaaagaaacaaccattagaaatatttattttatctagctatcttcaattattttgcctaacttgatgtgtcctttaggctttaaaaaaaaaacttgatgtgtccttttaagtgacacatcaatgaaccatatgtatagtctcttgttgttttataaagatcgattgaatttgattttcctctctatctatacgtttttgtttgtttaaaaatgtcaaaaatttgggtatccaggatgttcgaacgcaggacacgtatgaagtgacgtctttcaccgccgtaaatctttggattgacagtccggtaaaaacagattaatagcttgatagtccaaaacgcacgtataaaagtttttgcatgttgaaaatattcgtatccacacaacattagagatcaatcatgaaaccgatatattgaaggtcacccgacgtcaaatttcccctgaaagggacacctcaaaattacgtggttcgtgtaatcttttttcctttaagatagggatcggattatgcagtataaaattaagcaaatcgtatttggtgatatatcggttctaatgcataacatcttttatattcacacaatgaaatagctatttgttttcagtttcgagctaaagcccaagctccagcccaaatcaaacccatttgtacaaagaacctcactcatctatttgtgcacaaattctcggatttctccaacgctctcaatcattttataaaaattagaattatcttcaatctcgatatacgaacctaaataattgaaaacattttttttctttttatgtatttttcttttttatcaaatttctttttatgtatataaaatatttgtgaaagtttcttccacacatataaaagattaaatttctttttttatcccaagcttgaatatcaaaacatgagacaacaagagcaagtattagccaccacaaagcaatcatcttaaaactcaaaccccaaaacaaacaaaagacaaaacccgattgtttcgagcacaaacgtcacttgtggtttacatcgtcttcatcatctccataacttcatatctcctctccttccgctgccaccgttagcgatgtctttggacactgtggacaaactggtggtgttcttggccaagagagacggaatagacaagcttgtgaagacattccaatacgtggccaagctcgcgtgctggcatgttgaagccacacgacccgaagccgccgataggttcaagaagtgggaggtcgcctccggtctcagccgcaaagccttcaggtcccacatctttttaatattaatcactttatcgacaaagtggcatcatcgtaaatatagtttaatagatgaaatgaaatgaaatgttttagtcacttcttgattaatatcttatctcatctagcatatttgaatagtgactagtacgatacactttatattacaagaaaaatataattgaatagtgattatggtcgaattatgcgaacaggaccgggagatctctcacggggttcaatgcgctgagacgaaaccccggggcaaccccgatgatccgtttcttggcggtcctagccaattcaggggaaatggtttacttcttctttgatcattttctttggttatcaagaattggttcaatagacgccaagctcgccaagaaaatgagtttcatatccgcttttggcgaatctttcggctacactttcttcatcatcattgattgcatcttcataaagcaaagactcaaatccttaaaaaagctccagcattcgaccgatgaaccgaaagaagaaatcggcgccaaaattagcgagattcggggagatatagtaatgaggttgatgggaatttcagccaacgttgcggatttacttatagcattggcagaaattcacccaaaccccttttgtaaccacaccattacactcggtataagcggtttagtttcagcttgggccggttggtataggaactggccatcgtgagatgtaataaaatcaaatgtttgttgttttgaatgaacgtatcaaacgtgtaatgtaactcacttgaatatatgaaacatttctattttacattatctatagtcaaatcgaaatcaaacaaaactaagggtatacaaaagtataatccacatacgtgggggacatttatgaaattcataaaacttggtaactgtaaaatagtaacttcccactctctcaccctcttcactgggacggttatttttttttttaaattcatttgcatcaaaagtcgttaccttccagtaatatttatagatttataacgatgcaatactcactaaagaaacagaaacagagataattttttcgaaagaaattgatg

SEQ ID NO: 18158 - DNA, 3003 bp, Unknown; identical to SEQ ID NO: 18157
  misc_feature (1)..( 3003): 2750-1469P.txt file - cDNA_ID_1815508; gDNA_ID_1621105; Annot_ID_171568

SEQ ID NO: 18159 - DNA, 3000 bp, Unknown; identical to SEQ ID NO: 6798
  misc_feature (1)..( 3000): 2750-1469P.txt file - cDNA_ID_1815512; gDNA_ID_1621105; Annot_ID_55971

SEQ ID NO: 18160 - DNA, 3000 bp, Unknown; identical to SEQ ID NO: 6787
  misc_feature (1)..( 3000): 2750-1469P.txt file - cDNA_ID_1815512; gDNA_ID_1621105; Annot_ID_171564

SEQ ID NO: 18161 - DNA, 3003 bp, Unknown
  misc_feature (1)..( 3003): 2750-1469P.txt file - cDNA_ID_1815516; gDNA_ID_1621105; Annot_ID_55969
gaagtcatggtatcgaagttaatgttcttggagaagactttgagagtaaagttcttgaggtatctatgtcttcttactcttcaatttgaagttaattgttaggattctgttaactaaatgttcaagttcttataggatgctcggaaatcgtgtcttcttgtgaatgctcctttgattcatagagcttgttctcgagttccgttctctgttcttaagtatgccatgactcttgatggtaactatttcaacctccatttcatatgtttgtaggatagctgttttagctaacgttttttttgtttattgataggtaagattgcagcgagtagtggacatgcagcatggataagtagtaaactctctagaacccgagtgttcgagttgcgaggaggaagtgatgctgtgatagttggaggaaacacagtacgccaagatggtaaatattgtatcttaaatctcgcatctttacggatgcttacaacatattgaatagatatgtgaaagttgtgcaattttgtaactgcagatcctcgattgactgcaagacacggacagggtcacacccctacacgaattgtgatgactcagagtcttgatcttcctgagaaagctaatctatgggatgtctcggaagtatctaccatagttgttacccaaaggggtgcaagaaagagtttccagaaattgcttgcgtccaagggtgttgaagttgtggagtttgacatgttgaatccaagagaagttatggaatatttccatctccgtggatatctttctatactatgggagtgtgggggaacattagctgcatctgctatatcatccagtgtcatccacaaggtacccattatactatatccatacttatttgtagtcatcttatgtttttgtctggctaaacctcattttcttacacttctttctctcaatgtaattcatttttcaggttgttgctttcgttgctccaaaaattatcggtgggagtaaagcaccttcccctgtgggtgaccttgggatggtagagatgacacaagcattgaatttaattgatgtttgttatgagcaggtaatttttttgctttatgaattaacattcactgtgacaagttaaccatgttactgaatctggcctcttagttccgtgggtttaatctaaatccttgaactacaggttggtcccgacatgcttgtcagcggatttcttcagcccataccagacctcttacctgttatcccatcagaggatgcaactgtcgagattgaccccagtgttgacccctttgaacctagtatcatattcttctacaaaacatgggacctctatggaagtttctcaaatttttctccacatccaattcgaatgccctatggcgaggagaatgatgattacatgacctggtccagtgtggaacattactatcaggtaccacacaacagtccatgtaaaatggtatcttgctctttcaaaaaaacataatctcttgatccttcacccaaaaactttaaaggcaaacaagtttgttggggtcgaaaatccaaaggcatatgattgcgttgagaaaattagaacagctagaagtccagaggaggcagctctgataggcagatcaacactgagacagaaacctgaactggtatgaataaaagttgaattgtccagtttcgagcatcaaagcagttttcactcgtttgttgatctctcgagaatcgagatcgttattcaggggatcaataatactgcattctcgctttaatgattgttttaggttcggaatgattgggaagatgtgaagatagaagtaatgtacaaggctttaaaatgcaagttctcaacttatcctcacttgaaatcaatgttgctctcgacaattggaacagttctcgtggaggcttcaccgcacgatctattctggggaggtggccgtgaaggagaagggcttaactatcttggtcgactgcttatgcagcttcgttctgagtatctgggcgaatcctctgtttcagctgaaaagacttcttcggcctgatggatgatgatagtctttcatatttattccaaaaagttatcaataaaactttcagttttcctcaattttgacatttacattgttgtaattctttaacctatataacattattgtaagtttgtaacattatgatagttttcctagaccatttgattcacattaactcatactgagtattttaaatggtaacggtagagtttttatttgctttgttcggttttaaaaccaatccaacatattcaagaatccaattcgatttggtccggatcagtgaaaattccaaggcttataggaacacctttcgtaaagaagacactaggtggtcgcaacttttcgagaagaacagacactaggtggtcacgaagacactagctggtgacaacgtcagaaaatactcaacataaaagtaaaactcttaaaagagttacataacacaaatattaaaatatgtatcatataatcatcatagtaacataaacaaggattgttgtaagagtttgcgtatgcttgaaactacaagagtagaaactgagctaaaagcacatggaaggttactttaacattggaaaaacacatctttcttcttcttcctttcaagtcacttttcctcttcttttctttcattttgacatttctttcttaatactttttaaatatgtaatggaatcaattatagacctttatataggtgtttgatattatatgattttataatcataggttgctaaataagaatgtaagtcatgatatcatatgaatacaatcccaagcaaagacaacacacatcatcatgttctcccctcaataacaatcacttgcaaagtacatacacacaaactcaaaataataattctagaaaacaattattaactaatttaatatacaaaactaaattccctttaattagttaagacatcacaccaagaaacttctcaattccccatacaaactcatacccaagaacttcaaaaaaatg

SEQ ID NO: 18162 - DNA, 3003 bp, Unknown; identical to SEQ ID NO: 18161
  misc_feature (1)..( 3003): 2750-1469P.txt file - cDNA_ID_1815516; gDNA_ID_1621105; Annot_ID_171561

SEQ ID NO: 18163 - DNA, 3003 bp, Unknown
  misc_feature (1)..( 3003): 2750-1469P.txt file - cDNA_ID_1815526; gDNA_ID_1621105; Annot_ID_55965
atttagacatgtaggctaaattttgattgcttcaaacgcaagtattaatgatgtagttaatgttaatctgatacatcgatcaaaattcaaaccctatatttgactactacgtacatctaatttgtattttaaggatatcaacttttggggctcaacgtacatcacttattttgctattcctcatcttcgaaaaagcaaaggaaaaattgttgtgatttcttctgctacggcaattatacctttgcaagcggcaagcgtctattcagtaagataaacaaaatccgtaagcatcattattggtggtatcttagccaaattcttaagctaagatttgtaaaaaaagggctcttatataagagcttttaggcttatatttaagcttttatataagaaccctttcttcacaaatcttagtttaagatttggctaagataccatcaataatggtggtcttacacgctttttttttatatgttatctttttacatacttctcatatacatataaaatttatatgatattgatactacttggtatgaccgtatgatgtaggcaagcaaagcagctttagtaaaattctttgaaacattaagagttgagatcagtcccgatatcaaaataacaatcgctcttcccggatttatatctacggatatgaccactcctcagtttaaagaaatggtcagtgataactttcttgtacataatttaataccttatatatatgacattaacgatgttatgtgtaatgttttttgtgctttgttgaaaattagtatggttcagatttcatactttcggaatcagtgagtcgatgcgcaaaagcgatcttcagaggtattggtagaggagaggcatacgtcatagagccatcttggataaaatggatctttttgataaaaaatgtttgtcctgagatcgttgactacttactcgactatatatttgttagttatctaaaaccttatttcaagcgtgattgatcatatcgatctatccaagttctctctggttttcaactgtggttgtgttgtcattatggccatgaaacttatactttatgttgtattagttattgcactaagtcttggcctttttccctttcttcgtatatgtttcaatttgttttagaaccaaacatttcatatagatagaggatttcttaattatttaataaagatgattcaaatgtatataattgttcaactagttcagttcgcttccaaaaaaacagcgacgtcttctctctcacggcgataaaaacagagaaccttccatttgtttctttgagcgcgtgaccggcgcgtggcggcttagttagcgccggcgtcggtcctccagtctggttttctttagggtttcattctctacttagtctggttcgtttttagatcctgatttgatgttggcaaggtgaagaatttttggatcttagatctgtaagagccatcgttgtgggctttgattcgtcgaaggttttgtgcgatcggaactcccttttctctgttttgagaaaattatgggtttctcctttgttcttgcagatcttgtttccgacgaaggttgcaaacgaaagttatgacggcggctaatgttattggtggtctggctccttctttgggatagggtggcaacggtacaccggtattttagtgttagttgtctcataattgggttttgcgctttcgttaaccttgttctcttcatttctcttttgggttcctatcctttagtcttcattgttggcttgttggtagcgtttatggaatcaactttattctcagtcttttgtggtctagtatcttgaactcttgcctattctatgtcctgccgagtttgcttgtttctcgatccgattcgttctcttgccgtctccagtcttcggtttgttgcgaattgtatgggctcggtccttgtctctacggtttagacttgatcgaggtctctcttttgcattggtgtcttactaggcgtgaaccaatcttggttttgtttgcttcgatttcgccgtttccagaagttgtgtgggatttctagtcgtctcccattcttgctggtatggatgctttggttctctttatttgtgaggtagtcttcatttggtataggaagagtcgctatccggtgtcgtggattttctcgtctccattggctagccactaattcaagcgtttctcgtttttggattgataatttgcaagatgtttggtgctagattctgagttatgagttttaattccctctgatgtttgctttcttagccgtcagtgttttgacttgtttcttttgtagtgttgttatttgctccccattttcttggacttagtttcctaggatatcttgttatccttcgggttagttttcgggatcatgtattgatcgtcgactccttgtatttcacctagtactcatcaatgaaaattaatcttccagtgaaaaaaaaaaaatgtatataattgttatggaatttctgtgtccagtccatattaagctttttacatatatatatagcatcgaccgcgaagtccgtaacaccatctcttctagaagactcggatttcattggcagaggcgtatgctcctttggatctgatagttaaaacaccaaatcttgtgtaactttcttgtatataatgctctgtttaactttcatttttttttagtaatatttacattcctagcaacaaatatttatttatagcaattaatatatatttttagtaataattacattcctagcaacaaatatatatttattttttaacaaatacacaaatatatttttagtagcaattaacctattttcctaacaagatacaacagaagaataagaaaatagtagacagatagatccacttgctaccatttcctctccctgtagccttctgtgtctattaaaatagacttcacttgtaaagtaaaagtttgaacattttaacatataaaaaaaaaaaccaagtagagaggtaagtggtggtattggttctgcaaaagaacattatg

SEQ ID NO: 18164 - DNA, 3003 bp, Unknown; identical to SEQ ID NO: 18163
  misc_feature (1)..( 3003): 2750-1469P.txt file - cDNA_ID_1815526; gDNA_ID_1621105; Annot_ID_171556

SEQ ID NO: 18165 - DNA, 3003 bp, Unknown
  misc_feature (1)..( 3003): 2750-1469P.txt file - cDNA_ID_1815529; gDNA_ID_1621105; Annot_ID_55964
gcgcttgacataattccacattcagtaatatttggtagttgaatcatatttatatttcagtgttgcacttgtactgatcttttggtttcttacaatggatcatatatacatttttatttttatttacctcatcagaatattctttttttctagccggtatatacttccactgaataattaccacactcgatttggactctgcatcaaaagtcttgcaacgagatagtacgttctgcgaaacatcacgtttccatgtatatcgtgactagacaatgagtcgaaatctactttgctcatttaacattaacttcccttaacttacacggaaactctatattttgaattttcattacaatgtaatatttttttaattatataattccaatcttcggtaattgacagccagataatgacattgacattttctcatggtaaacttttaaacattttcacggtgaaacaaaataattaaatagcaaagtgttatggttaaaacatttttgcagctagataacaaataaactggaactgatttgccacttaaacattagtggtatataaacgttagaaattcttgcacggttgatatgaaaatggctttgggttctcatacacaattcttgttattttatttagtaatgtgttatcatgtaaaatagtgtgtcatcatgtaaaaacaacagtctataaagcatgttatcatataaaaagtaacataatatatatcatgtaacattagtaatgtgtcatcggataaatgaacatgttatttattttcaaattaaacaaatataaaatcgttaattcttttgggttaaaatcttaaactcacctcaaaaatatttagcaaattaaaaaaaaaaaaaccaataaatcatgtctcatattacttcctaaaatttggctatcttttgttgatgtttttggtctgacctaaaaaaaggtttggctatctaaatctacctaaaaacacacactaatacaattcgatactgggcttcaaataaaaacaaactccttcattattgggccaccataatgatcgacctcacaatatctcagcccaaggttactttcgtcatttaaactctcctacacttaaaaaccctaatctctctaccgtcaataaacctccctatataaacacttccacacacaaaccattcctctcacacaaaattcttcagccgattcattctctagggttcatagcttagtcctcgaatccatatatctctgctgctgtgttcttcaattgctttagtattagcttgttcttagtgttcatagaatttagggttattagaatggcttcatcagatagtcgatgtggatttgtccgttcccatatgattcgttcccttgaagcaatattaatcgtgttgctctcgttctctaaattgctctctaatcatcaaagtaatcatacggttaattctagtatgataccgattagtgagcataacttgagcagctacataatcttctcttacgagggttttgttttgtcttaattcttgttttgttgtggaagaacagtgatgagtcagtttacagacctgtaatgattgcggtaatgatcgcattattatgaacatctaagggactgagttcttctatccattgtgttttagttttctttttgtcttggtggcttttacatgatagaaagattcaggctttgaatatattttagatgtgaagcttgttgtgaagtgtaattgcctacattgaatttagtttccctcgctatcctgttcttcaattttcaatgatgtttcttaggacgtcggggaacaatatgttttatattgatgttttgttattttgcaatgggatttcaaatgaggaatactttgccaagttgttgaatgctcagatttttctgggttttatgattcacttgtataggaagatctgatgatttccttttgcattgtgtttttgttttttgtttgggaagccagtgatgattagattcaatggttgctgaacattcaatgttgaaaagcatctaacttgactaggacggtctgaggcttttaatgaactttttgtttgctctatcgttagttttgtgtccatgattcaggattgttaatgttttgtgatgttttggatgatgagaaacaaaaatcaaaatacagttatccctggcttagggtttaaagcccgttgctgagtcttttgtaatctgacacacatcacaacaatttctctttacgttcttttggtacgatgcttttgtgttttcagtttatcttaactttgttttatttctcaattttacgattcatggttctgtaaatccatattgggcagtcttttcataaacaaaacgaggtgtgatgctaaatttcattgggacaacgctatattgtagaagacggtgaagattgttatacgttttgcaaggcagggatttatgatgacactctccggtcgttttgcttccttgatgcaattgtttttccaatttaggttttgaattattactcactattttatcagggtagcaacattacctgaaagtgtctctgagctatcacaaagattgaaagaagtttatgtgatcaaaactttccttttaactttattgttttcagtattagctatcttatgttatgtatatcaatgaatgtttttaacgattaagcacaccctttaatacagtcttgtttaagaatattatggatcaagatcaaaaatttagctgtacgttcaggtaatgaatgcgatgttctgaatgagaaatgaaactaaaatcatgcatttagataactttcacatcacttgatagagagggacgatatttttgcaggatttaacttcgtaattatggctaacaaagctaccgtctttacattatttgctcggggataactgaaatacctccctttctagctttaaatgtcacttaaatagccttcgcttgtaaaataaaagtttgaatatttaaaccagaaagctaagtagagaggttgtgatgggtctgcaaacatg

SEQ ID NO: 18166 - DNA, 3003 bp, Unknown; identical to SEQ ID NO: 18165
  misc_feature (1)..( 3003): 2750-1469P.txt file - cDNA_ID_1815529; gDNA_ID_1621105; Annot_ID_171555

SEQ ID NO: 18167 - DNA, 3000 bp, Unknown; identical to SEQ ID NO: 6775
  misc_feature (1)..( 3000): 2750-1469P.txt file - cDNA_ID_1815544; gDNA_ID_1621105; Annot_ID_55959

SEQ ID NO: 18168 - DNA, 3003 bp, Unknown
  misc_feature (1)..( 3003): 2750-1469P.txt file - cDNA_ID_1815567; gDNA_ID_1621106; Annot_ID_55984
ttattattgatttttagaccaaaaacatatagcttttaaagattaaaatgatatagagtttttgttcgtaagtcataaaacacttggatgtttagatgtgttcttggcatgtttgtttctacagatttttttttaatacatgaattcacagttcagttcggcggattttcagtttgagtttataaacaaaattaaattgatcagatgaaaatataccatatcaaatgtcaagttactaaatggtgcaaaatccaaagatacagtattagtggtgggtctatttgtgacctcttaaaaaaaaaataactcacttcattaatccattttaatcacacaaatgaaagatttacttatagtccactaactcactcagacgtacaaaaattaaccaccatctcttaaataagtcatatttatatcatccgttttattttcaaaatttcaaacaatctcaaatgacacacaaaaaattactatacaattgcgtgtattattcaaacatttgaccaatttgatatttaaaattaaacagaacattcaaactggtcaaatgcttgaatgtttgaacaatgcattcaaatgtgatgtttaaaatcacggctaataggaactaaaatccagatttagatcggtttgttgtccaaaacctcgaattgtcgaggcggcccattaaaaactagtgcactcgaattttcttcaggtattttcactttgacgcgcacacacactttacatcaccacatcagcatgtaatcaattaaaacccacatccatcaatcatcattacctaaaatttgctaaattaaacttcaactgtttctccattttgtttgccgccaggctacgctattgaacttcaattgtccagttagatttgtttctcttctagcataatctcatgcatgtacatttatatatgtgtactctggcaactgactttttttcttctttctaaccttcaatataaatattatatgaaacttgaaagtaattatatatatcaaaagaaatctaattagaaccattataagtaataaagaaaaatgttgacaaaaacaaacttgcaaaagtaataaagaaaattttaatatttttaattatagtctagtcaaactttaaattaatgattttaacttttctggacattagttttatatatactacacacacacctatgacaaaaaagacatgtatacgtaaacatacacttacagggaaaaaattaaaggaaagaaactaaaaaaaaatggagatgaagaaatgtagtatgatcatgatgataatgatgatggtggtgatggcatccatacgaggaggagaagcaattataataagaacaacatgcaagcaaatgtgcatcgaccaatgtggtggccgcatcactgtccctgagaccccttgtctccgtaaatgtcttcacgaaaaatgtggctttccagctcctccgtaataattcgtaacctcgtatatatttacgtatattgatcaagtataccttttaatttgtgttgactaataatttatatttatcgcgacattgcaggatggaggctgtaggaatggaaaacctcataggatagatcctcatatcctcagtttacttttcataagttattgttgtggaaggaaagaattacaataattaagagtaatgaacaaaaactcagtttacttttcataagaaattttgatgtgtacaatgattttttcctatgatcataaagatttccgaggccaaaattagggtcaacattcattcatattggatttgaaccttattttgatccttataaagactttcttcgatcgatttacttcatccatattttatggccctttctccttcgacaacaacgcattaattctcaggacgggtgcgttgcaatgtaaaaagttctttcgaaatatttcatccgattagttttcctcaaaagtattagtttcaattaaattaaagataatagcctaattataagataatagcttaattataaagccagccagattacttcaagttgaagtaatcaagcaaactatctaacactgataattcgtttaagctccgatgctatatatctagcacatggttaatgctataacaagttaacaccctctgcatggtccaatatctataaaaattctaaacagaacaaattaatgtacaaacacagaacaaaataatgtacaaaacacatttttgtcccttttgcttacttacacagtaaactcattgtcttatctactcattacaggttttattgaattaattatcaaaaacatacgcacccatttctactgatatatagtgaaaatactctaatttattattttaaaaaaaaaaacactttgcaggtctaaagtgagctagggacgtgaaaaaactgaaaatacatattgaaactagacgaaggaattgttatgttcaatatgtatttagtgttaattaaaagactagttgcttgaaggaagagaagacatgcaatgatgcaatgcagaaaacgtagttaatgcattaaaagagtctttgactctctaaagtgtaaccgtagtattcggttttgtcagctccttcggctaactaattaaaatcctaacggttcaattttcaacctttcacacactattcaatattactattttccgaaaaattggtatgataaaaataatattattgtaactatattgtaagtaagggttttgatttagagcgattaaaaatgttataaatcaaaatagtgattgatgccaaacgcgtattaaatcaaacgtttgccgatgactgaactactttcggtaaacgagaaaccagacaaatgggcctgtctcagaatagccttttaaggagcccaataaatttggacgtagcacgatatgaaaacgccatcgttttaaagttctcatcacgatggttcgcgttttgaagcatattttcgaaactcgaatcaaaattcaaatggcgggctaaacttcgattcagtctctctctttctctctttggtgatg

SEQ ID NO: 18169 - DNA, 3000 bp, Unknown; identical to SEQ ID NO: 6804
  misc_feature (1)..( 3000): 2750-1469P.txt file - cDNA_ID_1815571; gDNA_ID_1621106; Annot_ID_55983

SEQ ID NO: 18170 - DNA, 3000 bp, Unknown; identical to SEQ ID NO: 6801
  misc_feature (1)..( 3000): 2750-1469P.txt file - cDNA_ID_1815585; gDNA_ID_1621106; Annot_ID_55978

SEQ ID NO: 18171 - DNA, 3000 bp, Unknown; identical to SEQ ID NO: 6801
  misc_feature (1)..( 3000): 2750-1469P.txt file - cDNA_ID_1815585; gDNA_ID_1621106; Annot_ID_171581

SEQ ID NO: 18172 - DNA, 3000 bp, Unknown; identical to SEQ ID NO: 6812
  misc_feature (1)..( 3000): 2750-1469P.txt file - cDNA_ID_1815595; gDNA_ID_1621107; Annot_ID_56010

SEQ ID NO: 18173 - DNA, 3000 bp, Unknown; identical to SEQ ID NO: 6812
  misc_feature (1)..( 3000): 2750-1469P.txt file - cDNA_ID_1815595; gDNA_ID_1971867; Annot_ID_176468

SEQ ID NO: 18174 - DNA, 3000 bp, Unknown; identical to SEQ ID NO: 6812
  misc_feature (1)..( 3000): 2750-1469P.txt file - cDNA_ID_1815595; gDNA_ID_1621107; Annot_ID_171649

SEQ ID NO: 18175 - DNA, 3000 bp, Unknown
  misc_feature (1)..( 3000): 2750-1469P.txt file - cDNA_ID_1815595; gDNA_ID_2926155; Annot_ID_139467
aataagaaacttggaattttttttaataatggtacacacatatctttataaaaaaatttcatgttattcgatcgatgtggtagattgatgaatttggtaactaagcttgcacaatgacagtatggctggacatagctgcgttgcacaataatctgattagaaaaaacattgttattttggtatttcacgaataacattcgaggtcttaagtgttgaagtagtccgttcccactgaatatgatcaaagcttagctagcttcttcattgcgataatttatggtaacacccctgaccaaattaattaaatagctaatgtttacacaagtcttgtaaatatatctcttgtaatatatttcattttaaatatcttgaggttttttttttttttggcacttaagatttggaattttaagtcgcatgttttgaatagaaaaaaaaagttccctaaattttgaaaagatgataaatgatacgaaaatataacaaaaaatacaaaaaaaaagttgtatttggaaaactatccatcaaagtggacacatttaaaaagcacacgcacacataagagtcatagctccttgaaggctatataagaggtaacctctttccccatacccaaacagtcttcttcttcaactctataacataaaacacagagagagataccaaaaaacaaaaaccaaaattttctccaaatctatttctttcgaatcaaacccatttcttgaaactcgatttcaaacaaacccatctcattgttttcaccaaagactttttttttttttgtcggaatctgattaaaaccaagcaatgaagagagtcagagggttcaaaattggacacagatttgtcaaaattttcaaatggataccaagaaacagatgcccgacccgaatcacaaacccggttaccggaatccggtcattagcacggtgtttaagccgtggagctaagagattgtgcggtggaagcaagaagaatccgggtcagaatcagatccggttgggtaaggatccgaaaaagtcgaaccgggttgttcctcgaggacatttggtggttcatgtcggcgaatcagacgatgacacgcggcgagttgtggtgccggtgatttactttaatcatccattgtttggagaattgttggagcaagcggagcgggttcatgggtttgatcaaccgggtcggatcactattccttgtcgggtttcggattttgaaaaagtccagttgaggatcgctgcatgggatcattgccgcaggaaaaattcttacaagattatataatttgaatttataaaatagtcaaaaatcaaaagaggattaaaaaaatttatatacacttatacagtacagagaaggatgatttcctttaatttgtgaatattagttttttttaccatctatgttatacgataaataccgattcataaatacaagataattatttgtatcagtttatttcatggatgatagaccacattgacatcctataatactatatggtttagatttatgtgtgtaattttataagttagaacaaaactgaaattatgttctaacttataaaattacacacataaaaactgaaattaaaaaaaaaaaacagaaaaaactgaaattgggctatcagtatttttgaatacttatatttcaatatatcaaatacagtgagtgatggtgtattgctgtatctgaaacctatcatccactataaaccccaattgaagtgaaacaatcaatatttagaatttccatataatgttaattatgaaattacttctatctaaatatatttcagaagaatttttgagataccacttttatgatttttatttttttttaataataccactgttttttttttttgttaattttcaatgtaacacaaaatgcaatcatagaatttgttttattaacttttatagagcatattataaaaacgtttataaagtttctataatgcataatatcaaacatttataagatttttcacaaaatttttaatgttttatagtgcttagaagatttttcttaagaaatgatatgaaactagaatttttgaacaacctttttctggtctttttgaaaaatggtatcataaaggtggtaattttcaaaatttcccaaatttgaatacaaattcaaatcatattgtaggaaagtgatcaaatatgttaaaatttagaagatgaggtgagaacaaatgtgcagaggagatgcacttgctaaatttgcatcttcatgtgatttgtattttgctttttagattgtagtttaccactttggttggttacaagtatttggagaaaccatgtactacttgttctttgagtattaatatatatgattatatgtggtatgtttagaaaaaaacaaaaaaaccaaatatcaaacctaaacttattaaaagtaaagacacatttgattaaaacctaaaccaaaaacgtacaaaactattcgcttatgatgatattatttatcataaccaaaactttaatcaccatacatacctccgatttggttttctctcccaaactggtcgtcttctcacctctggtttactactacttcggattgaagaattttgatcgtctcgttgctaactccacgatgtctttctgacgcttaatcttctgacagaagacaaagacatagcataaaaaagtaagcacagaacataaacggatgtttattcttttctagacggtatatttacataaataacgaatcacttatcaaaaagctggagtagctcagttggttagagcgtgtggctgttaaccacaaggtcagaggttcgacccctttctctagcgtttcttttccttttgtatttttaagatttaaaaacatttttccacggctacaaaagaacattctcgacatacacaaaaaaattcgaaatttcgagaactctcttgtgccttcttcttcatcttcctctgtttttaaaaatgcaatcaagcagattctcacgatacctaaaccaaatccaattcaatg

SEQ ID NO: 18176 - DNA, 3000 bp, Unknown; identical to SEQ ID NO: 18175
  misc_feature (1)..( 3000): 2750-1469P.txt file - cDNA_ID_1815595; gDNA_ID_2926155; Annot_ID_198328

SEQ ID NO: 18177 - DNA, 3000 bp, Unknown; identical to SEQ ID NO: 6813
  misc_feature (1)..( 3000): 2750-1469P.txt file - cDNA_ID_1815618; gDNA_ID_1621107; Annot_ID_56002

SEQ ID NO: 18178 - DNA, 3000 bp, Unknown; identical to SEQ ID NO: 6813
  misc_feature (1)..( 3000): 2750-1469P.txt file - cDNA_ID_1815618; gDNA_ID_1621107; Annot_ID_171638

SEQ ID NO: 18179 - DNA, 3000 bp, Unknown; identical to SEQ ID NO: 6813
  misc_feature (1)..( 3000): 2750-1469P.txt file - cDNA_ID_1815618; gDNA_ID_2926154; Annot_ID_139459

SEQ ID NO: 18180 - DNA, 3000 bp, Unknown; identical to SEQ ID NO: 6813
  misc_feature (1)..( 3000): 2750-1469P.txt file - cDNA_ID_1815618; gDNA_ID_2926154; Annot_ID_198304

SEQ ID NO: 18181 - DNA, 3000 bp, Unknown; identical to SEQ ID NO: 6814
  misc_feature (1)..( 3000): 2750-1469P.txt file - cDNA_ID_1815622; gDNA_ID_1621107; Annot_ID_56001

SEQ ID NO: 18182 - DNA, 3000 bp, Unknown; identical to SEQ ID NO: 6814
  misc_feature (1)..( 3000): 2750-1469P.txt file - cDNA_ID_1815622; gDNA_ID_1621107; Annot_ID_171637

SEQ ID NO: 18183 - DNA, 3000 bp, Unknown; identical to SEQ ID NO: 6814
  misc_feature (1)..( 3000): 2750-1469P.txt file - cDNA_ID_1815622; gDNA_ID_2926154; Annot_ID_139458

SEQ ID NO: 18184 - DNA, 3000 bp, Unknown; identical to SEQ ID NO: 6814
  misc_feature (1)..( 3000): 2750-1469P.txt file - cDNA_ID_1815622; gDNA_ID_2926154; Annot_ID_198303

SEQ ID NO: 18185 - DNA, 3000 bp, Unknown; identical to SEQ ID NO: 6815
  misc_feature (1)..( 3000): 2750-1469P.txt file - cDNA_ID_1815626; gDNA_ID_1621107; Annot_ID_56000

SEQ ID NO: 18186 - DNA, 3000 bp, Unknown; identical to SEQ ID NO: 6815
  misc_feature (1)..( 3000): 2750-1469P.txt file - cDNA_ID_1815626; gDNA_ID_1621107; Annot_ID_171636

SEQ ID NO: 18187 - DNA, 3000 bp, Unknown; identical to SEQ ID NO: 6815
  misc_feature (1)..( 3000): 2750-1469P.txt file - cDNA_ID_1815626; gDNA_ID_2926154; Annot_ID_139457

SEQ ID NO: 18188 - DNA, 3000 bp, Unknown; identical to SEQ ID NO: 6815
  misc_feature (1)..( 3000): 2750-1469P.txt file - cDNA_ID_1815626; gDNA_ID_2926154; Annot_ID_198302

SEQ ID NO: 18189 - DNA, 3003 bp, Unknown
  misc_feature (1)..( 3003): 2750-1469P.txt file - cDNA_ID_1815630; gDNA_ID_1621107; Annot_ID_55999
tggttccctacaagccataaaaaaactcgtaccctttccggagccaatactctccatatcctggaaaagaaacgctccatgtcctgagtctgcgatccctcctccatgagtagagaataagccgaccccactgtaaactctccattctccgtaccagaccatgacagagtatccgctactccgggaccgcctcccaacacgaccgcagtcaatcgtaacagcagcttctccggtaagaaacacgaaattctgcccatgtcccaaccaacacgaaattcttaattagttatttataagattgagatttcaccggggcagaaaaatgattaattgtcatgatttatgaataaaagaaaaaagaaatctacttacacttaaaatggaaacagtttatactgtgagataaagagattgattaattacgatttaagtaaaagaaagaaaaataactttgaattgtgaattgaatacaacaaaaacaatatgcacgcattacaaatatttagtcttgttttttattagccgttaagggaagtgagaccaaaggtgacacttgtggtacgaatggtagcttcagtgggtaactacgattacatcattgattatgagttccaaactgatggggttatgagagcaaaggtactttcaatatttgacttttatctcattttgacaaaaacaaatcataaaaggttccgtattgaaaatattttacttttggtaatatcaacgacaggttgggcttagtggaatgttgatggtgaaagggacaacgtacgagaacaagaaccaagtgaagaaagacaaagaaggtaatgaagaagagctttatggcacgattctgtccgaaaatgtaattggagttattcacgaccactacgtcactttttaccttgacctcgatgtcgatggcccggacaattcctttgttaaagtgaacctcaagaggcaagagacggcgccaggtgagtcacctaggaaaagttacatgaaagcagttaggaacattgtgaaaaccgaaaaagacggtcagatcaagcttagcttgtacgatccatcagaataccacgtcattaatcctggtaaaacaactcgagttggtaacccgacgggttacaaggttgtccctagagccacagcagctagtctacttgaccatgatgatccaccgcagaagagaggagcttttactaataaccaaatttgggttactccctacaataagtccgagcaatgggctagtggtttattcacttaccaaagccatggtgatgatactcttgcggtttggtccgacaggtgattagttgcaaagaattaccctttttattagttatattatagttaatattgttacgattgatttagtgtctttatttggtgtgatgcagagatagagatatagagaataaggacattgtggtgtggtacacgcttgggttccatcacattccatgtcaagaagattttccgataatgcccactgtttcttcaagtttcgatttgaagcccgtaaattttttcgagcgcaatccaatccttaaggccgctccaaactttgaatatgaccttccggtttgcggagccaaatctgattctgcttgagaagaataaagaaccaacaaaagaaattatccaactttttggatcttattggcaaaactacaaatcaagttacatgatattcactttcctatgtgttattggcgaaatcccaactcctacaaaacttataagcgcaaaaatagtatataacatgtccaattcacaccggaatgttaatctcaaggaattgtattttctcctagaatcactacttttgtgatagaagactttttttttgtcaaccttgatagaagatcttgataagattttttgtttttgtttttggcattgataacacattattctttcctaaaagaaattagtactcccctatatctcagtcaatttactaatgtttgatcttatgtttgtatatcttctcaaagcttgatcgtatctttctcttaatttgtatctcagtgtcattttatcaattaatgcttgattgtatacggagtattggtatttaacataattttaatgttcactgtgtgaatctaagtaaatcaacagtccagagactcagattgataatgctactacctaattccttgacgtaacaaatgcttatatctcatctaagaaatattcagtcgaaaataaagcatttccatcactctctgctcataaaactatcacaatagatattgacaaaaaaaatgggcttctgccttctgttagatttatctatcaaaccaactctccgaagtgggcttctaacagagaaacaagacatgggccacaaaacaattaagcccactcagaagcccaagacgaaaactgtgcaacggtcgtcttcaatgtttcagcataaagacaaagggaacaaaactgcagagatgacgaaagcttgtacggaggagatagcactctccaatcaattctcagcccttgatggcttagagacatcaagatgaagacatgtgtaagggtttatctagggttttagttcacatatgtccttgtataaaaacccaaacaatagccgcttgtaatctctaagaagcagaatgaatgaaaaccaaaacttttcataaagatttataaacttcttcattatcgacatcatgagcctcttgggccttcatcattcttcaaaatcataccatagtttatagtttttactgcgtaccacaaatatggcaccgtacatatatcattataggtttctaggagttgacaaatgtttagtcctccatttttcaatcgtcaaagataagattccttataattcgtgtacataattgttttttaatatataccatagcatgtggtagatattttattttcgggattgatatttggatatctctttatactgtaagtgtaaggtgacggtacttagttaaggctcactagtttctttaaattctatataatacgataccaattcctatg

SEQ ID NO: 18190 - DNA, 3003 bp, Unknown; identical to SEQ ID NO: 18189
  misc_feature (1)..( 3003): 2750-1469P.txt file - cDNA_ID_1815630; gDNA_ID_1621107; Annot_ID_171635

SEQ ID NO: 18191 - DNA, 3003 bp, Unknown; identical to SEQ ID NO: 18189
  misc_feature (1)..( 3003): 2750-1469P.txt file - cDNA_ID_1815630; gDNA_ID_2926154; Annot_ID_139456

SEQ ID NO: 18192 - DNA, 3003 bp, Unknown
  misc_feature (1)..( 3003): 2750-1469P.txt file - cDNA_ID_1815638; gDNA_ID_1621107; Annot_ID_55997
catcagatgtgggtttgagtaatatgataacgttttcaaaagagatagtagaaaccaaaatgttacctttactgcctaagaatcgtttcataggttatttggactttttttattttgaaactaaaattgtaacaactcttactgtacaagaagatgcaaatggagattttcaatttcatggatggagtatgattctccaacgaaacaattacaagacagacgatattataggattttggtgggatgccaataactctagatttaatttttcaggtactcatgatcgcttagttgatggagtggatctttgcaacttcgtttctcaaatatgttaggttccttattttatttatttaattttgcaaatttgtcttctcgatattggttcataagttatttttagttctatcttaattatgttttttaggatcatcttttctttttcaattataaatggatatatttggtgttaagacagtttggagttgcttattctccagatttacctatctatgattttcgttttaacgagtataaatacttttgctatagtaaggttgttgatttgattattaaaattaacgagtttttgataatcattgagaagaatattctcaaacgaagtttttgttgaacgtgaatccattgatctccgataacaatagaactctaagatatgattctcttacttgagatctattgatattcaagattactatcgtaatttattctggtacactaactatttacaccatttttaataaattagataaaatcacacaaacatgtttatatttggaccttcactatgaataaacttggtttatttgactaatatttcaccatataattttcaaaaattcgatttcaaaaaactattagttcaaaccaaacttggttgtaggatctgaagacttgtagttaggttgtttggtttgaactattattttccaagataaaagtagatctcttttgatttgaatatgtggtttgattaaaatattatcaaaatcaaaattgactttgtccttctcacgatcattaattaatcttactagaaccgttagagcaaaactggctgggtcaaggaaacttgcttttattgcacaaaattctaaatttacttcgaagacgtgttgcttgacgcttgtcgttacttctgataaatgattttgagtaaaattcaactaacattaaggttgtgatgcttcctatataacaaaggaagtctataataaaatccaaacgaaaagccataaaattgactaatctaattcccaaaagttttatatttgactgcatattgttttggaattttatagttttttttttttttttctccttgctagttgctaccatcgaattcgaaaaaaaaaaaaaaacgaaaaaaaatactaaagtatcttatttttaaaaatatgttctcttgttgaaataaataggggaaatagcctcgccacgtttttacgcaacctttgctttgactttaaatttcatatcacaccatactcttatttctcttatggactgcaatattttagtttaaaatttaagtaaatgtataaatgagtgatggttaaagaaaataacagataaaggaacatgacttgttttttaatccaagttaaagagtatatatatatatattatttctctaacaaagttaaaagtggttaaaactcacatgaaacctaaaaagaatctaccaactcaaccatattgtcttatgattcaatccctaagattcatttccaagcaatatattagatatctcatatgtaagtgtatataatatataatatatatagatgatcaaaatcaaaatttaggcattgaagagattgtgtatcagttcatgaataaattggaacctaccattgtctctttcgccaactctaatgccaattttttttggtttgattctctggtgaacaatgcagcatatctataagtacctttataaatcatccttccagtttttatactaaaatgattacttatgtctctcctcttttgtgccttctcatcgactacctttcattatgtaaacacttaaaagctaagcctgaattttatttaaggcaggtaagttagtattgggctttaaatataattaagtgggccttggaccgtatatcgacaaatcaagtgatgtcgtgtgcttcgtaaaattcccacatcgcttgtctagaaacgtaacttaatgtatatatttagacaaatcattacggtcacagttatgtttacgtacttgtcacttgttctcatactatgatgtagttgtctagttgatctcagttatgtttcatgaattgatacgtttttaatcaaggtgacaagattaatagagattaactacctctacacaactggacattggacaattcagattcaaggttgatatccttaaaaacaccaatacactcctctataaatatttacgtacttgtcacttgttctctttttattggttataaaattttaaaaatttttaaaaaataaataaactaaagggctctctaaagtctaaactacattacaaataatatattattgtattttaagagacactctccatccattgatggagatgatgttatggtttgatcaagaagatatcaactacaagacattacgcttctagttaaaaatagttggtcaacttaaaatcacgttgcatgtcttaatcacgttggtcatatattcccaattgccctcaaacgtcaaacattgaacatcatgtccgtgattctaaaatcttgtaatgttattttggcaaatttccttcttaaaacatgaataaaaaaatcaagaaaatttacatatctcagacggttcttctcgtgtgttttagtcttctaagcaccaatgccaatcttagtggatctggatctatccaagtagatatgaataaacaatacaagtctaccacacacacaatcacacattactcagctaaaccaactgagatctagagagagtaagagtgtgagaactttcatg

SEQ ID NO: 18193 - DNA, 3003 bp, Unknown; identical to SEQ ID NO: 18192
  misc_feature (1)..( 3003): 2750-1469P.txt file - cDNA_ID_1815638; gDNA_ID_1621107; Annot_ID_171631

SEQ ID NO: 18194 - DNA, 3003 bp, Unknown; identical to SEQ ID NO: 18192
  misc_feature (1)..( 3003): 2750-1469P.txt file - cDNA_ID_1815638; gDNA_ID_2926154; Annot_ID_139454

SEQ ID NO: 18195 - DNA, 3003 bp, Unknown; identical to SEQ ID NO: 18192
  misc_feature (1)..( 3003): 2750-1469P.txt file - cDNA_ID_1815638; gDNA_ID_2926154; Annot_ID_198298

SEQ ID NO: 18196 - DNA, 3000 bp, Unknown; identical to SEQ ID NO: 6834
  misc_feature (1)..( 3000): 2750-1469P.txt file - cDNA_ID_1815672; gDNA_ID_1621108; Annot_ID_56042

SEQ ID NO: 18197 - DNA, 3000 bp, Unknown; identical to SEQ ID NO: 6834
  misc_feature (1)..( 3000): 2750-1469P.txt file - cDNA_ID_1815672; gDNA_ID_2926208; Annot_ID_141822

SEQ ID NO: 18198 - DNA, 3003 bp, Unknown
  misc_feature (1)..( 3003): 2750-1469P.txt file - cDNA_ID_1815680; gDNA_ID_1621108; Annot_ID_56039
gaagaagaagttgtctctgtttcttcttcacaagagcaagaagaacaagaacatgattgtgtctttagttcacaaccttgcatctttgatcaacttccttctttgccggtaaatttctaaacttctttataccttttctttctcttcttataatcgaaagattttaagttatatttttcttgatttctttttttttgggatatttttaggatgaagatgtggaagagcttgaatgggtatctcgtgttgtggatgattgttcatcaccagaagtttcacttctcttaacacaaacacataaaaccaaaccaagcttctcaagaattccggttaaaccaagaaccaaacggtctcggaacagtttaaccggtagtcgtgtttggccactcgtttcaaccaatcatcaacatgcagcaacagagcagttgaggaagaagaaacaagaaactgtccttgtgtttcaacgaagatgcagccattgtggcacaaacaacacaccacagtggagaaccggtccggtcggtccaaaaaccttatgtaatgcatgtggagtccggtttaagtctggtaggctctgcccggaatacagaccggcggatagtccgacgttctcgaatgagattcactcaaatcttcataggaaggttctggaattaagaaagagtaaagagttgggtgaagaaacaggtgaagctagtactaaatcagacccagtcaaatttggcagcaagtggtagataagacttaggtaaaacctactttttgtaacattatctgtagtgttgtaatttaacaacttgcttcttaacattttgaaactgtttcaggaactagtcttaagtaaacaatggttttctataaacaaaattaatgtgtgtttttaatgatgtaagaccaccaccaccactactagtacttggaatgattttggtccatgtgtagtggcttaaatagactttttgagtaaacaaaatgccaaatggaagaatcatcttgaaaactccaacattactatatagtatatatattattgataaatcttgagattcgacatatttatttgataatcgatgcaagcataattaatttagacatttattcagcaaaaaaaaaaattaggtatgtaattaatttatacatatcgaattactaaaggttaattttcaggctaatcgtagataaacgatttcgttaaatccccatgaaagtaaatttaggcaaatgtatgatgctatgtctgccgcataattgtttaatctcaccatttgcatatcaatctttaagggaaacatccttttaatgtgtttatgtggccttgtctccgttttattgctactttgtgtcatactcaaaataagttgactataaagctacatgtatctacacaaaaagagagtttatttagtatgcttgcttgggaataagcaggagacaaaagaaaacatccaagttaaaacatgaagcagcaaaagagagtgttcatccacaaaatgtgagaggtttcttagcatataaagatattgatataaatctaatcattctcgtaagaacaagaacaaaatgaaagagccaaaaactaaacccatctttcactttttagatacgagaagtgccacgatcttttgaagatcttcctgattttgctttgcaacctttgtaatctcatcaagccggtgcatgtagagagcatttttggcactcatctctttcttaaactcatggataaccacactcttcttgtttatctccaaccacaagtcggctaggcttctatccgttttagaggtgttccataacccccaaacgaaggagatgcaagtaagagagccaaagaaacaccaagtgagaaacgaggtataggtttgtgagaaatctctggaggccttacctaggcaagtgtactccacaaaagtttgatgctccttccctttagctttagccagtagttgaagcttcttagcttgagatatgttgataaatttgagaaacttccatttgcgtttgacgctcctctcgcatgatctcttgaccccgatgtaatgaagcctagttgctaaaagtttaaaaaccttgaaccatgtcgattgtggatcgtcattaggtgtgtaatcatcatcgtcattattgctggatccatcatcactctttttcccatcgccggatccatcattgctctttttctcaccggatccatcatcatcactctttttttcaccagatccatcattagaactccttacaattttataatactaaattttgaataaattaaagtttaaattttttgttgaatccttatattttttattgttcaatggtggaattcttaagtggatttctttaaaaaaataaatatataatattataatatatttcaccaaacataataattattagaaatattaaaattctaaacatacataatataaaaacaataaaaaactataaaaatgaaaaacttgaaccacgataagtgttaaacttgattcgtgcaaaatttgtgtcatatatattcaaccaaatcagctctttattgttcacgcttagtctaatcacgaaatcaagttgagtaatccttaaaagaaaaaaaaaaagtttgataattttgaagtttagattttttgttgagtacttataatttttattatcgaatggtggagtaagtgaattttttttgggaaaagtgagtgtataatgaaaagacagatacgtagtgttaaataatttatttctttgactgtatcaacagtccgttgtagtctagctggtcaggatactcggctctcacccgagagacccgggttcgagtcccggcaacggagtttgtttttacctccttctttttttaatgggccgatttttgtcttaattcaagctctaatcaaaggcccatttgaaattttcttctcggtccctccaacggaaacagaaggttttccactgtaaaagatgaaaagagtgtagagagactcgaaatcaatcggaatcaggaagacaaaaatg

SEQ ID NO: 18199 - DNA, 3003 bp, Unknown; identical to SEQ ID NO: 18198
  misc_feature (1)..( 3003): 2750-1469P.txt file - cDNA_ID_1815680; gDNA_ID_2926208; Annot_ID_141819

SEQ ID NO: 18200 - DNA, 3003 bp, Unknown
  misc_feature (1)..( 3003): 2750-1469P.txt file - cDNA_ID_1815684; gDNA_ID_1621108; Annot_ID_56037
tgatgaatgattacgtattcaaatggattatgcttttgttaaaacgcaatgattatgttctgtgttaactttttttttcgtctctcgttttcgttttgtcttatttttatgtgaaagaaaaaatcatttggatacatatcttttttttcctcatttattttacttagtgataatatagcaactaaatttctaatatgcgatttgatgtcattgattcgaacaatacatttgcatcacaatgatagattggattttaggtaaatctattgaagtttttaatgttttattaggtaaaactttataataggttagatattattctacatttttttgcctagagatattgcgaatacaagaatcattaactcaaaaaccacttgcattgattacaggacttgaaactctctcccattttcttgacgtcaaaaatgataaaaactactccatgttttataaaagataagaaaagggaaagagtgatgatgatgatgcgtcgtgaatcgacgaataagaggaaaatgtgacacgttctcttttcccccattacgctctcgtcactcctcaccagcctgctcccttttcaaacttttctgttttccccctaattttacgaaaatcaaaataagttaaaatggaatatataccaactttcaaaataaaaaatcttcaaaacatatcaatgtgtatatagcgacacgagtataaagtcccacacacacaataaactaaggttggcagaaaaaaatataccaccaaactaagtgatcgtaactactctttcgaaaaaaccaaaccctaatcttgttttaagactaagaccaattatactaaaaaggaaagatttcataattggaaggaaagtagtatactttgatagttattaaaaataaaaataaaatgttcaaaagatttggctatagtggttgctttggtgaactccactccaacggtggtttgcaccatctccattcccatcactaccaaaaacccacacttctttttttttttctttctttgcgtaatgtgggttaaaaggaactttatttatgctcttgtttttgggtgtttgaatcgaatttgaaatcaacatttgtttttattttattttatttataaaaaatttgtgtgtttggaaagttgtaaaaggttcaaggggtttcggtagagataatcttaatttggtttttaacacatcgacttaatccaaattgacatctctaataggattcagatattattatatctatcctgtaattttccataaaatgtaatcaatatgagatttggtattagggtatgaacttaatgtatcttatcggaaaaatgttttctcctttgggttacctaatctcatatctaatgccaaaaatagcataacatagaagattggctagatcatatgtggacatcaccgactgcatggcaatgtttgttttataatcgcgtaatacttgtttgtcatttgccagttctcataacaaatgcgaaaataatcttatatatccttggtaatgcatgtaaaaattaattttgcttcatgaattattttatattcttaaattcatgactgaatgaaatttcttatctatattcagacgcagtatatgggacatctaactcaattttaagattctagattggatgattttatgttgtttgacaaaaaaaataaaaaaattggatgctttctataaatttcatgctttgtattttattaaattttgagctattattgtattagtatagaattgagctattattggattgttcttatcactttgttaatttcatttggtcctttagttagatatcaaaatttttaaaattttcaaaaaagatcacaggtttaatcggtgactttcaataatactagttttaacacgacaagcaaaatattgtgcatgtatactattaaattgttaatgttagtactatgaaataacaaattcatcaccattgtaaaacttaatgtttcaacatttcctaagaagaaatggtcaacccttttgacaagacaagctaaattggcatggacaaggaacacagcatcatgatataacccttcacaataattataataaaaacaatcaaatttgtattgaataatgcgaaacagacctgacttatcaatatgtgacgaaggataagcccacgccaaaaacatccacgtaaagaactcattgattaggtccaaagaaatttggagaaaataaaacaaatcctgacgtgaaaataaaaagaaatcatcacttttttttatctcttttattttcttctaaatacaaaaattgaataatcaattaatttttcatgtatgcaaacaatttcttaacaagtcttgtgagctttaaatgaaatatagaggcgagtggattagacttgatcctgatcttttattaagctgatccatattttacattgaaataaaggacacaccgtttaacacgaaaatgaagagacaaataaagaagaggaaaagcattgattctgaaataccaatatagtatcattcgtgaaagaagattttgtaatattccacaaacttagaaattaggggaaaagaaaacaaaaaaaaaagataggaaaaaagagctttaacttttggaattggaagaagcacaaacacacacaaaaaaaaagtctctgttttaccttttaaccccttcaagaatcctcctttaagttcagtgccctcttacttttctcttatcggaatatctctcttcctctgtttcttcgccattctctcagcttttctccttcttcttcgtctttgtcaggtaaagagatacgatgagcatatcccacatacctctctcctcttctcatctttttagtttctcgaaagtttgcatgcgccgactttgttataggttataaactttagttttaagcctattttcgtatgtttatggttgttgtaatagttgagaattcagagtatgtcaagtgaaacttaaaaagaattctatatgtatgtgtgtatgtgttaaagagtgaatg

SEQ ID NO: 18201 - DNA, 3003 bp, Unknown; identical to SEQ ID NO: 18200
  misc_feature (1)..( 3003): 2750-1469P.txt file - cDNA_ID_1815684; gDNA_ID_1621108; Annot_ID_171691

SEQ ID NO: 18202 - DNA, 3003 bp, Unknown; identical to SEQ ID NO: 18200
  misc_feature (1)..( 3003): 2750-1469P.txt file - cDNA_ID_1815684; gDNA_ID_2926208; Annot_ID_141817

SEQ ID NO: 18203 - DNA, 3003 bp, Unknown; identical to SEQ ID NO: 18200
  misc_feature (1)..( 3003): 2750-1469P.txt file - cDNA_ID_1815684; gDNA_ID_2926208; Annot_ID_202372

SEQ ID NO: 18204 - DNA, 3000 bp, Unknown; identical to SEQ ID NO: 6847
  misc_feature (1)..( 3000): 2750-1469P.txt file - cDNA_ID_1815686; gDNA_ID_1621108; Annot_ID_56035

SEQ ID NO: 18205 - DNA, 1928 bp, Unknown
  misc_feature (1)..( 1928): 2750-1469P.txt file - cDNA_ID_1815686; gDNA_ID_2926207; Annot_ID_141815
agctccgatgatttctgttggctcctcaaccattgtctcatcagctggcctgtctaccttcacaccaacatcctctgctgtgtaatctccatgcacctaaagataaaccaaaacaaaaagagttagatttcattacatccttggaaccaagactagtgcatcaatgatgaaattaatgtgacttcaatctacctccatgagctttccaaggtcaaacttgggagcctttaggatcttcactttacggatgaacacattctgcaacgggtagatgccctgtgttgccttctcaatctctcttccaatggcctctgggatgaacttggccactagctccttgaggtcacaagatgaagcctccttcaccataatctcactcatctttctgcggatctacaagaatcaagaaacatttacaaggaaaatgttaatcttctgtttacagaaagccaaatagtaagcacatggtatgataatgttgtaacctgacggatttggctggattgagcgtaacaggtacgcttcacttggttagcacgtctctttgtgaaggcgatgcagaacatcctcaaggtgtagccgtctgtggttttcacatcgacatgggcttcaatcaaagtctgccacttcttcaccaatgaccttagcttgtcggttgtgaaatccataccctacagagatcacagattaaaaaccgcactctgtatcaatatgccagtaaaggagtggtctttatcttacccagaactgggtcaacacattccttccctgaacatcttcagctctaagacggatcttcctgtaggcattatcctcatcattttgtagatcagcaagagaaacctcaaacaccctgtgtttcagtccctcagaggcaatctgtttaaattaagagatagcccagataacaaagtcagatttgtcgaagaggaacacgctcttttctatcacaaatgcaattcctattacttcaataatgaaagccaccaagagcaaatgcccatctctacacctcacattcagcaaatgacctatgccatgagataactatagactcaaaacctagaaagctctaacctttctccagtatagtaatagaaagacataagacattaccttggtaccctgagtcctggaaacaagagtcttcccaacattcctgttcgtgaaagaaccaggagccttcacgtcataccaatccttcttggagaagggatcaacactgcaccatccataacaattcaatcacgaacactatatacagattacaattagaaatctgagaattttattcaggacataggttacttacgccttcttctttcctcctttcctaccctttgaaatcctcttgttcttcctatatgatcaaacaaaaaccttaaatcagaacatgatatactcgaagctatgatcaaatgagagattccaatacagagactggagaaacaagcaaggaatatagagatgcgaagagagatttacccgacagccatggttaagggtcttctagatggtgtagcgacgacgagctacagtgaggaagaagaagaagcggcttcaacaagtgagagaaagccctaattcactggcttttcatttatatatgtctagggttttgcgtctttttagttattttgagatgatataaatttatagcttactggattttattttcaagcccaatgggctattatagagagcccaatattaaccttcttggtgaaacagagactttgtctatctttgatttcttcgtgttcgaaagcagagaaatttgttctgagctcaacgccatttttgacgatttcgaatctctgtcttctctgagttgttccaagtaatcggagggaactcgtaaagtggaagaataggagaaagagagaaggaagaagatttgtgaatagctcttgatctggtgaagaatg

SEQ ID NO: 18206 - DNA, 3000 bp, Unknown; identical to SEQ ID NO: 6845
  misc_feature (1)..( 3000): 2750-1469P.txt file - cDNA_ID_1815690; gDNA_ID_1621108; Annot_ID_56030

SEQ ID NO: 18207 - DNA, 3000 bp, Unknown; identical to SEQ ID NO: 6838
  misc_feature (1)..( 3000): 2750-1469P.txt file - cDNA_ID_1815690; gDNA_ID_1621108; Annot_ID_171683

SEQ ID NO: 18208 - DNA, 3000 bp, Unknown; identical to SEQ ID NO: 6845
  misc_feature (1)..( 3000): 2750-1469P.txt file - cDNA_ID_1815690; gDNA_ID_2926207; Annot_ID_141810

SEQ ID NO: 18209 - DNA, 3000 bp, Unknown; identical to SEQ ID NO: 6845
  misc_feature (1)..( 3000): 2750-1469P.txt file - cDNA_ID_1815690; gDNA_ID_2926207; Annot_ID_202333

SEQ ID NO: 18210 - DNA, 3003 bp, Unknown
  misc_feature (1)..( 3003): 2750-1469P.txt file - cDNA_ID_1815694; gDNA_ID_1621108; Annot_ID_56029
acagtaagcaaaaaggtgacatggcttacttaatgttgaaatatatggtattggtaggtagaagttggaaaacaaaacaaaacactttttcctctttacgattttcggattctccattttgttacatcatgatatgaataccactacttttaaactgcatatatatcgacgtatgctttattccttcaagtaaattttaataatcgtgaaagagaatgtttatagtcaatttatagtacaaatgtgtctagtattctgtatacatgtatatgccttttatattctcaagtttgtagattttctttttctatagtatggttctcatttcatgtccattgagatatatatgttcaaaatttatgaagataattgtatttttcttaacgcaattgcgctcaagaaattctttagcactagttttttcttctttttttggtcaaaattctaatctttcattattcaattttttctttaattttgtttttgggcactggccaactaagagaaaaaggtcattatgtataatcatctccttgttagtaaagtaaacaaatcaaatcataattaaaagacgagtatgacaaaactttaaactttaaagtaatgttttttgataaacagagaattcagacatatatttcacatttcctttagatccgtgacttaattatatttttattttgacttatgtatgttaggttccaaacctgaatccaagcgtagcttaggcttcgaacctcaaatgtctgcataaaatttagttaccattattgtagctggatagttagattctccacatttatataattgtttttttaaaaactattggtttggaagccaccgattttcaaggcctaatttagaaacaacattttctccatgaactcttttgatgcgtagtcttaatagaaatctttcagtattattgacaagaaaaaataagataaaaataaataaataaaaaataatgactaacatagatgtgaaaagtccttattaatattcaaaacgctccaaaggaattgcacgacgagacaagaaaagcaggggcggctaagagagtcctttagaaaccaatctcattcgaatagtattatggtttattgagaaaatttataatttatgtactaggaagtaaaaagtcatagccgacgatactcaaaacagaattttccttcgagttcaagtattttcttgttaattagttcggaatcgaaatttcaattctaaggtttaaactctttattgtgaaagtcacacactcgtgtatttagactctaacatagagtcgagaaaccatacatgtataatgtattagttgaatggtttcgtctaaactctatgttacaagtaacaagtccatataaatgagtagaaccctacaccaaactctaattcctacttcttcgaaaggatacctaaaagcccgtgaagtctagaaatctttgattttatctacatgtattaactttgtcagcaacacacgttcataccggatttaaagttttggtgcaagtttctatcgagagagctttgcccaacatcttaatataagcccaaccttttataaataagcacaaaacaattataaagcctcacaagtaagttaaaacataggcccgaggcaaatgttaatggtacagtatgttgttgattctaatgtctattacgtgtactaactaactacgaagcccattcaagagtttaaccggcccaacaggtttactatgattgttttgtattaatatacagcttgactctcattttgtaatagaaaaatatatagcggtgtttaacaagataaattatgctatctataacattctaatccagaatttggttccatttaaaaaattaattaggccggttttcttctaaatgagttgtggtttcttgttaggacgtgcactcataccagccttaaaaaaattagtgacaaaacaaaactgaaatttttaacaaaaataaataaataaaacaaacaaaactgaaattaagaatcgtgagggtacggtcatcatccactacatcatctttactcctttttatgtgcaaccataaaataatacgtcgaacattaattatagtgacgaatcagttcattaaagcaaagttcaaacaactttgttctctttccataatctcaattaatcagtaatccatttaatttatcattgtgtgacgaatcagtgcatcgaagcaaagtttaaacaactttgttctcttttttccataatctcaatcagcaattcatttaagtttaacactttttagcaaaaaattatgagaaaaatttatgactctatctttcagtaagtatgttatgatcgattaatttgagttaaacgaagtagtgtatcatatatagtatatcactatcagatttatagaggcctaatcgtacattattcagttggttatagctagcgatatctcttgattggagaataggaatggaactttgaccgatattgaatacctagtcttcaaggattctacaatataattatgatgatttggtaaatttaattgggttatgataatgaaggcactcatattaaataatcaggtcactaacctctttagacttattgtggccaacaataggaaagtagtctcctttcaactttttctccaatcccaccatttccatgaacaatttttttaattaaaagcattaagagatatttgcattaattaaatgatggataaatcaattgttgttatggtattttactatttttatttatttgtaattgatacaatctaattttgaaactcaagctaatctctatttaaaccggtttttattgttgctttttatttaaagcattcacgttggctaaacaaattagttaacttttaatcgtgttatttctttagagattatatatagtgatataccaaacgcattggcttctcttttttttgataaggtacgtgtatctaaatacacaagatacagcttaaggcacatcaaaaattgaaaggagaaagaagatg

SEQ ID NO: 18211 - DNA, 3003 bp, Unknown; identical to SEQ ID NO: 18210
  misc_feature (1)..( 3003): 2750-1469P.txt file - cDNA_ID_1815694; gDNA_ID_1621108; Annot_ID_171682

SEQ ID NO: 18212 - DNA, 3003 bp, Unknown; identical to SEQ ID NO: 18210
  misc_feature (1)..( 3003): 2750-1469P.txt file - cDNA_ID_1815694; gDNA_ID_2926207; Annot_ID_141809

SEQ ID NO: 18213 - DNA, 3003 bp, Unknown; identical to SEQ ID NO: 18210
  misc_feature (1)..( 3003): 2750-1469P.txt file - cDNA_ID_1815694; gDNA_ID_2926207; Annot_ID_202332

SEQ ID NO: 18214 - DNA, 3003 bp, Unknown
  misc_feature (1)..( 3003): 2750-1469P.txt file - cDNA_ID_1815710; gDNA_ID_1621108; Annot_ID_56022
gatttgggaatacttcatctagctcaatttggtatgaattagcatacatagaggcaaagggaagaatgaagaaagggaataaagcttggcagattgctttaggatcagggtttaagtgtaatagtgcggtttgggtggctctacgcaatgtcaaggcatcggcaaatagtccttggcaacattgcatcgatagatatccggttaaaattgattctgatttgtcaaagtcaaagactcatgtccaaaacggtcggtcctaatttgatgtatctgagtgccaacgtttactttgtctttcctttcttttattggttatgattagatgtttactatgttctctctttttcgttataaataaagaagttcaattcttctatagtttcaaacgcgattttaagcgtttctatttaggtttacatgatttcttttacaaaatcatctttaaaatacagtatatttttagttttcataaaatatttaaagaaatgaaagtttataaacattcactcctattctctaattaaggatttgtaaaacaaaaattttgtaagcatatcgatttatgcgttttgtcttaattagctcactaaataataaataatagcttatgttgtgggactgtttaattacctaacttagaactaaaatcaactctttgtgattgtttgttcatccagctgaccagctctgtctgccgtctaggttatgtgaagaaagttatattcctggttgtttagatttaaatataaaaatggatactttagtttatgtatgattttgaattgtttagatttgaaagtagggaagcccataaaattcaattgatagttgaataattaaaaatgataagtgtcagagagttggagcagtccccgatgagcctacatcagccaaaaaaagacactcatattttcattcttttttttggctaaaactcaccttatatatctgtttatttcaaaagatgcgtttttcttactttttacaacatgaaatcttttattttaaggaaattatagtaactaaccgtagaatacaaaagaatgaaaaaactaactatggagcaacgggtcagagacaatttttatacatttttcatttatataacaataactcatttatcattaaatcatttttataacaataactagtaaccataaaaaatataaatacttcttggatgttaagaaaaaaaaacaattcttcttttgacgaaaaagacttcttaggaaagttgtatacctttaaaatacatgcaagttatatgaaagtttataaaattcacaactcttctttattttaaaacccaaaaaaaaaaaaaaaaaaaaagtcctcttatttatacgtctaattcccatgcatatatcgagaataacccatcatataggaattaggctcccatcatgtgatcatgattcatgagtcatgaccattggatctcccctcattattgttccatcagaaatttctacgtcgatgatatgtttctaattctaattttttttacagcaatttctaattctaattaagaactctcccatatacaaattgatatagatatcttttagtaagttagtaacaacacttaattaaacatagataaatatacgtgcacagatcaattctccagtttaaggaaagaaattggatagatgtatttaaatacttttgtataaataatataactatctccaatacaacacaccgaatcaaatgtcaacatctacatacatgtcgacatgaatttatgaacatatatgtacaaggtgatggggaacccacaaattaggtgtgtggctttactttttttagtgtatgcatgtatagtatgatagggagggaaatagctgatcatcatcttctatggacttagtccaaattcatcacatcaaaaggcaacgaccatgtctttgtttctaacaactttacaccctcccctttccttatctactaactccatgtatctgctttaaaggttaatatataactggactaagcaaaataaaagagagttgggttttcattatagaatcgagaagatttcatgtccctatatcaatcacataaagcgttttccaataacataaaaagtcggataaatgaaaatatttgagaatctaaaacaatgtcatatatactttaatggaaggtccttttcttcgaaatatttgctcaccgaaatcggtgaaagtgatctaagactaaaactaacttgtgagtaattcatgtgatgggccttctgcatcgaaaaagagcatggcgatcacgtggcagcctctcttgcgccgtctcagtattagcctatcacgatagagtaagccaatgtatacagcatggcgatcagacacatgatgatgatcgatctgaataacaagattccgaaggatgtaataaattcatgtgaacagtgcttcgtagctaaactaagaccagagctattgaaatgaggtaaagtgttttctttgtaaccccattttaattaggtgaaatatctagcgcacacaccaatctgattcatataatcataactagcttgtaaactacaaaattatttttcattgtgttacaactagaccattcccacgtgaccattcacgtgctcctataatgaaagaaacctaaagaagagacgctccaattcgcatagacatcccaagcttatcctttcttagtgaatcaagatccaatttacactataatacatgcatatattacgtaataaatgttttataagttttctgtgtcactcactatttttagttattttctcaattttcaatcatcgcaaatatcaattatcacaaaacatataaagtttccagatttgtatatgggcctaccttattagatgcgatgaatatggactaagtacagagctgatggtttttgttataaatatcgtttcctcttctaccctcacctttactctgtttctttctccactctctctctctctcgttgcaagcaacttgttttctgaatccaaagaagacgataacgatg

SEQ ID NO: 18215 - DNA, 3003 bp, Unknown; identical to SEQ ID NO: 18214
  misc_feature (1)..( 3003): 2750-1469P.txt file - cDNA_ID_1815710; gDNA_ID_2926207; Annot_ID_141802

SEQ ID NO: 18216 - DNA, 3003 bp, Unknown
  misc_feature (1)..( 3003): 2750-1469P.txt file - cDNA_ID_1815722; gDNA_ID_1621108; Annot_ID_56014
caagattgtttattattggtcttatataattatgagattctaaaagtgtgatacggttagggttaggcgtatccttttgttaccgttgtgataaaatttcctttttgtttctgctactcaaataagaaaaggaaacaatcaaaatttccttttttcattgaacaaacgtgtacttataaatacaccccttctctcttcttccttgagaaaagtctccattctctcttcttcttcctggaaacctaaaccacgtaaggatttgctctgaatctaaatattgacgtggagaagacgcgatcttactaattctccattctctgcttcaacttcaccgtaagattgaacaaacctttacttatatatacctcttctttcttgagaaatccaaattctccattctctcttcttcttccaaaccaaaacctaattctccattctctgcttcaacttcaccgtaagattgatcggttgataaagcggctctttttggtgattgatctctgttgtgactacatcttaggtcaattcagattgctttcatatcaagtctctcctaatttcacaagatcaaagatcccggccatggattcagttgtcgacggcgaaggagaacacaaacgacgactaaggatgcgaaagtgggaaagagggatataacgaagacatggacaatgaaagcaacgagcagtatagaaccaaatcaatggatcatgatctgtgtttggtactaggtgtttccttggcgtcgacgagatcttttgaaaatcttgtgtttcgtcgatatcacaagcaaaggtattttcttttttccttttctatttttaatgattcattttttactaaataaaaatttatttttagatttttttattaagtgttaaaattttcaattttgtgtaaattaatttaaatttttaacacttgtttttgtttttattaaaaactgtttttaaacctatatttttatactactattaaagttttaaggtttttcttattaaatattaaatttttaaattttgtgtaaactaattggatacatcatccaatcccctaagaggtgttctaggttcaatagatggtttacacatcatttaaatttttaacacttgttttttatatttattaaataaatgtttttaaacctaaatttttatactactattaaaatttgaagtttttttttattaagtgttgaatttttaaattttgtgtaaactaattggatacatcatccaaacccctaagaggtgttctaggttcaatatggtttacacattatttaaatttttaacacttgtttttcttatatcaaaaatatgttttaaacctttatttttatactactattaaagttttaagtttttttattaagtgttaaatatttaaatttgtgtaagctaattggatacatcatccaaacccctaaatagtgttctagtttcaatatggtttacacattatttaaagttttaacacttgttttccttatattaaaaaatgttttaaacctatatttttctattactattaagatcttaagttttttttttaattttgtgtaaactaattggataaatcttaactcctaagaggttaggttcaatatggtttacatataatttaatttttcttatattaaaaaatgtttctatttttattttactattaagattttaaatttttttttgttaagtgtaaaaaattaaaattttgtgtaaactaattgaatataacattcaaacctgtaagaggtgtttataggttcaatatgatttatatataatttaaatagtttgctattttgtttagaatcaaaatatttttaaatgacatgttgtaataattgaccaaaagaaattagtgtgtgattttgttgaaatgcagagtacaaagccttaatttataccaagttatggtatctataacgtatatgaataccaaaattttattatttttaattggtgttgtattttataattcgaaataattaggggaacgggcaaaacctctctgttctctcgcttatattttttttagagagaaagcaaatcagtttcaacgatcggatattttctggtgttagccgtcctgactttttgggctttctgtccgatatcaccggctctggtagcggtgttggttggctctagtccggcagcgtcttgttcacataaccggtggttgctggctcttggtttctctcgtcgatgtagatcgatttttaatctgtgtttttttattttcatgttttgtttttaataattctcatctgagacatgttggtgatagagtgaatgcaatctcgctttctaatgcttcttatccgatctgttcttttttaagttttgatttacagaaatttttggagaaatttgagaatgatgttgaagaaaagaagtggattctgttgttaattatcatagccttaagctgttgtatatttaacatgagcctcgattgctttttatcggtgaaaaaacaaaaagatccatgttctatgagactatcgacggtgattctttcaccgaaatcggtgctcagacggcgaaaatgaagtcggttcgctttagagtactcatctgacacgtatattaatatatcgacatgtggtttgggatagagtcaaactatagtttcttcttctatgaaagactctctgttggcctatttggtcctaaatcgtttctgtaatcgcggacttttctttaagctttgactatcttgattaatacaatatttctcttgggacaaaaaaaaaataatcttagtatttctttaatattttttgtttgggtatgggctattgggccgcttcgaaaagttcactttctctatcgatctctcacagtttctgagttctctgactcaaaaacatatagtagaagaaaacgattagagatcttcttctttctcctgttgcatctgaagataaaggaaacagaaagcgcgagatctgagtgacggagtaatttcaaagggaggttttcgagatcagaaatg

SEQ ID NO: 18217 - DNA, 3003 bp, Unknown; identical to SEQ ID NO: 18216
  misc_feature (1)..( 3003): 2750-1469P.txt file - cDNA_ID_1815722; gDNA_ID_2926207; Annot_ID_141794

SEQ ID NO: 18218 - DNA, 3000 bp, Unknown
  misc_feature (1)..( 3000): 2750-1469P.txt file - cDNA_ID_1815776; gDNA_ID_1621109; Annot_ID_56058
caaaacagagacaagctaataagaagaaaaaacctatcccaaaatcccatctttaagcctcttaacattatataccaaacctaaattactatctcttcgtattactctgattctaacagcaaatattctgaatttcactcctaaagtacttaaagagagaaacagagaaaaattcgaatctcacctgagtagttctggtggcgaattcaacaccaatagtggatttagattccaagcaaaactcattcctggtgaatctcgacaagatattcgatttcccaacaccagaatcaccaatcaacacaatcttaaacaaataatcatattcctgatctactctatgcgtcattttctccttctctcttcgatctcgcaataaaacctacaaattcgaaagaaaaaaaagacagaaactttattacttttctccaaaatcaaacccagatccaacgaaattaagacgaacccacaagtaattcagaagacgaaaaacgattcgtgtaccttaatggcggatgaatcgagaaaaatatcgaattttttgagatctataaagaaagaaactttgagtaagaagctttaaatgtttgttctcactcacaatcaatggaggaaaatggaatttttcttgtttaatttgatgggcttcgtcttcttcttcgtgagaaagaggagaggagcaataaagtgaatatacggtgtatctatacgtatctctgtgtcagggaatagaaacgacgtcgcgtttgagaaaaagacaaagacttcagttatcgtgctgatgtggcaactaatgattcgttagcaggctggcaaaaagtaagagcatgttccaaggggtattattggaaatgtagttttgagctttataattgcgttaaagagcaatgattgtatttgtgagtgtggtaatgataataagcaacgtcaatttgaaaatgtcgaattaacaactttaatagaagaagaaaataatgaaatgaggatgtgatgaattgaccactacattcccaacttcccataatatttgtaagaatatagttctgatccatataatataattaaacaatgtggtggttctggtggcgatggccgatgggcaaatgaagatggtagtggatcatgtggcggctttagaaggcaacatgctacaagtctagtggaaaatacgtcggagattgcgatggtaataggctaatagctatagaggacgagactagtcttttggtgcgacacatatagaatgttacattctaatctgatgaagatgaggaccattaagtcattaacgctaaattattaatccctgaaacgtcatactttttttcaacctaacgtaataacttcattttgttataaatttgattttgtgccctctaataaaccaagttttttttttgtttttttttatcgcaaaaacatcaaataattaaatttgttcgaaaaagttagtttcgtgggccaactactccgaaacgagagggtttatatgggaaaaaagtacacctcgtactcttgcactctttgcgaggcagacaacacggacattcatagtgcgtggaatatgagataaagaaaaccgaccaaaactagctttaaatctagcaaaatcttttccaccggccaatctttactttcatcaaggatcttaagtaagcttaagcaatcggtttcaaaatgtatagattggatactttgttgtaaagtgcactccattgtccaaagaagagctccgagttctgcgtagagggcattgcgataacaattctggctactttgaccaaacagcttggtcgttgagctagtcaacatgaaccccaaactaacattctggttaataccagtccacgaagcgtcaatttggcacatagcttctcctctttgaacgtgcgcatactcacaagcttcaactacttcaggttcttcctccgcatcaatgtcatgttctagttcttgggcaactctccaacttttcgactcagaaattacatgcgctagaatatatggtgttatgtactcccgtaacgtattttcaaaaagtatatatttgacctatttaaacatttattactttaggttatgaataatcctgacgcaattcttgctgattagtcttgacgcaattgtacgttgctattgattttaaacgaatacagcacaaaagaaggcaatcgcgtggacgaaagaggagccgatacatacaattgcatacatctatttgtatactatatttgctttctattggataattcaccctaactattaagagtacatttagtcacaatatctaaattaaatctataaatgtgaatatgcacatagagttttcacaagtggtcatattttaaggataatatttgatacagttcttaatttctttggtacattttttgttacctctctagaaaggttaattaattagatacatcgcctgcaaaagtacttttaagaaaaaatattcgcgtggagaatatttcgttcgttcatgtaaggtcaaatgatgaacctcttacccatgattaggctgccataattaataaaccgaattcagaatatacattccttacttcccatcattctgaattgcccaaattatactcatttctagtcataataaaaaaaaaattaacttctagtggttagtcaatcttttcttttgtcaagagaataaatatcaagtcaaagaaaattctttctatttaatatttttctctatattcatgaacaaacaatacaagtaaaagaaaaataaaagatgatgcaaggattagtagaacaagaaacggtagcaaattaaacggtgcattcaaaaacctattaatatggaaagtacattatactgtcattaatatataagaataatttgagaaacaaatcttaaaggagtttgatgaggactttgattacgttctatgtacatacagtatctctccctataataatcctttcattctcacaatcttgtaaaatttgattataaccaaatcaatcaaaaaaatg

SEQ ID NO: 18219 - DNA, 3000 bp, Unknown; identical to SEQ ID NO: 18218
  misc_feature (1)..( 3000): 2750-1469P.txt file - cDNA_ID_1815776; gDNA_ID_1621109; Annot_ID_171739

SEQ ID NO: 18220 - DNA, 3000 bp, Unknown; identical to SEQ ID NO: 6852
  misc_feature (1)..( 3000): 2750-1469P.txt file - cDNA_ID_1815780; gDNA_ID_1621109; Annot_ID_56057

SEQ ID NO: 18221 - DNA, 3000 bp, Unknown; identical to SEQ ID NO: 6852
  misc_feature (1)..( 3000): 2750-1469P.txt file - cDNA_ID_1815780; gDNA_ID_1621109; Annot_ID_171737

SEQ ID NO: 18222 - DNA, 3003 bp, Unknown
  misc_feature (1)..( 3003): 2750-1469P.txt file - cDNA_ID_1815799; gDNA_ID_1621109; Annot_ID_56050
aaatgttccaacactttgacaatctgccagaattccggtctcttgtctgtttgcgatgaccaacatcgctcgatcagctctttcatggccgctggacaatccgtcggtataactggcctaattttctggccaatatcgaaacaatgaaatgtttaataacaactgaacaataatgatctaactcagtcagatctatgcaagatcacaatcatgaaataaggaggagatgcagaatgatttaccttgtatataactagatcacaatcatgaaataaggaggagatgcagaatgatttaccttgtatataactgcgtaggcaatttgttcagcaaatttcatctcctcatatggaagtgctccagctaccatttcccataaaagaagtccaaaactataaacatcgcacttccgtccatgtggtatccgttttaaaacttcaggtgccatccacctataagttcctatgttatcccccaaaacatcacagtactcctcctcgcacgctatgccaaagtcagcaatcttcaagtgaaagtcattgtcgatcaacacgttttctggcttcagatcctgatgaactatctctcttgagtgaatatattccattcctttagcaatatccagaccaaaatcgattagctgttccaaaggaagggatttctgctcgagcttgtgcagatatgatcttaaagaccctcgaggtacatactctgtgatgatacagtttccagtattcactccaacaaactgtttcaggacacatcaatcagaggaaaaaagtcaaacaaaccataatcataattttcaaacagagttgaaagatgtaatgttaattttcaaaggcatcattcatatttgatacaacctaaccaacataatataacatgatataaactcaccttaacgacatttggatggcttagtcgagataaaagagtggcttccacgataaactctttttctaaacgagctcccaagaatatgtcgtcactatcctcaggcgctgtgataatcttcagagcaacagctttgccttcatattcaccatgataaatctggctatatttcccgtgagcaaacctatccccataagacaacttagacacatcaatgaggcattcttcaagcactcctgcagaacttactttagaacctctatagtcaacagactttgaagacttcttatctatcttgctctttcccctctctttaactttctgcgtactaagatccctaataggacccgagtgagacagggaccgtagattaactgattttttctcagaagaatctttgcgggacgacgacttggccttcattcccttctctggttccactcttctaggatgtggagtagaaaacctcttaatatcagactttgcttcgataaaagcatcagaaagagccatatgaggcaacggagaaacagatctcttcttattagtaactggattcctctgcacttcagtaccaacaacactaccacaactcaaaccagtcagctgctgcgtactctgacaaattcctacaagtgatttcaaatcagatggtgaactcaaagtcattcttttcaatccagaactcttctcttggtttacagtaaaaggcatagattctaaactcggcgtaatcatacgataacaaacagtatgagagaaatttgctctcctaatccaagaagtaacctctccatccatgtttaaacccctccccaaaacaatcacacaatttcttaatcaagcaaagccataaagacgaataagataagtatcaatctccaacaatctcgtcttcacagatccattgaagaaacaccatctatcttcctcaaccattaaatccaaaatttcaaaatttacctacgaacaacacatcaccaaaaaatctccggaaagttttctgaattacaccaccaactctacacatgcgctcttcctaacaaaaatcaatcgaatcaaagaacaacaagtatattaagaaacgattttgtttcattgatgaatcagaaaaaaacgaaatagaaatcgagaacgtacctgaaacacgaatttttcaaaaaacaaaagtacgaagcgtgaaggtcggggaaacaggaatcggaataatccgtcgaaataggttttgagaagagagaaatcaaacggagaaattgatagcttcaatggtaagcaacaacaagacgagagagatttcgagttcgtattttttttttttttttggtctttgacggctttagagagaattttagtattaaaaaagttgccagaaatacgaagggaagacaaattctccagaattttggtcaaagaagaataacacggtagcgtataaagattccaaaacggtagcgttttaaactatcctaaacaatcagatatctaaatttaatagtcaacttaaacacaaaagcgtttgtagtccaatggtaaggttctactcctagcagtcgcatttgcctctctaatttatagagatcaacgagaaaagaatattgcacaaactaattaaaatatccaaattatcacaatttttatctcttaatcgatttattatttgaaattgtattgctttttttgtgtgttataaaagtcaaaattgtttcattattttgctaaaagttcaagaataatcagtaataacctaaaacaaaaaaaacatgtcgagtgttggaactgggagcatttacacacacgattctctcgcagtttggaaaacaaacgcaaccattcttttgcatgaggctcgaccacgtgcctcttcccatctctcacgtgtttcccttttagaaaaattctaaaaagactacagagaaaatccaaattgaggttttgatactcccaatgaaacgtcgtcgttgtatcagttccaacgactcgctttgcctctcctttcttcttctctctacaaaataggattcttcgtttcttcctcgaatacgacgaccacgatactgaccaggtgagtaatcataaaccctatccctctccctgctccaaacaatg

SEQ ID NO: 18223 - DNA, 3000 bp, Unknown; identical to SEQ ID NO: 6850
  misc_feature (1)..( 3000): 2750-1469P.txt file - cDNA_ID_1815803; gDNA_ID_1621109; Annot_ID_56049

SEQ ID NO: 18224 - DNA, 3000 bp, Unknown; identical to SEQ ID NO: 6850
  misc_feature (1)..( 3000): 2750-1469P.txt file - cDNA_ID_1815803; gDNA_ID_1621109; Annot_ID_171726

SEQ ID NO: 18225 - DNA, 2273 bp, Unknown; identical to SEQ ID NO: 6874
  misc_feature (1)..( 2273): 2750-1469P.txt file - cDNA_ID_1815814; gDNA_ID_1621110; Annot_ID_56080

SEQ ID NO: 18226 - DNA, 3003 bp, Unknown
  misc_feature (1)..( 3003): 2750-1469P.txt file - cDNA_ID_1815818; gDNA_ID_1621110; Annot_ID_56079
atgtgataagcaagcaaaaatgtggcccttgttgtctggtggtcaacctgtaactgttgctatgcatgagggtcctatcgcagctatggcttggatcccgggaatgaatctccttgcaactggaagttgggataaaactttgaagtaagaatgattgttcattatttcctatgactgaatgtagcaaattatagaatgttgactgattcatttatttgctgccatgaatttaatgatgtatgttggttttccttccagatattgggacacaagacagcaaaatcctgtacatacccaacagcttccagacaaatgttatacattgtctgtgaaacatcctctgatggttgtcgggactgccgatagaaatctgatagtcttcaacttgcaaaatcctcaggttagaatttttccttgttgttccatgttataacttgcgcatgagagttctaagtgctaacaatgctgtcagcatcacatggttttgggaattcgtgatcaatttagcccatgtgctatcttacaaagaatagatgaacaggctttcaccattagattaacagtttctcttgtgtaaactgtagactgagtttaagagaatccaatccccactgaagtaccagacgaggtgtgttactgccttccctgatcagcaaggttttttggtatgtcttcttatttatgttctgttgtgttttggttaattcagttttacaggaattagcttgttcgttagatgcttacattttaggttagacattgcaatgtttttatttgcaatctcgagaagattttatgtatgtcattctagcaaaaaatagagtaattttatatgggagattgttttgctagtcacatctccagatcctatctaaatcacaatggtgttgaatatgaaaaattaaccagatccaatgatctctataggttggttcaattgaggggcgggttggtgttcatcatctggatgattctcaacagagcaaaaacttcacattcaaatgccacagagatggaaatgatatatattctgtcaactctctgaatttccacccggtaagctctatctatagttatactcttatactcgtatgtattctttgaagccttcagcatatgttgagcgatgaaaatgattgtttgagttgttgtggatttaaggtacatggcacttttgcaactgctgggtcagatggtgctttcaatttctgggacaaagatagtaaacaaagactcaaggtattttcctcctgcattgattttttattttgttaaccaagtaattatctaacagttttgtattctgtgtccccacaggccatgtcgaggtgcaatcagccaattccatgcagctcgttcaaccacgatggatcgatatatgcatatgcggtatgatataaatcttatttggtttcactttatttgtacatgctcatgttatatgttgcaaaatcgagatggtcttttacttggaatctaaaaccatcattgtgttgaaaaacctttgagagcatacatgaatgctttctaacatgtattattatataggcttgctatgactggagcaaaggtgcagaaaatcacaacccggcgactgcaaaaagcagcattttcttgcacctgccacaggtgtgtgcgcgtcacagacaatagtaatatcatcatgtttcctaaacattagtgtctgtatctaacggacggaatttgttttaaatgaaattgcaggaaagcgaggttaaggccaagccaagagttggagcaaccggcagaaaatgagcgttgcttagtctgatttcttcgctagtgattttttttttttttttagcttgtggacttcgttgggctttgttatctactttagttcatgacattttgaatatacattaggagtcttgtctaaaagactaaaagtaaatctctaatgtttctagttgggcctaatttggaaccatctcgtctcatacctctttcgtttcatcatactaaggaaatctttttttcttatcaagaatttattttagtacatctgattccatagttaaactttagttattttaataactcaaatcaataaaatcaaccaagaaatgtttatctaaaactagtataattaaaacgactaatgttttcttctctcattgttactgtcggagcaaattttcctaaatttggttattagttaattttttttttggttgtgtgattaaatatggtcattagttagttagtgaagaaagagagagagataacgtggcagtagattagtggaagcaggagaagaaagcgggaatgagcaaaggacctggactttgtccatagccaagaaactcgcgtcctcttcttcttcctcttcacctatataaacactttgtcttcgaccccaattttccttcaattttatataaaaaataatttgttttcgttttttgtgtttctgtttttctcccttttgttcttctgtttcgttagaataacaacagaaaagaaaaaaagatcgtgagaaaatttcactttgaaaaagaaaaaagtgcagagagagatactttggaaaaattttgtcaacaaagaaagaaagaaagaaagaaagagtgaaaaagaaaacaaagaaacacaccaccctgtttctgtaaaacaagatggcggggaataaagattctagctgggacgatatcaaaaacgaaggcatcgatctcgtaagtatccttctccattaatattcccctcttttacttttgagttagctgctcattcttggttttgaaaacaggagaaaataccgatcgaggaggttcttacacagctccgatgtacaagggaaggacttaccagcgacgaaggccaaactcgcctcgagatcttcggttctaacaagctcgaagagaaaaaggcacacatccttaaatatctttctctttttgtttcttcactctcaagaaactccatctaaaaccaatttgaatcatcccacaggaaaacaaggttttgaagttcttagggtttatg

SEQ ID NO: 18227 - DNA, 3003 bp, Unknown
  misc_feature (1)..( 3003): 2750-1469P.txt file - cDNA_ID_1815822; gDNA_ID_1621110; Annot_ID_56078
ttgtaacgcatcatggatattaccagcaagcaattcgtaaagcttaattctctccttctcaatgaaattaaaatccagcccattccttctccaaaggtgaagctgctgcaagatatcattgcggtttacagttgatccaccagcctggctcaacaaacaagcaagtctaacatctcccttagatatggcaagttccacagctgaatcaagctctcgtccagttagaagaaagaataagtgctcaaggtagctagaaccatttagatcactcacatcttcttgtacacggtgactgacactttcttggagccaacaactgaattctgctcttcggataagcggaagagcttctgtatcaatttttgcagaatcttccttcacatcctgcatcacgtcttcctcgttatcagaagctgcatacatcaaacgttcagtactctgtctctcagaaaagagaacttttatgagttcccagaccatgacttggtgcattaaaaacagcttcgcagatgtggacaacccagcaacttccagctgtttctcgattataccaatataacttcggcagatatctgaaagaactacacgatcggtgacaacattctgaagtttaagactgaaagagccaaacctaacttcttcttctacatgattcaattccttgtggagacttaagggagcctcaaacgcagaatcaataagttctttctgaacttttccctttctatcccaaaccactttgtcaattgctatcttttctttattgatcacagaagacaataccatctgggaactggagctacatattggcttaccagtgtgaaaaagaacgccatttgggccccaacctgctcggaacgatcttcccatgaataatgctgcatcaacaacattgcgggaatagttatcagttaacggtgtgacatggctgatgtccagctcgaaacctcccgttttcgactttctcactgccaaattcttattttgttgtaccatcaggatactacctggggagcttttatcattaccagggttatactccagcaaagcaagcggagttttgcgcacgaccggtggagggtcttgatgactatttctttgagcaattttctgcgaaggtcttacatttcgtttagtcaaggatgtcataagatgggaagtttgctctctaaagtcctcactttcgtcttcatcttcattaggaaacatcagcattctcatttctttcatcttttcaggatcaagtcctaaatgagctgggagagaatgagaaagctctagctccgaagtttccatctgatcttcttcatcaatgtcagctacctttttaccatccagtcctacgggatctcccaaacctggcgcatcatccattgcaatatcttctgcctcatcatcactcaacccaaatctgctgaaatgaggaacgaagaacttccataaaccattatcgggatcaaatgagatgaaagttgctccttgtctttccgtgctctgtttcaatttataagcaatatggttaacttgctgttttccccaagttagatctggtatgtttacgaccagagtcacctcagcagccttgttaagtccctcaccaacaaccggcttggagctctcatcatcataaacaataacctcgtgcctatgaaacttaactatgtgatccaggtccaaccttctaacatccgtgtttccaagaaacctaatataaccgtaaccaatcctgccaatagtaaaatcaggaacccggctgcaataatcagggctttcaatttctcgctcaaccagctcgtttatacatggcttcaagaagtagtcaggagaattcaacataggcaatgaatcaatgatctctttggaatgctcacacaaggcagcaattccatctaaagagatccttcttttctttcgcgagtccaaatctctagccatccttgaaatctctgtcgacatagaatttttgaaaatttcaaaatcagatgataaaagttacaacctaagtagcacacgattctgaatcaaatgaacttagaacaggacttgagcgggtaaggtcagataaaaacatagcagagactcaaacatcagaaaaaaacaaaaagcaaatcaatgtactctaagcatcagtgttacaaactcgaattttataagagttgaatgatgaacatgattctgaagctaacatgatatgtaaaacattaatagcccaagttcaggcgcacgacttgagtagctaaggataaaaacatagcagagactcaaacatcaatagcaacacaaagaagatttacctggaaatggttgaatagaaagagacgtcatgattgaaggaaacagaaacaaacaccgagagggtaaagaaagcgacaagctagggttttctttcttataatcactgactctaccgcgacctttccgatttctcttacaaatccattactgagacgacgctaacttacggcggtgacgatgatcggataaaaatctaaaaccgtcctgattcccctaaattccagagttcttcacactgaagtggtcggagttagccgccgcaggggaaaagagagggaaagctctcatagtgtgtgagatctgccgggtttgtttaggatccgtttaaccacccgacccgaaccgaattcctttccaattaaagtcaacattgggccataataaggcccaaatattaggcccgataatgtttttccttttttcggtatgaaaatgttttaatcccagcgtctgataaacgctgcgccggacgtcaatgtgacgcagagagacctttataagtacttcgtcgcattctctctcttccgactcaattcgttttccctcctcttctgcttaccggaaaagtctatatctccgacggaccttcttctctctaggtttgtctcttttattctgataaaagcttttagagaaggattacttatgtgattctgtctcttgaattgaacttttaacagttaatcagacctcgcgctcgtgataatg

SEQ ID NO: 18228 - DNA, 3003 bp, Unknown
  misc_feature (1)..( 3003): 2750-1469P.txt file - cDNA_ID_1815844; gDNA_ID_1621111; Annot_ID_56087
tagtgggaattaaagcttttatttggggtctgtaataagtaggcgagataagttactcttactctttgaaatctcaaaaccaaaataaaaagtgggaacttaattatgacaatatacatggttcataaaaatgattattcttgataaatgaaccaaccataaaagaaggaactaacagtattccacaagaaaatcagaaatcaagaaatgaagaaaaggagccatgacgtgaaggggaaggtagggttaattaggcggcgtagatgtggatgtgaagggcgatgagggagatggtgatgaaggcgaagaagaggagagtgtggatgacaatggaggggccgcttgtctgaaacccaccgaactcaaccgctttgctctttccgggcagctgaaacaaaactccagggctcaacacgatgaagaaaattaccgacattagcaccggtccccagtccaaccccatctttgttttctgtttcttctctagctataatatacgtctctctataaacatctaccactttattatgtgcttatatttataatgtacgcgtaaatgtgagaatgaacttgatgtcaatacgattaattaataatatatatgtggcttgggctggacaaaagtggagggttcttctcaagtttgtgggatgaaggaaagaactattctctgatatagtattttaaattatctgtacacaaaaataattaaatatctagatcgatagtattttgcttgttttgaaggccaagcatatgattctcctcctcttcaggcatttcaattcataagcaagcatatgattctcctcttaaggcatttcaattcataagccaacatataacaccttacgttcttgctccggttctgagtttaagggaagtccatccgcttctgacggatgtaataatattcatgcaacatatataagtcatatatatactgaagtaattttaaaacgtcaatcgcaaaaataatacacaatacactaattaacgccataatttttatttttttaacaccataattttattatgcactaacgcggttattaatcaaatcacgtagtattagtaatgaaatagggataagatccacatgaggaaagcaaaagaatcgaaaccaaaccaataaacgcaatcaagtatcaaacactttaactttatatacatagccactaaatgtatatatccatccaacaagaaagaaagatactggtcaagtctcaatctgccttcttttgtcatccttaaataatctcaatagtttctgaatttcaaaaaagtacacaaaacacacctattatcacacgtacaatatatatataccaagtgcattaatacacttgtgtgtgtatatgtaatattgttccaagtagtgctttgacacctaataagacgatcaaatctttttggagctctaattgaggtagatatgggaggagcggactgggggccggtggcggttgcggtggtgctgttcgtagtgttatcgccggggcttctgtttcagttgccggcgaggaggagagtgttggagtgcggcaacatgaccacaagcgggatctcaatattggttcatgccattctcttctttgctattatcacgattttggtcatcgccattcaaattcacattcacatctaacatctttattttaatcaccggcttatgtttgtagtataaacctagcttggtataatattgttatctattcatctctcatgtgcttgtttttcttttcatttttaagataaaagtgtacaagttagcttgtgaaactttactgaagaaaatcaaaaatagagtaagagtagtataaaatacttgagaataaataaatgtttggtttgcctcgttatcacttcttgatgttcccacgatcgatcccttcaagagaaaataattaaaacgaaagattgcattcgtatcagcatttatggcggatgattgcgattattaatgcctcctgtaaaacgtgttttattctgtttcttttgaaaattctttcgtcgaaatgaatcattgccgtaaataatcagacattaatatctgattctatctctttaattacatcagataaaacataaaaatgacaaagatttattataaaataatatagaaaatgaaccgtcggaataatgatctgatctcgctatcgataatgaagccaaaatatatatacagtagaaactaatgacataaacgaggttaaaaaatactatcaaatgcatacatcacccaatcaattatatgtggctgcatatggtaatttctttgtatcctcgattaaacgcaacctgtattgtaaaaaaaaaagggtacacatacagaaaaagactcccccaggcccagtagacattttgaatatagatattttctgaatcaaatgttgattgttttttatttttttttgggtaggcaaatgttgattgttgtatatagaggaataagctattgttagaaaatagtttctatttaaaagctaccagtaaacattggtggtgtgtgtgatctatcaactgagtgagattttttttataaaaaaatttaaagaataagagagatcatcatatattcagtcaatcttttttttgtcggctagtattatactaatcaatttgttttttttttctttgtcggctagtatactaaatttgttagttatcagatttaagttaaactttgaatggtaagttactaaatgagacctggaaaaatgattttgaatgtggtcccaaaatgtaagtatgacagggcatgcatcgccgccgaataaaatactagtaacataatgggaaatatttcgtttaatgttttgtctaattattactctaagttcgactaatacatttttttattaaaaaacaacaactgattaacaacagtcctagttaatttcttgtgaaagaaagattaaagggatctaaagatcatcatcaattcatcaagagaccaagaaagaaatacaaggttgatcgtacaaagaaatcgaaaaaatg

SEQ ID NO: 18229 - DNA, 3003 bp, Unknown
  misc_feature (1)..( 3003): 2750-1469P.txt file - cDNA_ID_1815855; gDNA_ID_1621111; Annot_ID_56083
ctctcacaatggttaagctgttctctcggaatgttctggttatgtctgagagaagaccaactcggtcttctgctgataattccagctctaaaccctgaaagtatgtttcatatgcacaatctgtcttgagtatatcagaaatcgatgcagaacagaatgtaatttgagccaagacagagaattttcacattcctaattggttacctccgatgctctcctctcaatggctgcttccagacattgtatgacacgttcttgctctgcttctgagtttatgggaagtccatccacatgacggatgtaaaattcctgcagcaaaacactcatattattgttagaagagagatcccaacagacggccgttgagtagttacctgataagcctccactggttctgtgctgaccatgccatggaacaccacatactgcatatcagtcaaagtacagactacgtcaaacacaagctttggtctatctttggacctcatggtaacaacggtataatccttctcaatgttcattagtgtgacactgggccttgacgccgatgtccttgctcttttgactccctcgtagtccctatcatcaaacatgatctgatgcaaccgtctctccctgtgtgtatcagaacaagagaagactgttttcgcagctcttgagccgctgtttgtcctcactacattgcacagcagctccttgatggtggaaaggcgaatcgggtcagtaatggcagaatgagttgaattgtccgtgacatgaataaccgctgcagctctggtgttgtgagtccatatctcagcgttcacaacgttgcagtgaaggtctgtgagaacagcagatacttcagacaagagaccgggtctgtcagttccagcgagctcaatggatgtgtattcgtcagtgggcattacaccaactgagcttctcaaaggtggaatgaaccacccagcgttgctctctatcctctgcgcaatgaattcaacaaacgttttacacaaagaaaaaaacctgttgaaaatgaaagaaaaaaagtgatgaaatacattagaaaccttttggatatagtcaaggacttgagtgtctctgatcttattgccatcttggtcgatgactttgaaaacgtccatgaaccaacctccatcggaagagatgtaagctttcttgatcacaagattcatatcagtgagcacttgtactacttccaatagagtcccatgtttgttcacactatcaaccttttatttagcaccacaaacaaacagggaactctgttttctcaaaatctctttgtttggtacagaaccacttgaacaatttgaagagacagatttatttacctgaataacagtggcatcgtcgcttgcgttgttgtctattacaactctgtatccaccatgaaacatacataaataaagatgaatgttttagcagctggaatctttacaagggtatagaggctcacaaacggagcatggagaaacagaggacctagaaaacaataaaagagtatggagagaaagagaaaaacctgggaggattcattctcctgatgagcttggcatattcatcatcatccatggttgtagtatgtatctccttggtgatttggctgcagcagaaacccagaagagtgtgagtcctccaatttctgaggaaaattcctaaaagagagagggagagggaagttgaaggaggataaaaatggtaggccaccggaaccgaaccttgttttcattagttgatcgagcacgtgccactaaagattcttagagatgacgtggcacgggcacagcaacttttagattctgttataattgttcgaatactaccaaaagtcgggtgaagatttggggtcaatttgatgatcataaaggggattatattctccttctcaagcaagatgtggtatttactagtataatagatcattcgttatcttgaggtagacctctccgtaacgttcacaggtgcatgaccaagtaacaatttgattcctttccagcataacgtcatgttggttgcaaaaagaaggcaaagtagagcaagcaagcaagcaaagcatttttcttattttatattttgttgcggattccaccacccacttgaaaaattgacatgtcacaatgatttcgtatcctagtcttttattatttaacactctcacaatcccattactctacacctctttcattaagtcaacacacggttttcaaaaatccactaccctcccaccacctagaatcttttgttacctaccaacaccctcctttgttctctttatatattggtccaactaaatcaataagggaaagcatccttttggttggaggaattgctttcattctcactctttgtgtgttgatcaatggactagctaataacaagttcctcctctatatatttcaaaagaatggaacagaaacataaacgaaagacagagtacctgatgttgatgattcattgtctgtctggagctcccaaatgccttttatgcttacatattcataaccaacaacggctattaattataaaccaaaaacacgaaataagtttgtagcaaagtgaaattaggaatcttggagatggatccattagtagtaggataataggatatgatggaatttggttggggaacagtgataacttacgcttgcttccggcgccgggaaagttggaaaacctacaaagtacagaaatggatctgggccttgaagtgggctttttattaaagaaaaaaatacatctccgttatcaatcaccatcttcttctatctacaaattaaagaaggtaacaacagaacgtggtggatcatgtggttaggcattaattatttgctttgtttcgccgttttggtaacacacagacacagttccggtaagagcttttgcagccactctttatagttatttagaattggcgatcgaatcaatctcactccctccctcccttaagtcttgttgaatctgctgaattgttttataaagagttactttggcaaaatg

SEQ ID NO: 18230 - DNA, 3000 bp, Unknown; identical to SEQ ID NO: 14155
  misc_feature (1)..( 3000): 2750-1469P.txt file - cDNA_ID_1815954; gDNA_ID_2214703; Annot_ID_136908

SEQ ID NO: 18231 - DNA, 3000 bp, Unknown; identical to SEQ ID NO: 6895
  misc_feature (1)..( 3000): 2750-1469P.txt file - cDNA_ID_1816083; gDNA_ID_1621115; Annot_ID_56169

SEQ ID NO: 18232 - DNA, 3000 bp, Unknown; identical to SEQ ID NO: 6908
  misc_feature (1)..( 3000): 2750-1469P.txt file - cDNA_ID_1816099; gDNA_ID_1621115; Annot_ID_56191

SEQ ID NO: 18233 - DNA, 3003 bp, Unknown
  misc_feature (1)..( 3003): 2750-1469P.txt file - cDNA_ID_1816103; gDNA_ID_1621115; Annot_ID_56190
tgtccatttgtattccattatgaggcagctctccaatgagttcaatagccttagggtatccattttttaccttaatgcaacctgcaagcaactaagacatcaaagataagatataattcagaagccaaacgaaacgagatgttgcatatgcagtcatggttctttcacctatataattctaaatgcagaaacgtatcagcaagtctcaataagctaaaggatctaaatcataagtgaaagggggaataatcgttctaagcttcaagggaagaaaatatgcgaaatattttgacactcactaaagtgacgaaaacttcagctggcataccgtgttatatgtaaccacatctggtttcagaccatcgcgcttcatctgatcaaacaatttgatgcagctgtcaagctttccattcttgaccagacaactaagaatggagttacatatatagacattgattttggtagactcgtctggaatgctttggtatatttctagagccttggagacatttttggccccaacaaactttatgcagctactgtaagttgaaacactaatctttccatgttgttgcatccattcaaagagctacaaaaagaaaaacactttgattgactatgcacatcttggaactcttgttcctcaggaaacaatgaaacatacaatagtttttatgaaaccatgttcaaagcaacagacctgtataagatcctgccatcttccagagattccaaaatcacgcaaaattacattcaaatcttgtaccttcaaaactgttgctaatctgcagaggggacagttacatcgtgagaaactacagtatccagatcctgaacactcttgacgacggagtataaagattacggcatgctcattaatcgaatcttggatacaagaattcttatgtatctctagtaatgatgtggtcaattaactttccccaatttgaatcaatttaacattctatagagtatagaccaattccattagcaggcactactacatctacttcagaactgagcattctagagatttttgtttacttctgttaagaacaaaatacgtttttaaagacaaatttttgaaatgttgactgaagtaaaatgaatcacagaatttgaagataagtgataagtaatagatagtaagacctctgcagagaagagagaaaatccgaggagcgttgaacttcagaaatggcggattttctcgccaggtatgaattggaatggcgtttggaacgaggagcttctgctacgttcgccggtaattcaataacagcggaagatgtcgttgccgccgtcggcgtgaggattcgtaaggataaggcgggaatggagagagatgaagagggacgagagtgagtgttgaagagatgaggaggacaacgtagttcgagtcccacaagaagtggcgtctccattgttttttcgagctaaccgagccagagcctacgaaagtatccatccatctttgaacatgttcttgtttcttttaccaaagtatccccgcgtttttaattgtaatctagtgctagtttgagaagtgaagggtagtatagtaaattagaaaaaagttctaatcccaaatggccaaatctcatcctcaacaacgcaaggacaaacgccgttttatgatgggcttttcgggagagacaaatgggcttttaggcaaaccattaatttgaaaggattatctaacgggccatattgttaaaaaaagtgcaacaccaaattttgtaatgttgtccatatccaaattggtgacgaaaattctgagaggaacagtaacaaaatctttgacaaacaaaaaaagaggtacagtaacaaaatagtttttctggacaaatattcccatgcgcacgcacttgtcacatcatgcactgttctttgtgcgtcctatgtattgctccatgcactttcatacaagaaaaataataacttgtcatcactgacatgtttttcaacaaaatggcgtttctattgaacctagtttctctaaattacatatgtattgtagaagaaagaattcaaaaacagaaaacagattctttgcatcggcttgtacggcaggagaccgacaaggaacaagcacagccccactccccttctcttcatacgtttcgtgacacccacttcaccatttttttttgtttttttttgaatttttaaccacttcaccatttcttctcgctttggtcaattttttttatggaattcttaacctacaaagttggtatttaaaaaaaaaaaaaactattaactcatatattactttttgatatacccctattaactcatatatgtaacatgtaaaattatactatttcatactacgctaggactatctagaccagtattttgctaatcacacattcaaattatatgcgagtaactttatcttcttcttttttggtaacatatgcgagtagcttaccactatcacaatacttaacttacaccgtcattggaatcgaatctcgtagtataatattagtcattggattatagaatacacatacaagcacaatgaaattcgatagtttccaatcgttaaattattttcatacggatttaaacacatattagttgaacagaagaaaagacaaagatttgaactccatactaataataaccaataagcattgaagcagaagcaacaaaaataactagcaatatagtaagggtcctatcaatatcatttgtcttgttttgttgtgttgtcacgattcaccaagtccctatcacttggaatcgcgattaacaacatcgtccatatctcttttatatatatcttccgacgtcaacatcgttaatcgcatctaaatttagttatttaaaaaatcatcagcagaacaatattttagtggtcgggcttttttatttattcagcgatatctgaatctgatcctggacggtgtgcaacgtctttttccgatttaaaatcatttttttgcattagtgcgatttaattgtgtttctaaaacctatcacacaaaaatg

SEQ ID NO: 18234 - DNA, 3003 bp, Unknown
  misc_feature (1)..( 3003): 2750-1469P.txt file - cDNA_ID_1816111; gDNA_ID_1621115; Annot_ID_56188
tcacataagctatattatttgtaatcaaggaatgcggtcgtgctggcagggatggccagcggtcatcttgtgttttatattacggttatggcgactatgtaagtgcatataaaccaacatattgtatttttcttatccgctttggtagcctggaacgatgaagttctttcatctttccgctcttgatcatgtttatgcatataaaatataatttcagatacgagttaagcatatgattagccaaggaggagttgaccaaagccccatggcaactgggtataatcgtgtagcaagttcagggaggttacttgaaacaaataccgaaaaccttctccgcatggtacttaatgtgaagaatcctacttttttgctttcaatggtatacttgctgagatatttctcctattttattgctgcaggttagatactgcgaaaatgaggtggaatgccgacgtttcctacaactagtgcatttgggggaaaaattcgattccacaaactgcaaaaaaacgtgtgataattgttgcagtagtcagagtttgattgacaaagatgtcaccttgatcacaaggcaactggtacagaaatcattagaatgctcactatgtatgtgttatttttggtcacatctcactatcttctgtgcgttgcacaggttgaactggtgaagcaaacaggagaaaggttttcttcagctcatattcttgaagtctacagaggttccttaaaccaaatggtatgcacaaataataattatccatacttccttcaagctttatgagatatttctacacatatattttgtttttcttccagattatgctaattattaaaacctgtttggcctcataaaccatagtctcttttctatacttggtaaagactaattaataatgaaagcgtaatccaaccagtgtgggtcgatctcttgaaaaaataactgttttctttgcatctaggtcaagaaacacagacatgagactttgcagttccatggagctggaaaacatttatcgaaaattgaagtctctcgtatcttgcattatctcgtaacagaggatattcttgtggaagatgttaggaaaagtgatatgtatggatctgtgtcatcgttgctccaggtacttaattgtgaattatttccatttcgcttctccctctcagtaatgattgaggatgatagtaagctaactggaaccctaattgtctctatttacctatttgtatctaggtgaataacgcaaaggctaccatactattttctggaagccagactatagtgatgaagtatgactttgcgcttatatctttctttatggtttataggaactaggtttaagcaaatcattgcaattacctgtattttatgtgttaacggcttgttaaaattactttagctaagacttccataatctgttgcaggttcccttcttctgtaaaagtattaaagccaagtaaacagggggcaaccgcagcaaaaggtccgctaacatcagagaagcaaagtactcttccacttacaacagaagatgctcctccaaaagatgtggtatagttctgtttagttcagtctctttttttcttgtcgacatgaatctaccactctgaattgctgaggttggttccttgatctttttctctagaatctctctgccaacatgtacacagccttgaggaagcttcgtacagctcttgtcaaagaagcccctgatggtgtcatggcatatcatatattcatgtatgtctgaaaaaccattccgcttttcattttccaagctttgtacttgatcatggtcaattcgattctttcctcacagtctctgtgtttgtggtggcagcaattcaacgcttcagcagataagcagacggatacccagaaccaaagaggaactccttgaaatcaatggccttgggaagtaagtagttctttatcttaaaacctctactcaaaatgaagaaaagtccaaaagtgtttgatgatggtgtgtatctttaaactctctttcagggccaaagtaagcaagtacggtgatcagttgttggaaacaatagaaacaacggtgaacgagtactatggaaccaataagaaagactccatcatcagcaacgatagtcccgattcagggaagagaagaagagacgagaacattagtccaaatgtagccgaggatgatgatttcgaagtaagcccaagccagtcctgcaaaaaaacagtgagaaacaaaagcaatgaggttcttcatggtgaatgtatagatggagatagaagaggcatggagcttgattttgatttcaaagacgaagatgggtcagagatacgaccggagggaagagtattaccgtggtgaagttgtgaccactgaaattttagttgtaaagaaattttgatgtaatattttgttaacttctatggcctactcaatgtaccttaattttcagtagattgaagaaactagttattaaatgctgacttctttgatgatctcttttttttttttaatcaatcatatattgagatttgattagaatgaagaacctacaggtggcgatggatcattaataatataagagattaataatataagagatattattgtgaagaaaccacttcagccaatggattggttagctagacaaggttgactttgggtcaaccctctcactggacttttatctgaggctcttcttgtcgtgaccacacaagctcttttttgcttcacagaaggtaaattcttgtctgcttgttttgctttgatccgtcgtttatactttgttgtggtgagtggaatttgcttcaaaataaatcctgaaattattacgagattctgaaccagttccatttgatataatataataatataaacaatacctgaatctttaagtcaatacttactacaggtttgttatctaaacaagttcttctctgttttagtaaatgtttcttctgtctcagtctcactagaacgatctgtccatgaaattttctcgtaaagggttattatg

SEQ ID NO: 18235 - DNA, 3000 bp, Unknown
  misc_feature (1)..( 3000): 2750-1469P.txt file - cDNA_ID_1816135; gDNA_ID_1621115; Annot_ID_56179
atgatggaaaacaaatgtagactgacgcttcatcaccttggtcttctttgctgttgaacaaagtcaagaagactagggtatatatgactggaaactaaagcatcctaggcattaagtatctttaacaatgaatcagctgtttgtgataaagctaaaattacagagatacatctcttttccacacagttcatttcaatcctgtataagtgattatactaggacagaaaggaatttttcctatatcagtatttataagtgattatactggatttgatctgctagtcaagatgaagcgaaatttgcaaatctgcataaaagcctctccacagcttaagtgagttcatgaatgaacaacctaaatacttaacagaatcctagtttcatgctgttcttaatcctaagataacacagttcctcatgtgccctcaagatgagacccatcaaaaacatacaagccttaatttgaaggagagacagaaaagtcttgtcatttaccgtggatatctgattcagccattatgatcgcttgggcttcccattttctccaactgtaaatctgtgttacgtgataaaaagacaacactgtttcagatggtattgatatgttcgtctgcttaatcttactaacactctatgcacataaatgataatatcgaaggttttccctcaattttcagattgaagataatttctatttgacatatacttaggaccactaattatttgatcatgaggttctctacatcctctagacatgaggataaagttgattgcaagtataatacatctcttcctttcggagcaacatagaaatacttaagaatacaaatttaacactcatatgtagatttaggagctaggatgtgtaccttgctcatggctaaaccaatggcaatgccactgtatagaacatgagtgatacccaggacgaataagaatcttaggagttgctcgagtccctcatacgacacaaatggttcacggccctggcattggatccaacatccagttcagtaatataattaaaagtcaaaaggaaaataggctcttaagtcgatagaaaaagtaaatatttacatgaccacattgatgagaggcttcatgtattccatgatgaggtaaggagctctggtttgtagaagaggtgtgttccagaagaactttcttatggattccatagtcctcttcagagcaaatgtagaatttactattgaaaagggaagagttaacacagatttctgaaatccatctcgcgctttgtgacaacagaagtgatataagtcccagcaacatcaactctaccaagaaagtttaacaagtcaaaatcaaacgaaaaagaaagaaagtataaagcaccacaacatcagcacaggtttatttgacataccctctttcattttctcaagtgaagtaaaaagtgcctttcttctagtcttctttaaccactgaaaacaaaacagaacatgaaattagctcctcatatatatctaacatgaaagacacatcctgtaataatgacttctcttagagtgaaaacatcaacactacttctactgacatttagcaagcataaacacatatctccaagaagaaacatctcgtccataaaaattctcactttctagcacccattattagataaaacatttccagctcatgaatcatggagagcaagagttaacccaagtggcaagtgtgcagaaaaaaaaaaaaaatcataatacgttcttcacactcattcttttgagctgagcatttcaacaaacatatagtaggcacacacacgaagaaaaaatacaaaacaaaaacacacctttccaaatctgtaaatggcgcgttcaacgagaaagcaaacaaagaccaaaacagtaacaaccgaagcaacagagtaagtcggcgtctctgcaagagaccttccttctttcatcatatgctccatctccggcgaggaacttttctcccgagaaaaatggagaatcaatctgcatctgtgattaagaaagtttagctttttcctccatttaattttctacaataaaatatactagtcaaagagaagaaaaaagctcatggaatgctgtaccaagtagaaaccaaagcacatggttgcttcctcgtcttctccaacggtcttctctcttctctttctttattcaattgcttctttcatttattgcagcattcatgtgcttccccctaaatgtcgttaaagaacctaaatttaataatgcaatttaatagccggactttaccgaccggtacaaccattagtcgataataacaaagccgggttgatgatatctcaatcggtttacgtatcattgaaattaggagagagattcaatcactgtccgaattaaatgaacaataatcagatacaaaaaccaaaattacgccatttcatacaatttttgtaaaccgaatttatagcagcaatctactaatcataatctagcagcaacaactcaaccgattttactgataaatggcggttaatattagaagtttacgagtacatcaaagctttgactaatgatactaggatttggcaatttgtggtggaccggtcactgttttgccaggagaataaatgaatatgatataataaattaacacgtgtacaaattcccaacattggggtggtggcgcagttggctagcgcgtaggtctcatagctattgagtgatcctgaggtcgagagttcgagcctctctcaccccatttccctttttctctgtaattttcaattcccaaaataaagaagctttcgtttctctctcgcattgacccttcttctccagttttatgttttgcctctctcccacttctgtaaataatcttctcacatccccgcacgattattctctagccgatcaacgaacacagagacgctaatgtatttgactcgattcgaatcattagtcctctaatcacaccgattgatttccacccacagatttcttgtctgaaatttagggttagcgaaggtttggatcaatg

SEQ ID NO: 18236 - DNA, 3000 bp, Unknown; identical to SEQ ID NO: 6898
  misc_feature (1)..( 3000): 2750-1469P.txt file - cDNA_ID_1816145; gDNA_ID_1621115; Annot_ID_56176

SEQ ID NO: 18237 - DNA, 3003 bp, Unknown
  misc_feature (1)..( 3003): 2750-1469P.txt file - cDNA_ID_1816177; gDNA_ID_2926137; Annot_ID_197274
ttgattaaaagaaagataagttctcaaaagagaatacaagagtatataaagagaaggagaagagaagctgaagaggcaagtcttagaacatacttcaaggctgcctagaacacaacagtaattaaaaacaaagtttgaaattcaaaataaacccttcaactactaaggccacgaaattgtctctttattttagtgggtttgggccttgaatcatcaaaattgattatatgaagtgaaaacataagcctcattaaaaaccttcctttggaaaacccagtgggacaaaaccaaaggcagggaaaaagagcactcatgaatcacttatccatcttgatgaggtccttgagcttagatcaaaacaaagaggtagtgatttggctcaagtcatttggtcggtcccaaatgtggttaagcatcccgccaatggcatggttgaataccttagctctagaacgagtcattgggacggtcgatgtgacaagaacatcctccgctacaagcttctcctcagctacaagctcatcctcagctacaagcttacctccttcctcagctacaagctcacgttcaagctccggttcatgctccatatccttaatgttgtccatgatcatatcatcccctccctcttgaaaaggatttgacctcaaatccggttcatctgcaataaaaggtaccaagtcagaaacattaaagctagaactcacattatacttaccttgcaaatcgagttgataggcattgtcgttgatccgtttgattatcttgaatggaccgtctattcttggcatgagtttggacttcctttgagctcgaaacctctcctttcttaaatgaatccacaccatatctccaacttcgaagatttgttctcgtctccctttattagcttgcttagcatagagtttggtcttttcttctatgtttctcctcgcattctcatggatatgttgcactagctcagccttctttttaccatcaatacttactctttcactcaaaggcaaagggattagatccaaaggtgagatggggttgaaccaataaacaatttgaaaaggagaatacttagaagcagaatgcacgacatgattatatgcaaattcaatatgtggtaagcattcttcccaagttttaatgttctttttaatcaatgcacgcaagagagtacctaaggttctattaaccacttcagtttgaccatcagtttgcggatgacatgtagtagagaataacagcttagttcctaacttagaccacaatgttctccaaaagtaactaagaaacttagtatctctatccgaaactatggacctaggcatcccatgcaaacgaactatctctttaaagaatagattagctacatgcaatgcatcatcagttttatgacaagcaatgaaatgagccatcttagaaaatctatcaaccacaacaaagatagaatcatttcctgttctagtcctaggcaatcccatcacaaaatccattgaaatatcattccagggatgagtaggaataggtaaaggagtatacaaaccgatgggctgaaccttagatttggcttgcttacaagtattacatctcccacaaattctttcaacatcacgtttcatgtgcggccaatggaaatgttctttcatgacttccaacgtcttagcaatgccaaagtgtcccattagtccacctccatgaacttccctgacaaatagatctcgtagagagcagttaggaacacacaaacggttctcatagaagagaaacacgtcttgtctaaaatagtgaccgaaagcaaacttttcacaagctttataaacctcgtgaaaatcatggtcagtttcataaagttcttttatttgttcaaaacccataagcttaacattaagagtagagagtagggtgtacctccgggataatgcatcagcgactacattatccttatcttttttgtacttgatgacgtagggaaatgtctcaataaactcaaaccacctcgcatgtctcttgttaagtttctgttgtcccttcaagtgttttagcgattcatgatcagtgtgaatgacgaactccttagaccataggtagtgttgccacgtttggagagctcggaccaaggcgtacagctccttgtcataggttgggtattttagcgtagctcctccaagtttctcactgaaaaaggcaataggcttttgatcttgcattagaacagctccaatacctatacctgatgcatcacactcaatctcaaacgttttaagaaagtcaggcaatatcaaaacaggtgcattggttagtttatccttgagagactgaaatgcttcttcttgtgcttcctcctatttgaatcctacatcctttttgataacctcggtgagtggtgcggcaatggtactaaagtccttgacaaatctcctataaaatccagcaaggccatgaaaactccttacttctcccacagtctttggactcggccaatctttaataaccttaactttctcttcgtcaaccttaactccatctgcactcacaacaaagccaaaaaacacaagattatccgtgcaaaaggtgcatttctttaggttggcatagagttcctcttttctaaggacattcaaaacagaatctaaatgctctatatgctctctcaagcttttgctgtaaactaagatgtcatcaaagtaaactacaacaaatatcccaatgaatgctcttagaacatgattcatcaacctcatgaatgtactaggtgcattagttaatccaaatggcatgactagccactcatataacccatgtttagttttaaatgcagttttccattcatctccctctctcatcctaatacttaaccgttatattgttgatggctctgcaatcaacacacattctccagctgccatccgcacttacatacttttcatggataccctaagtcaggtaagtctagtggtttatgcaaactatggacgagtggaagatttcgtgagactcaagaaagatatg

SEQ ID NO: 18238 - DNA, 3003 bp, Unknown
  misc_feature (1)..( 3003): 2750-1469P.txt file - cDNA_ID_1816177; gDNA_ID_1621116; Annot_ID_56200
cctttggatatgcgcaccaaaagagactaaggattttgctggatatacacaccaacaagatgatcttcttaaaaaaggtttttgattaaaagaaagataagttctcaaaagagaatacaagagtatataaagagaaggagaagagaagctgaagaggcaagtcttagaacatacttcaaggctgcctagaacacaacagtaattaaaaacaaagtttgaaattcaaaataaacccttcaactactaaggccacgaaattgtctctttattttagtgggtttgggccttgaatcatcaaaattgattatatgaagtgaaaacataagcctcattaaaaaccttcctttggaaaacccagtgggacaaaaccaaaggcagggaaaaagagcactcatgaatcacttatccatcttgatgaggtccttgagcttagatcaaaacaaagaggtagtgatttggctcaagtcatttggtcggtcccaaatgtggttaagcatcccgccaatggcatggttgaataccttagctctagaacgagtcattgggacggtcgatgtgacaagaacatcctccgctacaagcttctcctcagctacaagctcatcctcagctacaagcttacctccttcctcagctacaagctcacgttcaagctccggttcatgctccatatccttaatgttgtccatgatcatatcatcccctccctcttgaaaaggatttgacctcaaatccggttcatctgcaataaaaggtaccaagtcagaaacattaaagctagaactcacattatacttaccttgcaaatcgagttgataggcattgtcgttgatccgtttgattatcttgaatggaccgtctattcttggcatgagtttggacttcctttgagctcgaaacctctcctttcttaaatgaatccacaccatatctccaacttcgaagatttgttctcgtctccctttattagcttgcttagcatagagtttggtcttttcttctatgtttctcctcgcattctcatggatatgttgcactagctcagccttctttttaccatcaatacttactctttcactcaaaggcaaagggattagatccaaaggtgagatggggttgaaccaataaacaatttgaaaaggagaatacttagaagcagaatgcacgacatgattatatgcaaattcaatatgtggtaagcattcttcccaagttttaatgttctttttaatcaatgcacgcaagagagtacctaaggttctattaaccacttcagtttgaccatcagtttgcggatgacatgtagtagagaataacagcttagttcctaacttagaccacaatgttctccaaaagtaactaagaaacttagtatctctatccgaaactatggacctaggcatcccatgcaaacgaactatctctttaaagaatagattagctacatgcaatgcatcatcagttttatgacaagcaatgaaatgagccatcttagaaaatctatcaaccacaacaaagatagaatcatttcctgttctagtcctaggcaatcccatcacaaaatccattgaaatatcattccagggatgagtaggaataggtaaaggagtatacaaaccgatgggctgaaccttagatttggcttgcttacaagtattacatctcccacaaattctttcaacatcacgtttcatgtgcggccaatggaaatgttctttcatgacttccaacgtcttagcaatgccaaagtgtcccattagtccacctccatgaacttccctgacaaatagatctcgtagagagcagttaggaacacacaaacggttctcatagaagagaaacacgtcttgtctaaaatagtgaccgaaagcaaacttttcacaagctttataaacctcgtgaaaatcatggtcagtttcataaagttcttttatttgttcaaaacccataagcttaacattaagagtagagagtagggtgtacctccgggataatgcatcagcgactacattatccttatcttttttgtacttgatgacgtagggaaatgtctcaataaactcaaaccacctcgcatgtctcttgttaagtttctgttgtcccttcaagtgttttagcgattcatgatcagtgtgaatgacgaactccttagaccataggtagtgttgccacgtttggagagctcggaccaaggcgtacagctccttgtcataggttgggtattttagcgtagctcctccaagtttctcactgaaaaaggcaataggcttttgatcttgcattagaacagctccaatacctatacctgatgcatcacactcaatctcaaacgttttaagaaagtcaggcaatatcaaaacaggtgcattggttagtttatccttgagagactgaaatgcttcttcttgtgcttcctcctatttgaatcctacatcctttttgataacctcggtgagtggtgcggcaatggtactaaagtccttgacaaatctcctataaaatccagcaaggccatgaaaactccttacttctcccacagtctttggactcggccaatctttaataaccttaactttctcttcgtcaaccttaactccatctgcactcacaacaaagccaaaaaacacaagattatccgtgcaaaaggtgcatttctttaggttggcatagagttcctcttttctaaggacattcaaaacagaatctaaatgctctatatgctctctcaagcttttgctgtaaactaagatgtcatcaaagtaaactacaacaaatatcccaatgaatgctcttagaacatgattcatcaacctcatgaatgtactaggtgcattagttaatccaaatggcatgactagccactcatataacccatgtttagttttaaatgcagttttccattcatctccctctctcatcctaatacttaaccgttatattgttgatggctctgcaatcaacacacattctccagctgccatccgcacttacatacttttcatg

SEQ ID NO: 18239 - DNA, 3003 bp, Unknown; identical to SEQ ID NO: 18238
  misc_feature (1)..( 3003): 2750-1469P.txt file - cDNA_ID_1816177; gDNA_ID_2926137; Annot_ID_138915

SEQ ID NO: 18240 - DNA, 3003 bp, Unknown; identical to SEQ ID NO: 18238
  misc_feature (1)..( 3003): 2750-1469P.txt file - cDNA_ID_1816177; gDNA_ID_1621116; Annot_ID_171879

SEQ ID NO: 18241 - DNA, 3000 bp, Unknown; identical to SEQ ID NO: 6940
  misc_feature (1)..( 3000): 2750-1469P.txt file - cDNA_ID_1816200; gDNA_ID_1621117; Annot_ID_56224

SEQ ID NO: 18242 - DNA, 3000 bp, Unknown; identical to SEQ ID NO: 6940
  misc_feature (1)..( 3000): 2750-1469P.txt file - cDNA_ID_1816200; gDNA_ID_1621117; Annot_ID_171929

SEQ ID NO: 18243 - DNA, 3000 bp, Unknown; identical to SEQ ID NO: 6941
  misc_feature (1)..( 3000): 2750-1469P.txt file - cDNA_ID_1816208; gDNA_ID_1621117; Annot_ID_56222

SEQ ID NO: 18244 - DNA, 3003 bp, Unknown
  misc_feature (1)..( 3003): 2750-1469P.txt file - cDNA_ID_1816212; gDNA_ID_1621117; Annot_ID_56221
tcctgcagaaccaaatgccatactgctcgcgcttccgctggctccataagccgtcgatgttttcacggcagcgtttacagcgccgtgctgatacattccgttaagcaacaacatatcaaagcctcctccgagttctgacttttgtcctgacaagtttgtagctgtttgcaccaaagctgtttcccaatccgcagaatcatccttaaacgcttcccatcctggaccagactctgaaccagaaccgcttgcgtatggcccgtcaaataaagccaacgctaagctatctccagcttgtcctgcttcaccgccgtttgtattcccaagatcaagtaaatcacccatttcttcttgtttcttctctatgatcacttcttcctttgcttcttcctcaggttttacgtcatcttcttcttttggtggaggttcaggtaaggcctttattgcgttcatatcttcttgctcttcatttacttcctctgttctcgcttcatcatcatcttcatcggcttcagatttaacagattttgattgcttggtgtgttctaaagcagatttgtctcttataaactcatccatgagatcaagcttcttctgtgtgatcttctctatctctggatactcagaagaccgtgcgatccccatgttcttacaccaagagtagaactgatcgagctcttcgaattgtttcgagacccggcagaaaatgtcatagaccttgatcgaatcaggaatatctaactccatgaatcgttcaatcaaaatccccattatctctgttacatcgtaatatatctgaaaactctccttcactatcggatacagagccacaatcacaactctgttgttcctcgcattacctgttaacaaaataacattggtccttatataaatttttatccaagaaacaaacacacacagagaaagaaatcttgagacgcaagttattacctgttgggcgacaagccaagaaacggtcaagaagttgctgcaaatgttggattctgatgaaaatctgctctgttttcatctcggcgatcggttgtgacctgaccacgatagccgtggagagatctgccgcagcttgatcctgttcttcttcgtcagcttctcctccaacgcagtaaactccacgtttcccgtgtctcgcttgcatcctcaaaaattgcaatgaaaaaaaaaaaaaaaccgcatatcttagatatcattcaaattacataaataacttgaaatcccgaatcggaacctggatcaagcacaagaactcttacctgaaatcaagcctttcgtcaaggtacaatgcgtaagtcctgacaaacgcagagtagtcccaagaattagacctcgaaacatccctaaaatcagacatattgagaagccttgttccacggcgagtggcgaagaagatctcttgctcgtaggcttgatctccttctcctaagagcctttggatcaaaatcaaggttttgagggcaacggtccagcatttggttttattaaggcgtctcgaaagcgtgctaacgcaagcgttgatgtaactgcgtgagtaagaagttaggctaagaatctctctaatgtatttctcttctgctggaaactcttcgtgacgagtggctttgacgatggctacgtcaagttcagataaagaagcgcttcgaccattgactttggctagaccgacgctggtttggtcctttacggctcctatggctcgtttaaacttactcgaacccatttttattctgattagttagtaaatttgtattaaagacaaaaaaaagaaaagaaaatatgtaaaagaaaagatttgaagagagaaaagggaagaacgaggcttgtttttattttgtttttgtttttcctcgtcgtttccttttttctcctctgtttcttgtttagttttgttttgtttcttcttcttcttcttctatgtttttgtttgtttgtttcgtcaatgtagtttctttgttgttcgtcgattattcaccatctaaagtcgccgaggttattggaggctttgtccggtgagaaatatggccacgtggcaaaaaattaacttattgtttgacgggtcaactgaaatttagtttgcatttgccattaatgggtaaggagaagagtactgattaaagaggaaaaaactttcttctaatttgtaaaaaaaaatacaccaagcttttttcttatggattggaagcccaagattgaattatggaatccaacaaatcaaaatcgatccaagcccatttctgctgacatattttttactcgtattatattcagaaatgccacaattttgttttgtgaaaaatagaaaaacccttgtctctcaaaatggaaaacgagtcggacaacggttcagcactaaggagaagcaagttgtaataccatatggcaaaatgaaacgtgtcatttttatattggatattagaaactttactccatgagtgctaaatttcggaaaaaacgacaaagacagatttttttaaaaaaatcttattttctaccactaacgagatgacgacgaccccgacaatgcgtagaatttttcccatatcatttatatattttaaaaaaagaaagttatattggtttttaacattctactaaaaagagtttggtaaaagacctttttcttaatttgatatgaataaattgaagaaagtcaaaacaaaaagcccacttcaaaacaaataaagcccacttcaagtttctggaaggtatataagaacaagggcaaaaccgaaaataaaccacaaagtaaggtccttttaacaaaaataaaatgaaagagagcataaagtgagtctttttgtcatatcctttctcgtctgtgtctcttcgtcctcattagcttaagcatcatcattctctcacctaacaactccacacaagattcttcgcatggaaagttgttcttcgacttctcttctctaactcgctatcttttaactcacccagctccactgagtcgaaaatttcaaacctttactcgtttccttcatg

SEQ ID NO: 18245 - DNA, 3003 bp, Unknown
  misc_feature (1)..( 3003): 2750-1469P.txt file - cDNA_ID_1816220; gDNA_ID_1621117; Annot_ID_56219
gagagtaaagtagaacgttcttgaaggcaccacgtggccgcgtgtgaagatgaaacgttaagtttgttgttaaccgtaaagaccggaagtctctagatgactccaaaggtttcaagtattctcttataagaatataccaaagcttccactacattattattttttaacgaaggacataaactatagcatcataaattcataatgtaagcagaatcgttatatcctccgcatcctccgccatgttcatcacaacccccaccgtgatgatcacgaaagcaacagtctttatctatttccatgtgtcatcgccggtagtgactgttcgagtttaattattctccgtcacgagacaacgataacagatgctacaacaaaatacagtaccaacgataacaaccaaactaacggttgcttacacgtacgacgacaataatataaacttccatcattgcttttatgttgttgtggaatttgttgcgacaacttttcccctaaatattctaagttctgagcatacaaatttagctcctctatccgtatttatactttttttctcctttcatttttttttttgttacttatggattaactgttagcgtaataatgtgtggtttgaggtgtttgaaattaaatatcttaacatatagtatgtaacaaaaatttaatatatgttagcattttacattagtgtgacacatgtttgaaattatcaaacaatttttaagataataagaaataatatatgtgatatattgtattagcagtataaaagaaatataataacttaaatgaaatatgcataactactaacaaagtaacatatatatatttctttatttatgataattattaaatagtaataatgtttgaggtgtgataataaattatcttaatatatacaaaaccatatgtttgaggtgttgatgacatttctagttaatcaaaatttgtgttactgtctcgtcgtcatatataaggtttatgtgggcctcatttgtaaaagaattacttaaaagtgggctttcacaaaaacataggacatgtttttagacttttaacctttaaaggtccattggaatttttttgttggcaactcctatattagaacttagtcctaaatgattatagtcgtcacatacaaatattggtgtttagatatgacatgaatcagacaaatgaaatactataataattgttggaaaattgttttagaagcagaattcggaccaagttctatctttaatttttttctgaaaatatatcgtctctttatcatcagatgttctacttttggttgatgactatttaccaccagtactataaggtttattgtttgtttaacatacgcgacctctgcattttgatagatagataaatatatgttagaattttctcacaatgacatagttatatttttaagaaattcatatataaattaaatatgaatttaaatatgtttcgtattattattaaaaagacataaaagttttggtccaaaaagtgtttaaattttgcaaagaggggatcacgtttcgcaatcgttcagcaaacctatacgaacacgtggcattctcgtcccgtgggctctacttgcgattgtagacgtgaacctagaaactacattggcccttgtttttcttaataattataatttaggtctcgtttgtttcaaaaccttcatccagatccatattgccgttaatttttctaatttctgttgatattgtgctcactagataataacttttcacaaatatggtttacaaattctttttatgttgtgttggctctcgtattacaaaaagaacctaaactgtatgctaaataaatttatttattattttggcatgaggtaaatatatatactatgtataggcttaaaagtaaaaactaagaaaggtaaaaattaactttaattttaagtatgagttaagtctattgtaaaaattcaaaagtagcaatgtttttttttccctatccatatggaatttattttattaaaaatataataaaacaaaataatatcctaatgtgtatctctaaaacatccttatttgaccatttgtatataaactaactcaaacaattatataaaatgatagagaagatagagtcaacctttgttactttcacgaacgaaatgtcaaaggtattcaagtgtccctagttgataattttatatgcgccattgttttggtctacaaaatttagctgtggggtttgcgatgcaagactaatttgggggtcaaaatggtaatgaaatattgtagtggttataaaatagtataaaacaaaatttcaagggctaataaagtaataaaattggaaataatttacgaaggagaaacaaacagtatcgtgttttagagagagaaagtgagacgacttgagcgagaaacaaggcgcggagagagacgacgccgtcaacaacaccagaacagaaaaaaaaaacaaagaaagaaggaagaaaaaagagagagaaggagatttgatttaatttaaattttctttaaggaaaaaaaaaacaaaaacaaaatcgcgtttttccgctaagctctttttcttccctttttgtcaaaatttgggtttttgctcattctcgtggaaggaaaaaaggggattttttcaagtgtttaggggttcacaaattgaaaattttggatcttagatctttcttcttgctacgaaaccctaattcgtcacattgtatcagctcaatttgatcttaaaaaaaaaagactatttttttcctttttgggtctccttcttctttctttctttaatttgaattcctcaatttaaggattgtgtgttttgtttccttcttgtgaacgaatgagagttttgggttgatcgcatttttagggttgattttatttatctgatcgacgactcggatctgaggtgggtcgtgtttggagaccgagtcagggtctggtctggtctggtgaggtcgtcgtcttcatcggatgaaagtttctgggatcgaaaagcacaacgatg

SEQ ID NO: 18246 - DNA, 3000 bp, Unknown; identical to SEQ ID NO: 6936
  misc_feature (1)..( 3000): 2750-1469P.txt file - cDNA_ID_1816224; gDNA_ID_1621117; Annot_ID_56218

SEQ ID NO: 18247 - DNA, 3000 bp, Unknown; identical to SEQ ID NO: 6934
  misc_feature (1)..( 3000): 2750-1469P.txt file - cDNA_ID_1816228; gDNA_ID_1621117; Annot_ID_56216

SEQ ID NO: 18248 - DNA, 3000 bp, Unknown; identical to SEQ ID NO: 6947
  misc_feature (1)..( 3000): 2750-1469P.txt file - cDNA_ID_1816239; gDNA_ID_1621117; Annot_ID_56213

SEQ ID NO: 18249 - DNA, 446 bp, Unknown; identical to SEQ ID NO: 6958
  misc_feature (1)..( 446): 2750-1469P.txt file - cDNA_ID_1816252; gDNA_ID_1621118; Annot_ID_56238

SEQ ID NO: 18250 - DNA, 3003 bp, Unknown
  misc_feature (1)..( 3003): 2750-1469P.txt file - cDNA_ID_1816284; gDNA_ID_1621118; Annot_ID_56229
tttgggtttgattcatctgtccctgtgttggttgctatctttatcccaatttgaggttaaagtcatgttcttgtaagaatagatttgggtttgacttatcttttccctatgatgcttagtacatcaagtttaggttctgtgtatcagagtttgaagtgttatatatagaagttgtggcctagaaggctagtgtatttgcttccctgtgttgaatatattactgtaatctcccctgtgttggttgctatcattagtacgttctgtgttgtcacagagttttaagcgctatgtatagaagttgtaacctagtgttcttacttctgccaaagcttgtgattgtttgagttatgtgtgtttgattttttgttttgttggcaaagaacttatgtgtgtgtgtacttttggaatttgttcagaggaactatgttatctgccaagtgatgtataagggtgaagatggagacgtcccatctggtggtaacaactcgagtgagccgagtcaatctttggtctctgattcgaatactgtcagagctacgagtcccacagcgcttgaggtgactccagtttctttatttgataatctcatgtacttgattcgtttactcaaaactctcttttacattttcagtttgagaagccaggtcaagaaaatttctttggtatgtctgtggatgatttggggactccaaagaatgaacaagaagatttctctttgtgggatgtactggatccagacatgttattcagtgacaataacaatcctactgtgcatccacaagctcctcacttaaccccgaatgatgatgagtttctcggtggattgaggcatgttaaccgagagcaggttgaatatttgtttgccaatgaagatttcatatccagaccaaccttatctatgaccgagaaccgcaacgatcacaggccaaagaaggctttgtcagggattattgttgattatagcagtgatagtaatagtgatgctgaatcgatatctgcaacggtaaagcaaatcacccgttttctttatcgttacttctgtgctgtaatctccattctcacattttgattatattatgtcagagttaccaaggaacatcaagtccaggtgatgatagtgttggtagttcgaatagacaatttctccagactggtggagatgagattctatcgtcttgcaatgatctacaaacctatggagaaccttccatcagtagtagcacccggcaatctcaactcacacgaagcatcatacgaccaaaacaagaggttttgcgttgctcttatgttgattctatatgatttcaacatatgttggatatataaagataatgattatgtaactttccttcacaggtgaaacaagatacatcaagagcggttgatagtgatacatccatagacaaggagtcatctatggtgaagacagagaagaagagctggtttattacagaggaagcaatggagagaaaccgcaacaatccacggtatatctatctcatgagaatgatcataggcttcattctcttgctggctctcattagcaacatcatatcggtgttacaaaacttgaacccggcgatgaagtttgatcgcgagagatagacaaaagctagcagattgatcaaagcactcgtttttactttgcttttatttatttctattttcttccgaaattttgatgtatatatgtgtgtgtatgtatgaccaagaggtatgtcttgtacctaaagttaaataaaatttagggtttgaaaattttataacatttagagcgggtccatagttcagtgccgtggtggagcattagactgctgataaagaaaacattcgacagagaccagtgaatggtttgaaaggtttctcaaagatttggtttgttgataattaagagaatgattacataccggacaagggactggtctaatgtgattgatacttcgatgatcaatcaatcaaatattacttcgatgatcaatcaatcaatcaatcatattacttacaactatgtaatatgattctatgaacctttttcttgttttttgtaaactttaatcccttatcttgcaagccaaatccatagacatatattttacaaaattagtagtagtactatattgaagtagagaaagtaataacgccatgtcgtcgtcgtcgatggtggcggctataatttccgaaagatccttcgactcaaaatacacaaaaaaaacaaggaaaagagaaaggttcatactttcgttcgaagctccgacaatgaaccgtcaataatttgccacgtcttcattctcattcacaataaaaataaattttgttcctctcatttgtcaaccttttttgtttttgtttaaagaatttgtcaacctattggaaaacattttgcattcaattaaaatcttatcgctaacagttttttgttttttgtttttttttcaactatcttatttattaacagtagtaaatttgttataaaatacataatattacatttcttccaatacataattgatatctaaatatccgatcgttgtaaatttggagtttcattcatcttaaaatgtgtgaaaaattacggctgatgtgtgacaaacacaaaagataaaaagttactaaacacaatttttttacaaaattaaattgaaacgaaaaaaaaaaatttaacaaaaaactaaaaagaaaaaacattttagaaatagacacaagtcatcaacacggtttcggcgcgagtagacttcacggcttttgttctttacttactgagaaattactaaaatttggtttttttttttttttcaaatagaaaaaaactataaataccatcactcgctatctcttcaccaatcacttcctacttgtatttgaaaaagaaagaaaaacagagagagagagggagaagccaaaaaaaaaaacagagaagcagaaaaaaataaattccttcacccaaaccctagaattttttttagaaagttttgttttttcgatctgtttctgtgtgaaaagatg

SEQ ID NO: 18251 - DNA, 3003 bp, Unknown; identical to SEQ ID NO: 18250
  misc_feature (1)..( 3003): 2750-1469P.txt file - cDNA_ID_1816284; gDNA_ID_1621118; Annot_ID_171943

SEQ ID NO: 18252 - DNA, 3000 bp, Unknown
  misc_feature (1)..( 3000): 2750-1469P.txt file - cDNA_ID_1816284; gDNA_ID_2926161; Annot_ID_139714
gggtttgattcatctgtccctgtgttggttgctatctttatcccaatttgaggttaaagtcatgttcttgtaagaatagatttgggtttgacttatcttttccctatgatgcttagtacatcaagtttaggttctgtgtatcagagtttgaagtgttatatatagaagttgtggcctagaaggctagtgtatttgcttccctgtgttgaatatattactgtaatctcccctgtgttggttgctatcattagtacgttctgtgttgtcacagagttttaagcgctatgtatagaagttgtaacctagtgttcttacttctgccaaagcttgtgattgtttgagttatgtgtgtttgattttttgttttgttggcaaagaacttatgtgtgtgtgtacttttggaatttgttcagaggaactatgttatctgccaagtgatgtataagggtgaagatggagacgtcccatctggtggtaacaactcgagtgagccgagtcaatctttggtctctgattcgaatactgtcagagctacgagtcccacagcgcttgaggtgactccagtttctttatttgataatctcatgtacttgattcgtttactcaaaactctcttttacattttcagtttgagaagccaggtcaagaaaatttctttggtatgtctgtggatgatttggggactccaaagaatgaacaagaagatttctctttgtgggatgtactggatccagacatgttattcagtgacaataacaatcctactgtgcatccacaagctcctcacttaaccccgaatgatgatgagtttctcggtggattgaggcatgttaaccgagagcaggttgaatatttgtttgccaatgaagatttcatatccagaccaaccttatctatgaccgagaaccgcaacgatcacaggccaaagaaggctttgtcagggattattgttgattatagcagtgatagtaatagtgatgctgaatcgatatctgcaacggtaaagcaaatcacccgttttctttatcgttacttctgtgctgtaatctccattctcacattttgattatattatgtcagagttaccaaggaacatcaagtccaggtgatgatagtgttggtagttcgaatagacaatttctccagactggtggagatgagattctatcgtcttgcaatgatctacaaacctatggagaaccttccatcagtagtagcacccggcaatctcaactcacacgaagcatcatacgaccaaaacaagaggttttgcgttgctcttatgttgattctatatgatttcaacatatgttggatatataaagataatgattatgtaactttccttcacaggtgaaacaagatacatcaagagcggttgatagtgatacatccatagacaaggagtcatctatggtgaagacagagaagaagagctggtttattacagaggaagcaatggagagaaaccgcaacaatccacggtatatctatctcatgagaatgatcataggcttcattctcttgctggctctcattagcaacatcatatcggtgttacaaaacttgaacccggcgatgaagtttgatcgcgagagatagacaaaagctagcagattgatcaaagcactcgtttttactttgcttttatttatttctattttcttccgaaattttgatgtatatatgtgtgtgtatgtatgaccaagaggtatgtcttgtacctaaagttaaataaaatttagggtttgaaaattttataacatttagagcgggtccatagttcagtgccgtggtggagcattagactgctgataaagaaaacattcgacagagaccagtgaatggtttgaaaggtttctcaaagatttggtttgttgataattaagagaatgattacataccggacaagggactggtctaatgtgattgatacttcgatgatcaatcaatcaaatattacttcgatgatcaatcaatcaatcaatcatattacttacaactatgtaatatgattctatgaacctttttcttgttttttgtaaactttaatcccttatcttgcaagccaaatccatagacatatattttacaaaattagtagtagtactatattgaagtagagaaagtaataacgccatgtcgtcgtcgtcgatggtggcggctataatttccgaaagatccttcgactcaaaatacacaaaaaaaacaaggaaaagagaaaggttcatactttcgttcgaagctccgacaatgaaccgtcaataatttgccacgtcttcattctcattcacaataaaaataaattttgttcctctcatttgtcaaccttttttgtttttgtttaaagaatttgtcaacctattggaaaacattttgcattcaattaaaatcttatcgctaacagttttttgttttttgtttttttttcaactatcttatttattaacagtagtaaatttgttataaaatacataatattacatttcttccaatacataattgatatctaaatatccgatcgttgtaaatttggagtttcattcatcttaaaatgtgtgaaaaattacggctgatgtgtgacaaacacaaaagataaaaagttactaaacacaatttttttacaaaattaaattgaaacgaaaaaaaaaaatttaacaaaaaactaaaaagaaaaaacattttagaaatagacacaagtcatcaacacggtttcggcgcgagtagacttcacggcttttgttctttacttactgagaaattactaaaatttggtttttttttttttttcaaatagaaaaaaactataaataccatcactcgctatctcttcaccaatcacttcctacttgtatttgaaaaagaaagaaaaacagagagagagagggagaagccaaaaaaaaaaacagagaagcagaaaaaaataaattccttcacccaaaccctagaattttttttagaaagttttgttttttcgatctgtttctgtgtgaaaagatg

SEQ ID NO: 18253 - DNA, 3000 bp, Unknown; identical to SEQ ID NO: 18252
  misc_feature (1)..( 3000): 2750-1469P.txt file - cDNA_ID_1816284; gDNA_ID_2926161; Annot_ID_198769

SEQ ID NO: 18254 - DNA, 3003 bp, Unknown
  misc_feature (1)..( 3003): 2750-1469P.txt file - cDNA_ID_1816288; gDNA_ID_1621118; Annot_ID_56228
tcagctttgccgttttcatcgattaaagagagagaggcttcgttcgccgtccgtcgtaaaaatggggttcaagaggaagaaagatgatggtgatggtgaggaaatggaatctgatgttcgtggaaagtctactttcagtgggggtgagaagaggaatgtgatacttccttcgatgattaagaacaaagataagagatcaaaagtgtatgcgaagcagaagcatgagaagaaattggagaagcagaagaagattagagctcgtgatgctgctgagaaacgagctttagagcttggagaagaggtaacgatctggagaagcttttttagggattttttaaaggtgtttatgaatttgagatattaagtttggtgtgtgttattcgtttgtagcctccacaaaagatgattccgaagacgattgagaatacaagagaatctgatgaaactgtttgcagacctgacgatgaagaagtatgtttagatttaaagtttgattcatctcaatttttgaattcaattcattgtcgtgttgctaatttagtgtaattgagtttgtagttgtttgcggatattgatgctgatgagtttaatccagttctgagacgtgagattgcacctaaggtcttgctcacaacatgtcgtttcaattccactgtaagtcttttttttttggtaccattgtttcataagagattctacagatttgtttgtggttttctgattcaagtaatgttgttggattgcagagaggacctgctttaatatctgagttgctttcggtgataccaaactctcattatcaaaagagaggaacctatgatttgaagaaggtgttgttataagtttcatagcttccttgtttctctataaagttagtctttttgcaactatataaccttgttagatatggttctgcagattgtagaatacgcaacgaagaaagattttacatctcttattgttgttcatacaaatcgtagagaacctggttagttttcactgagtttcaagttttgtgctctctactgtatatgctttgtttcaagcttttgctatttcatatgtagatgcgcttcttatcatcggtttgccaaatggtcctactgctcatttcaaattgtcaaatcttgttctaaggaaggatattaaggtatgtaagctaaccattactcttctctacatcgagtgtagattagtgatcactgaattggatgttaaatgtaactgcagaatcacggaaatcctacaagccatcaaccagaactggttttgaataactttacaacgcgtttagggaatcgtgttgggaggtatagttttcatagtgttgttgacttggttttatggtctctttgaatttcttgctgatgttagatttttccttttttcagattttttcaatcactcttccctccggatcctaatttccgtggtaggagagttgtaacattccacaaccagcgtgactttatatttttcagacatcaccggtacataacttcaccttttcttcttcgagttgcttttgctccattctccaataaaactttttattgaacaaatttcaacactatccagttacatatttgagacaaaggaaagcaagagtgataaaggaaaagaagagacaataaaacctcgtcttcaggtcagttttgaccatgttgaatcaaaaagtaatcaacattatcaatgtttgtatcattaaactttggatttttaggaatgcggtcctcgattcacgcttaagctagttactctacagcatggaacttttgacaccaaaggtggagaatttgaatgggttcataaggtaaaatcaccagaaatggacacgagcagcttcattgctgttctttagagtttttgatgatttttaattttattttctgatgtgttttttttttgtatttcattacagcctgaaatggacacgagcaggagaaggttcttcttataaattctgctgtcttccgagtttcaccaagttttgtgtttattttgcattttcgaattttccctacctccgtccaaaattgtatgtctttaaaacttctcatttcttttttcaatatagccatgagccatcgaaacaatcgtaagagtacttgtttcaacaatataggccctcgttttttactaagctatatatagttggttaaacttatgattgtttggtttggtatatatcgacatcgagcatttgaatctacagcagtaatattggattttgtttagtagttaagtggacctttatgttgcataattaatagttttacgatcatcagttcatcaccataataataggattagatttgaggatgtgaatggttacggtggttgagacggataaatccgtttgcgaattagaccgtttttgatttaccatttataaattagagtatgtaagattatagattaagaaaaataaaagaaaatcgtcgcggatcaattatagaccgtttttaccgccgtaagcattcaaatcctgaacatctctaatgataatgtaataggattgacaaaaacaaatctaaaaattaattacgattatttaggtgtagtatagaacgtaattacgtatatgtatgttactatgttgtcaattatgtcggctataatattccagaaagatccttcggaaaggaaaaaaaaaaactgaaacttcggttcgaagttcaaacaatttttcttactgccacgtgttacttcatacacaattaaaatatttttttgtccctctcatttgtcaacgtttaggggaaaaacattaatatacttttactgcattccgccacaaatatctttctttctttttttatggttcttcttcaccccaactgtattagtactgttcgtctttcagaaaaaacaataatagatagaggaaaaaagaaagaaacagagaagtgagaaaaagcccttaaaactcaaacactaaaaaattttcagtgtcgattcaaaaagttttgttatttgatctgtttctgtgtaaaaaaaatg

SEQ ID NO: 18255 - DNA, 3003 bp, Unknown
  misc_feature (1)..( 3003): 2750-1469P.txt file - cDNA_ID_1816300; gDNA_ID_1621119; Annot_ID_56271
ggtccaaaaccaagaaaagcattagaatacttctcctcagggatatctcttttcctcaacagcttcataccaaagacctcagtgtaaaacctggtgagacaaataaagaatatcttaaaatgtaaaataactcctgttacagaaagataaagaataaggtattaatgaaaaagaaaaagacatactcaatggtgcgatcaagatcaccaacgcggtagacaacatggagaaaacgacggttatccttcttaggccattccaacaaatcagaagcctcagccatgtttctagaaagaagaaaacttgattcagctgctctcattgaaacaaaatgtacattacaaatcgagataaaacattgacacagcctcaacatagaggcggaagcaatctcattcatttcccctataaacttgctctctcctgataaatttaacgaacaccatcaactctagatttacatttaccaggattcttataaaacatcactaatctcaacttcataagcattttcaacccaaaaaggtctcaactttaacatacccaaaatcatgatgcaccaaatatgaatcttattataagttcgccgctattatataatcgcaaaacgatcaacaagaacgaacggaattgtgatttctcaatgatcatcacaacacaaagaacaattacattctataaaaatcccactaaattatcgatccacgaatcctgtcctaaattagatccggaaaacaccggatcgctagaataaaattccactattgaatcgagaaaaaatgattaagaatcacaaaatctagaacatgatcaacgaaatgtttagaacttgatcatatctgcaacagtaaacacacctgggaagaagatgtacggtacaaaaaagctaaaccactctcgagtaggtgagtaatccagtcattgttggcacaatcgtcgtcacttaaataggagtttgtagaaactttgccgacaatgtctttgctactgcctgtgacatagttagatcatcacagacgcgttacaaccgatggatgagtgtattattgtgaaaatatggtgaacgaccgttacggttataatctaacagccgtgtcatgggatgacacgtggcggcgtgaaacaggtgttaaaaacatgcttctgtaaaccgtctgtttacagtgtgcgacacagactcgagcatagagaaagaatctcattcaagtagaatcgtgtttcatgtgattttggaaaggcattagccaaggcccacacaaaattgtgaaattagaatttagcgagggagtgaagcccatcagtccgtgaaatgggatctcagcccatttagaaaatattttatttcttttgtttatatatattttctggtgttttgtatgaaatttggacgatgtcttattcacgacacatcataagctttctttatcgacatgtttggttttgaaatggaatcattttcttcattcttctttttggcactaccataaaaagaaggctttttatgcattaaattttaaaagtaaaaacgataaaattggcttcacattgaatcttttgaagccatgcgtagtgtataccgagactacattatgaaaacgacacacctcttagcaatgcggtaacggattgtaaattttaaaatcaaaccctttgtataatttcaatatatataactgtagatttaataattcctataaacagacgaaaaagtgtcacggttcattgttattttgttttccgtaatgaaaatctgtttattttatttatataaaggagataactaaattgtttcaggagattggcatatactatagcatataattcagtgtgatttcatgattcaaagagtgtttgtttattgacatacatacatacagaaagctttcctctttttcagagtttgtttctttgtttgtttaatctgttatcttatgttacatatggatctctatgttagtatgtttgttgggttgctgtatttttttttttttgtcctctctttcttctcttgctcgactagaaagaagtctacaactttacaaaagagactatgtaaaagtgatacaaaaagagaaaatgtattcattttgtctaacataatttctttgtatataagttccctttaaacagtttagtcggtgcaaaaagattcaggctaacaatattacttgttacgttttcttgagacatctatttttattttttttcttgtattgtttgagatgagaaaaagtgttatcaacaaataaataaaatgggccattgtcttcttgctgttcagcggaagcatgggttatattgtaattctctgtttgtcaacttgtaattcaatgtgtttgatagatatatttcaatgaccggaaaataaatacatagagaaaacacctacataatataatagtataattcaactaaaggccattgttatatgctttcaattgtccacttttattacatgtggtcaacaccaacatcccatttccaacccaatatacaaaaccaaaataataataaagaataatattttttattttattttatcttaattgtttgaagaactattattttagacagagtctttttgtgtacaagcaattcaactttatttaatttggttttttacaaaatttatggatgaaagaaaatattccaaatggaccaaatctattaaagattacatagtgatgcctagctggtgcttttatcggaattcaagggcattacggtaaaatatcacatatggtctgaaaaaaaaacagtttgtgtggggaggagcgagcagagtcggttcacgtgaaagcacagagacataaatctttctttcacagcctaaaacccctaaaaatgtctaatctctcttcttcttctccgtttctctttagattatctcaaccatacagccataaatccatcggaagaggaggaagataatgcaagaatcagtcgctgagtctgaatctgaaggggaagagttgcacaataagctcaagctcctcttcaatg

SEQ ID NO: 18256 - DNA, 3000 bp, Unknown; identical to SEQ ID NO: 6971
  misc_feature (1)..( 3000): 2750-1469P.txt file - cDNA_ID_1816304; gDNA_ID_1621119; Annot_ID_56267

SEQ ID NO: 18257 - DNA, 3000 bp, Unknown; identical to SEQ ID NO: 6971
  misc_feature (1)..( 3000): 2750-1469P.txt file - cDNA_ID_1816304; gDNA_ID_1621119; Annot_ID_172007

SEQ ID NO: 18258 - DNA, 3000 bp, Unknown; identical to SEQ ID NO: 6973
  misc_feature (1)..( 3000): 2750-1469P.txt file - cDNA_ID_1816312; gDNA_ID_1621119; Annot_ID_56265

SEQ ID NO: 18259 - DNA, 3003 bp, Unknown
  misc_feature (1)..( 3003): 2750-1469P.txt file - cDNA_ID_1816328; gDNA_ID_1621119; Annot_ID_56257
ctatcttatatatcactgaaatgtctttgttgctctagtaaccactgtgcaacatcaattgttgacttgcatcgaagctgtccaaagtgttcatatgaattgtgtctgaactgttgccaagagatccgtggaggttggctttctgaccgcccggaatgtcagctacaattcgagtacagagggacccggtatatacatggcgaagctgcagaaccgagctcttcttctgtttccgaggatgaaactaaaactccatccatcaagtggaatgctgatgaaaatggaagcatacggtgtgcgccaaaagagctaggaggttgcggggactctgtgctggagcttaagcgaatcttaccagtgacttggatgtcagatttggagcaaaaggcagaaacattcttagcctcttatagtatcaaaccgccaatgtcatattgtagatgttcttctgatatgagtagtatgaagaggaaggcagcttcgagggacggatctagtgacaattacctttattctcctgattctttggatgtcctgaagcaagaagaacttctgcatttccaagagcattggtccaaaggtgaaccagtgattgttcgaaatgctcttaacaacacagctggtttaagctgggagccaatggtgatgtggcgggctttatgtgagaatgttgattcagcaattagctctaatatgtctgatgtcaaagctatcgattgtttagctaattgtgaggtagaaactcattttcttataaagtttctatagctgtataagaggttataaagctcattttgtttcttgttatttcaggtgaagataaatactctatgtttctttgaaggatatagcaaaggaagaacatatgaaaacttctggcctgagatgctgaagctgaaggattggcctccttcagacaagtttgaaaaccttttacctcgtcactgcgatgagttcatttccgcattaccatttcaagaatacagcgatcctagatcaggaattctcaacattgctacaaaacttcctgaaggacttcttaaaccagatcttggtccaaaaacttatgttgcatatgggacttcagatgagctcggtagaggagattcagtcactaagcttcactgtgatatgtcagatgctgtaagtttcagaattgttacttagtactgttaaataataatacggtttctcaggtgtataacggttttttgtttttgtaggttaatattctgatgcatactgctgaagtaacactaagtgaggagcaaaggtctgcaattgcagatttgaaacagaaacataagcaacagaatgagaaagagcttcaggagcaaaatggtttagaggaagaagaggttgtgagtgatgagattgtggtttatgatgaaacaagtggtgcactttgggacatctttaaaagagaagatgttcctaagcttgaagagtatctaaggaagcattgcatagaattcagacatacttattgctctcgtgttacaaaggtaagaaataatccacaaaacgttttcagttccgagtcttagaggttattgtgctgataggattctttatgttaggtgtatcatccaatacatgatcagtcatatttcttaaccgtggagcataaaagaaaactcaaggcagaatttggtatggttacttgtaactgtagtaactgtcacttaccgacattgtattcttacgtttttgtgtttgtttgtttgaactaaagggattgagccatggacatttgtgcaaaagctaggagaagcagtgtttattccagcaggttgtcctcatcaagttcggaatctcaaggttattatttgaatggaagctgtcctattaactaaactttttctcattatctttaacttgtattatggattttgatacagtcgtgcacaaaggtagctgttgattttgtttcccctgaaaacatcgatgagtgtctccgtttgactgatgagtttcgacaactccctaagaaccataaagccagagaagacaaacttgaggtgattctttttctgatattttcaattttggattagcaacttctgtcaatggatacagttttgtttgtagttgaatcttgttttaatctttgccatgtgaacagataaaaaagatggtgatctatgcagttgaacaagctctgaaagaagtggagacattattgctagatcgcagctaaaagctctatagctttgttgttgtaggattaacagcagattttgtagaattgttaaagccatggctattgtagttggcttttgctgtgatatatgtatgtaaaagagacaagtgtctcttgaaaagaatgatttcctttttttcaaatgggattttgatgtaacttttccttttccggtctgttttggcatatgaatgaatatttgatgtaagcttcttttgtatagttttgtatctttacatcattttgagagcaaatgaaagtttatgatatgagagcatcatagattcatagtagcaaatacaattggttcagttgttgcttgcaaatttttactgcagtaaatatggattgttttgttttcaaaggttttaaaatgacttaatacattaatttccaaaggttttgttttaaggtattttttttttttttctaattgtatagaaggaaatacaataattaatattcctagtcaaattgtataattttcataccattttctgacaatttcaatttcggacaacaatttaatgatgttctaatttaacgtgggtcccaactaacttaaaacgtgtacgtggcttacgacgtcgtttacaagtttatacgtcgaactatcaacatcattctacctttctttctctctttctctcaaaatccaaaatgttgtaatttgcaattcttcagtttccgtttctctcctgagaaatttattgacttcaaaaaccctaaaaagacttgtgattgttcgtttctctaactcgaatgttgatcgtacgacggtgagtgatcgtagtacaatg

SEQ ID NO: 18260 - DNA, 3003 bp, Unknown
  misc_feature (1)..( 3003): 2750-1469P.txt file - cDNA_ID_1816336; gDNA_ID_1621119; Annot_ID_56255
tatatgtttttttttcattatatgattgaagagtatatcaagattttggtgtgcacatgatatgtgagatttatatgtttcttattaattgaatcctacaaaaattcaattaaaacacaataaagaaacactcctctaaaactaggtcaaagttcagaatcttcatagaaccaaaagcaaccaatataacataagcaaatcaaacagaagaaaagaaagaaagaaaaaaattagaaaaccaaaacaattgacataaacctagctagtcttattgtaaccaaacctagattagcaacaaccacctctaagggcaagaacaagatgaagaacactaccacgttctaggttgtaatgtttggcggttaaatcatcagcaagttgtttcccagtgtagacgatcctttgatgaacaggaggaatgccttctttctcttcgattcgttctttgatccgctcaatcgtgtccgttagctcaatctcaatgtctatttgtttttccgtcagagtcttcactttgatctccatgcttactcaagttttctctctcgctctcaaccttgtcttttgtctctcaaatcaaaatatatatatcttcggatagttaaaagccttgaaggatttggagttatttccttttttttaggcattggaatttccaaaacaaatccattatttaacatattttagtagattttatcagatcaataaaaaattcattaacgtttagcaaaattaaggtaaaaactgaaataccttttatcaagtaatccattaataatctttctttgtactgaaaaaaaacccaatcaaatttcatggtttacttgatacttctagaagttttaataaaaaataaaataaaaattgaaattcacccaaaagtcctttaagaacttatccaaacttaaaaacagttcaaatatcaaattcatccctttttatattgacaattgaatattatggttgagtgtttgaaaaacaaaaaaaaattgatgaatttgttttctttcttttttgccgtccggttttggttcgatttatccttattttgtaacctttttaatcgagttgagttttctcatttctgtaatgaatatttgtttatttatttattatgtgattcaagagaatatcaagattttggtgtgacattctaatttaccagataaggttatttgcaggtttattgttctaaaaggttcatatttttgtagaatcacaacccacctagtaacattaattgacgagaataccaaaattttcggatttgtcagactaatttgcttcttatcaattaaatcctacataaattcaacataaaacatacaaacaaaacaaaaactcctctaaaactaggtctaaaagtcagaattttcatagaaccaaaagcagtgattaacattgagaaatacaacagaagaataaaagaaaaaaatagaaaaccaagacaatagaaccaaacctcgatcgattatcaaaaacgatgaataacactaccacgtagtcggttataatgttcggcggttaaatcatcagaaggaatgcctatttcctcttcgattccttctttgatctgttcaatcttgtccatgggatcaatctcaatgtcgatttttttttcactaagaaattgagatttgactttgaaacgctgtcgttcagcaatctcccgcttcccatgtgaatttaaagtattaacgtggtggcattcacgctccaacttgcgcgtgacattctccagaagctcgatcaatgcataacccacgtggcacatacgcgacttccactgttgccgccccacgtggcagctagctgattttaggatcaaatctaataccaatgcactaaattaattataataattacttaacaatctacggattatcttcttacttcataagatccttatattttcattacactttgactcattcctttcaaattctcatattcactgattgaatacagtacagcataagacatgtgtttaagtgaagtaaacgctttactaatcagtaatcaaggattcaactagaaaaagggagccacagagacaaagactatacgcagaccaacgtcaccctcaacctttttctattcacccaatgctaaagaacaaaataaaaaaaaatctttccattgtcaaacattaaaaagtaaaaaaaaaagttcttcatcttcctcgtcctcactttattcctattccgtgttttttcagcgttttccacagctaaaaaccgacatagcttctctatttttgtttcctgggtgtatgtatgtacagagaataagaccgatctctccaagatctctgttttctgaagagttggtgaatactgtttaagcttctctataagagtgtcattccaaggtatctcttacttctctaatttggtgtttttagctttgtcttcaatttcttcttcaattttaatttctatgtatttgagtaatctataagttagattgcttatacagaaattctaggaaaatggtatttctttgtcaaaaagagacgttactgcaaaaaaacacttctttttctgggttttgggtctctttgagattttgatctaggagttgaattgaattgaaatcttttcttaaaggttctagtcactgctatactagtgcataaattctgttctttttattgattactagtaatatgaaaatgagaggaacaagagacgtattaaggtatgatattaaaatgtagagatatatcttcactctttttggaatactctgaaaatcttatcttaccaattcctctttaccaatttccttttcggtaaaatgtagaattttttatatctaagaaatataaatttccataatctgtacatatatcacacgctttttgaatgaatatttttgtaggtgaagtttttgatttcaaagggttcgaattgattttgcaggtgaagaagaagcgtttgattcccaaaggagattcatttatttgataaatagatttaagctaagagttaaaaaaagatg

SEQ ID NO: 18261 - DNA, 3003 bp, Unknown
  misc_feature (1)..( 3003): 2750-1469P.txt file - cDNA_ID_1816348; gDNA_ID_1621119; Annot_ID_56251
agaaagtgctttcccaatcgacatcttcaacttcggtctcgagggtatctaaacctttggaacgaagcatttctttgaacttttgttccatatgtttcttgtagtgttcctttgtcatcctctcaatgttgtccattagatcatatggtagtccatggttcaccagctgaaataacgaaactttgaattgtaacgtccattttcggaaaaaaaaaatgtaagggaaaataatttgattatttttcaaaataataggttttatgtatatgataccaaagaatatctaagaaagaacctaaattccctgataatcaatcagcaagagaagagagacaagaacctcgaagaagccccagttttgacaagcatcgtcgatcaaagccatggtttggtctctctcttcaccattgagcttagacaagtctataactggaaacttaatgttcatctccatctctctctctctctcttaactagctacttaatgttttcgatccttgatgatgctaaatgtgtgagttaaggggttgagagagggtcgctagctatttataggcgcaaataataaaacaaatgttaagtcttttaaataattttttaagtaaaacgatagataagtatcatagagtcataagatcacataattgggtcatttagataatagttgctaaatataaaaattatttttcttattagaaagaaaaagagtttggggaagttgtatttgtgtgtgtgcaatataattggggggaccttactctcctgcttttgagatgggataaaatttggtgttttccatttgtatctctagttctacaattctattggttatttcttttgcctttttaaaaaaaaacatgaataattgtttataaggttcgtacaagtaaagactcgaagagtttttttatctgctggtgctttgtggagtcattagatgcaaaaaaaaaggctagggatgatgtgtaatatacgatcaatctcgacaaataacaatattacaatatactgattttggatttttggttatctagttatgtatgattgatcattttatttgaatcactatgaatagggaatgactaagtcattgtaaaatgcgtacaagcaataaatagaaaatcgtttgtgcttgtaattctactatttgacagatagattttcttattttgcataatagcaggatgaggagacaaattccatgttgagtaatttatttatatatattgtagatggtaacatatacaagaggatgattttcatcaccaacatcttgcatcttcgagttgcatgattatttcctcgttcttatgggtgttggcaagtaggtctgatgtatatatatcaagtaaaaatatgttattttcagtgagagaatttgaatttgacttatagttttgacttagagtaatattcaaaattagaatgaaatgaagttttttctttccttttcttaactggactgaaaatttatgatgtatatatgatgatcattttcttttacttttgtcaaataaattgtgaaataacaaaacataaattaaattatcaataactaattgacagaatcgcaaaatcagtttatcgttctaattcatggattaccaaccacaacctaaagatacgtatatgattttggtcctttttggattataaatcaactttgttaattttgggaaggaagaagattaacctgatcatttttctgtcaaattatcttgatcattatgaggttgcttcttcgataataccggttggccttggccagctaatataattacaataagttatctttggattcttccataatagggaaaaaatattcctcatagtttaacaaatcaataaaaacctttaaatcaaatgtttggtaagaaaagtatacattatatataatttaactaaagttagaaaatattcccaaactcattaagaagtgaaactaaaataaaataagtttaaaatgatagtactttctctttatgtacgaaaaacaacacaatatacgattaattacttccaagttgtaatagttgaggttataatacctttcttttttcggaaaagggttaaagttgaggttataataattcgtgccacaaaaaatcttgtatcaagtaacaagaaaataaatcaatctttatctctctcgtatcttgtgaaattaattgataattgataacaaaaaatcagaaagaaatacttcggtcggtggctactactacctacttttcttttagtgatcttagcccaataacccccatgcgagcttgttatttctttcactaattgaaaagttcttttttttgtcaagtattaatttacaaactatatatctatcgaaattcggatttatctagacttattatgaacaaaatacttactttcaatggtaacgttttaattttttaaaaaaattcagatttatgcttacaaaacgttcatatataccgtcttcttcttactgttcaatgtcttgattgattttttggtgaaagtaaactatggaattacatgtctttttaaaaacttatggagttatacacacgcatgcattttcattaatacaacactaatttcgttataataaaatgcaacagactaggctatattgtgtttggtttggtgtctacgcaaggcatgtgtactcgtcgcatacaaaacgtaaaaatagacagcaaaaaagaagctagctagatacgataatctcaaggctcaaaagcccaaaaattaaattgggccttaaagttccgaacatcatagaacaggccattatacaagatatccctaaaataccctttgccttgtaggatgagtaaattaataaaggaattgactattaaacccttgggtcagagtatatattcacaccaaccccaatgcggagacctcgaagtgaactccattgacgacgagtgaacgaaaggagggaagaaaaaagttaggttcgaaacgaaagtaaactagttaggtgaaaagcgaaacaacacccacagagcaatg

SEQ ID NO: 18262 - DNA, 3000 bp, Unknown; identical to SEQ ID NO: 6965
  misc_feature (1)..( 3000): 2750-1469P.txt file - cDNA_ID_1816352; gDNA_ID_1621119; Annot_ID_56250

SEQ ID NO: 18263 - DNA, 3000 bp, Unknown; identical to SEQ ID NO: 6965
  misc_feature (1)..( 3000): 2750-1469P.txt file - cDNA_ID_1816352; gDNA_ID_1621119; Annot_ID_171989

SEQ ID NO: 18264 - DNA, 3003 bp, Unknown
  misc_feature (1)..( 3003): 2750-1469P.txt file - cDNA_ID_1816358; gDNA_ID_1621119; Annot_ID_56248
gcgtagatccacataaaaatgacctaaatacctcacttttaagctatgttgccgggtagttaaataagcaaagctcatgttcaagtaattttcgttttctggagattgatccaaggggatgtatatataggccctataacagagcaagaaatgtccaatattacatgttcaattgcaaagcatgttaaaacaagagagggataggccatccaattttcccgatgagaaaacctctagcgcgaagtaatagtatgaaaatcccggctcacaaacataagcataccatcatcagtgtgtcattaccacagtcatgctcgtttttggtcaattggctaagaaacgatccgtggtggaatgggtgaagcagtgccttgtcgttggtgttggcgatcttaagaggggagaacaccagtatacttgtcaacaaacaccgtgtatatcgctagcacgacttagttccatcccgctgtccttcttcatccatgtggttgccttccttcttatgtatttacataggtccaaccaagtttcttatcgaaattaccatgtgaaatatttttaaaaaatcttaaattattttttataatgaatttaataaataaaatacattttactacaacactatcgattaatacattagacaaattggaatcgttgtaaaatttaaaatataagaaaaaaggcaaaaaaatgagcaaaatataagacgaaacaagaagcaaaacataagaagaaaagcttggaatggtaagttcatatttgatacattaacatcaagaattatgagttttaattaccaactatacaaaaaaagaacaacacaacaatatgaagacctatactttaaaaaatcgaacttatcaacttatcatttcaaactttatagctaatcatattatatcagttttaaactatcctctaaacttaccatacattttggctatcataaaaatgaaaaagataaatctacattttaatatgccgatcttaaaatatgaggaaataacaatttgttttgaaagcatgcgtcaaaaaaatctctacactccgattcacgaatgtggatctacaaataagctacttaagcgtaaagttataaaaatggcagaagatggtcaatccaaccgtaacgcccagcagtattaatctgctgagaacaaaagaatgattgagaaagtgttagccagggtcgcacaataataattaagatatagcaagaaaccatttaactgaatcaacaactacaaattaccaacgaaaattaattagttggaaagactaaaattcattaacttggtgtttttatttcattttcggttcaagtattttgcctattctcgagattgatccaaggcgatgcatccctaacacataaattgctagcaatgtccaatattaattaatgaacacagacgacgacaaaagaaaaaaaaaactaattttaaagcatgtggaattgaaggagtatctcaaatactctctagaagatcatttgaagggatgatccaacaaagcaaactacaatatccacaaaaactcttattgtctctgaatcaaacagagctataacattcaaaaaatttataaagccaacgcgcttgatcatcaagatgaagatagaatcgaagtttatgttattagcaaactgggaatcaggaaggaacacatccttcgaaatagataagcgatcatgtcatagtaggtacaatacaatcaaatggatcactgtattcatcaatttcagacactctagttgtaaaagaacttaacgatccataatcaagaatcacccacaattgtcagtcaaacagatcaacataaggtttaagagttctacaaatgatttagttagttcattcgttaaggaattagtggatttgtggcagaaaattcagaactaaattcaatatatgtgattagtgatcagagtgtttcaaacacgtcactgtctaaatccaaaggagaagtgttcaaacctagaggaagctactgggttttgagagttaagaagatcagaccagtccgatatatcttatatatagaaccacatgcacgagaatcatgaaaacgtagtgattttgatttttgtttagtagaacaaatattttgagatttttttagaaatttgttagaatttgagattttttatatgactaagacagagccaaacactagtgccgtcacgtgtaatagataagtttctatccggatgaagccattagcggtgacaaggtttaatagtattcaactactaattgcaagaactttagatacattgaatctagacagcatttcagattcattgaacttggacgtgtttggtttactctactacttctggtttccgcatcagatgtttagaatgtatcagcaaatctactgatgtgaaaaaaaaaacaagacgaaagatccgaccacaacttgccacgtggtaaccacaatttaacttgttgccggtacgtgtgtccacgcgctactatgtaaccgtgaccgtgacctagcttttttagtttttactccaactggaactggttatggatactttgtcacggacgttagttaataaatgttggcgtccgttaatcagaatttttgaagtaaataaaatatacaaaggtgttattaaaaatctgaatctaaaaatgaaaattaattgactaacactaaatgcctaattattttatttttctgatataatccttttaaaagtgaatgtatctggacaatatggtggtaacaattgagaatctaaaattaatccgccagcatatcccaaagctgtaattaatttaacgggatttagggtttctccgttacacaaaacgccgttaatcctttttcaccatcatgttgtcatattttacattttgtcgtttactccgtcaaaaagtcaaagtctctgtcaacataatgaaaacatatcactaaatataattaatactcgtgtatatatatcccacaagtcaccgagaagatgagaaatcaagaaaagggcataaaatg

SEQ ID NO: 18265 - DNA, 3003 bp, Unknown; identical to SEQ ID NO: 18264
  misc_feature (1)..( 3003): 2750-1469P.txt file - cDNA_ID_1816358; gDNA_ID_1621119; Annot_ID_171986

SEQ ID NO: 18266 - DNA, 3000 bp, Unknown; identical to SEQ ID NO: 6963
  misc_feature (1)..( 3000): 2750-1469P.txt file - cDNA_ID_1816366; gDNA_ID_1621119; Annot_ID_56246

SEQ ID NO: 18267 - DNA, 3003 bp, Unknown
  misc_feature (1)..( 3003): 2750-1469P.txt file - cDNA_ID_1816377; gDNA_ID_1621119; Annot_ID_56243
tttggagaataagaacccttgaataaaatttaaagggtcacactcaaaacgtttcaacttcaaatcattttggtattggatttataaaaatataaacaaatgatttaccattttgtcaaattttaacatatttgtattgtaatttattttactatcatctgttaattagcattggaaattacatgtcatgaaaagaacagactaaagaacatgatgaaactgtgtaaatgactatcttttcaccattttaatcctgttaaacgatgtgagattgattattgtctgagaaagagaatgcaatctttactattgtagtcaataattttcttaaaaatacaaatcaaaagtatcttccatgacatcaaatattattgtccaaaagaaaaaaattagtactactctattttaaatttgtaccatatttgacttaagatgacgtggctacaagttgcgggctcatgtgactataagccaggtaggattcctcgtgaatgtggaccctaaagtacatcagtttccgtttttggtcaataacgccatttaaggaaatcttaagcctaacaaaatgaccattttaatatgaaaattgaaaaaattactatcttcactagtaatatttatttttcccaatttatttagaaaactaaatttgacattatatttctacatttagtatactttacattgaaaatacatgatacgattaattttgacattattgtctttttactatctatattttagttagatagattattaagtttatctaaacatattgatgttggttttttaattttgtaaatcaaaattgtgtgattgatgttttctctaattagattttaagccaatctctaatgtttaggctctaaaactttttttttttcgattaaacaggttttataaccttataaacaatctatatttaggctttacttttagttgatgaaataagtagagcaaattgtgcataaggttgatttctttttcgacaaaaagagaagaagatacaggccacaagacacgtactcgtcacaatctgtaaagaatggccagcagaaaagccggtaaaaagagttggacggctaagatgaccccattcagttggtcctatttatcatatagttttgtccgaaaatgaactaaaacaccaataatgcgtaagggataaacgttacaaaactggaaactttaggtagaggggaacaaaaaagtagatatatcttaggtataagtcaacacagagggtcattttgatctgttaatacaatacaatattaatctaacacataatgcattcatcactctatttccaagttccagaaattttgtttggtcgcagataaataaattgcagcttaatgacgtcgtcggtcaatatcgtaataataataataataataataataataataataataataataataataataataataataataataataatgataaaaaaccgttactatacttgaaaatagtttatcaaaaacatacatttcatcaaaaactagatatattataaagaaaaaagtgggggaaataaaaaaatgagggagacacatacagtatatcctttactcctcgatataactttaattaatttatgaggtagatctgaaaaaaagttgtaaataattcacttttcgtgtcccaattatgaaaaacgccccatgtcttcaacatgtgtaacgctaaagcgcggacaaactgatggatatgtctctaaattatattttctctacgagtggttctacaccgttgatttagaagaaagatttgaatctcatggtagaggattcatatcgtaaggttagtaattgggaattgtggtttgctatatatcgatctagaccatatccaaaataattaatattggttcgaatttggatatgaagatcatacattatgattaaataatgttttaaaaaatgagagaaaattttgatgaagagaaaaaatatttttggtttggtgatcattacaaaatctgggttgggtctgatcccaaaaatatcagagaatacaaaacaaaatggctctaatcctgtatttttttctggatggtgtatacttggacatgagaagactctagttaacaatcgctatatagttcaatcatagaaattttcgaaaaaattgtacgtgaaactctattgaattagcaaaatttcttatatttttggtaaacaaaaacttcttagattataatgattgcattggtctttacgaatagtatgtattagttgttaaaatttatttattcgattttaacgatcagatagtggaggaggtcaaatttcaaagaccactgttggacttgggactagaggcctaattcaatagcccaataaaattttcaatttgactttctttaaaacctatgaaatttctcttcctttatatattaccactgctgactcagaccaatttttctccatcgccacgacgacattcgctggtcatggtagataacggaagtaacaattttgtaaccagggctttatgcacacaattttttcggaccagacttaagaggtgaatgcgtctatttcgatttacgtgcatgcatgcatatatagctaattatattgtaccaattatttttagaaaaagaaaaaaaaacctgtgaacgggaagactacaagtcttaattaattaaggatcaccacatatgaccttttcttcgaactccatatttaaacattcctcaaacatttctctctcattatcttttatttctcttcttgttactttcttctcattcttttgacgaaaaacaaaccctttaattagactctcttttattctcccatactctttttttgctgtcttatttttgaagttttttttttttttttttttttgctgtctcctcgttgaactcagttgcataaccatctccagtaaatcatgtcgaatcaaatccaacggtagagattttctacgacaaatctgaattaaatcagagaacgaatagagatcaggaaagcaaagatg

SEQ ID NO: 18268 - DNA, 3003 bp, Unknown; identical to SEQ ID NO: 18267
  misc_feature (1)..( 3003): 2750-1469P.txt file - cDNA_ID_1816377; gDNA_ID_1621119; Annot_ID_171980

SEQ ID NO: 18269 - DNA, 3000 bp, Unknown; identical to SEQ ID NO: 6959
  misc_feature (1)..( 3000): 2750-1469P.txt file - cDNA_ID_1816383; gDNA_ID_2936561; Annot_ID_194447

SEQ ID NO: 18270 - DNA, 3000 bp, Unknown; identical to SEQ ID NO: 6959
  misc_feature (1)..( 3000): 2750-1469P.txt file - cDNA_ID_1816383; gDNA_ID_1621119; Annot_ID_56239

SEQ ID NO: 18271 - DNA, 3000 bp, Unknown; identical to SEQ ID NO: 6959
  misc_feature (1)..( 3000): 2750-1469P.txt file - cDNA_ID_1816383; gDNA_ID_1621119; Annot_ID_171971

SEQ ID NO: 18272 - DNA, 3003 bp, Unknown
  misc_feature (1)..( 3003): 2750-1469P.txt file - cDNA_ID_1816391; gDNA_ID_1621121; Annot_ID_56294
aggaaaactaaaaaactaaaatcatgaatgaaaaactccaacaaaattatttttttaaattgtagggaaaccaaaattttaaaatcttgattggtatgaaaataagtttttgaaaaacaaaaaccaaaaactcttaaaaaatctacaaaacattcaaggccgttgataactgtatataaaatactagtttgataaagataagagaacatataagtaaagaaatgaatttttttttttacacgacgttgtcctcttttacagtatcaaattacaaacatttgaatgaatgtattgtctgggcttggtaacgtgattgatcatggaatgagatgaactagaatcttgtattgtaagtgattgagttaaggtggcattagttgctagaaatgcaatcatcagacgatgaattattaaataaattatcatttgatattcagatctcatattgatacatgtaccgtgttcttacatgacaaactcgtcgtttccccataaaattcgaatattttaacacttatctggactttcgacgattgctttagattcgagaatctcaatgcttgtatattactagtaccaacttgaattattctcagttttccacacatttgaattattgtataaccatatagtattaagttattatcacagttacaatttaaaaagtcattatgtaaacatctgctagaaatccatgaaatattatatacttcctctatagcataaaattgtacggtcggatataacaatatattccaattgggaacgacatcaagaacctaccatgaattcgagttaaaatagtagatttggcactgaaatgttttatgttttacattgcagtcatacttcaaagatttagtggttcttgttctcatcatgtccgagagcatacctatctaaattttggttattacttctcggttcgatccatttggttttccccacaaggtccaacccacgagcctagtgttgtctttagtgacacataacaatcctcgcagtaaaatatgctattgatatcacgacttgtaaaatatgatagatatcaagcctctattagtagatggatcaaatcatacatcataagttcataacctacgaaaacaacactacattcaagccagatcaataactaatagcccaatgcagtaaaaatgggcctaaaagcttgctcgttttgcgtttatttttgggtgagagaaaagcccataggatcacgaccggtccacagaaacaacaataaatcaagccagaccaataaaaactacggtttgacattgttcccgttacagactaaaccgaaaataaacacgttgtgacgaatggtacgttagttattacgtggttgcgtggaaaagaagaagttccacgtggtgactaaagtttgcacgttgcctcttgacacttttgcttctaacgtaaccatttctaaattttgttttggattcaattaatttccacgatattgaacgtttatattcagaaactcatgtatacatgactttttcagtttccgaccaacaatttaggtctcatttgaattgatttggacatgaaaattgttagaaaagttattaaattgatgtattatttaccaaacttttgttgcattctatcgaaagtcaattacaaaaacaggtgttgatattattgacttaagatcgtttagaagtaagaacagtatattgtcgtgattagtttgacgggtatgatcgaatcgcaagactcaaacaggaccgtcgattttatagggtaaacgattcccacaagtcacggaggctgagagccttgagcgtaggtgctgacctggcacacaaatgtaaaacttggccaccaattaagacacgtgtcttgttaagctccgtccccttaggccacgtggcaactgtttttctttggcagtgatggttcttctttgagagttcgtcggtgtccttatcggaaatgtaagaattcgtaaagaaataaaagttggcaattactataacttaggctgaaatgtctgtattgtccttaagcaataccatcaaaatttaataattttgttaactaacaaaattattgagaacattaaagtgaaaaaaccattcgacatattccaattttttcacattctttgttaaatttctgattttctccttctctatgactgttacacaattgatcaacggacgtaagggtttggagtatattgtacatttttttttcttaaacgagaggagaaaaaaaaaagaagggattcctcatccgcaaatagattcattgaatcaaaaaaaatcccaaccagacaaaaaacattagaatcatgcagtggatcccacttccgaccatttgctgatttttccgtaaatacattctagatatttttttaaaagaaaacgcaatttagattttaaattctagattttaaattctagagaagtaattcgcgcaaaaactgtaatcaaagtttaaattcgaaaattttgattagtttacgttgatcgaacaaactacaaagtaccaaaaaacagttatttatagtttcataatcacaaatggataacgacattagtaacaacattaataacatcatcttagtttaagtcagtagtaatctatggttaaacaaaaagggtaattaagtaatttgcattgctcagttcgcttccattgctggatttaacgggcgaataagaacaccaccaaggatagattggtttatttctagtttcttcggatctataaagtagaagaagaagaagaaaaattctcaatttctctctcacaatctcttcgttttctgtgattttatttagattttcccatttcaatctcttgttagaaattgtatatatacctagatcgattggttcgtagatctgtttgtttttctagggaaagttctttgattctccagaaaattggacgaagctttggattcaaattccagaattaaaaaaaaacagaaaaaaaattctttaggttttcattttgaattcttaccagagagtttcaatg

SEQ ID NO: 18273 - DNA, 3003 bp, Unknown; identical to SEQ ID NO: 18272
  misc_feature (1)..( 3003): 2750-1469P.txt file - cDNA_ID_1816391; gDNA_ID_1621121; Annot_ID_172090

SEQ ID NO: 18274 - DNA, 3 bp, Unknown
  misc_feature (1)..( 3): 2750-1469P.txt file - cDNA_ID_1816391; gDNA_ID_1563325; Annot_ID_147471
gaa

SEQ ID NO: 18275 - DNA, 3003 bp, Unknown
  misc_feature (1)..( 3003): 2750-1469P.txt file - cDNA_ID_1816407; gDNA_ID_1621121; Annot_ID_56286
accggaacttcttaaccaaattctgagcaagtctcctctcgagtctaatatacttagacccttcttcactctcatcatcatctctcttcctcttcccattactctttatcactaaagtcctctcttcctccactgtaacctaatttcccaccaaaacccccaaatcataaattaaattaaaaaaaaaaccctaatttcataaacaattcaacatttctatgggattatatcaatacctggatatctgattttgaaattccggggatatcgagataaaatatgtattctttgggagattccaaaatgtctattgggatattattgctacttcctcttccacgactctcgttattactttcgccggaacgagaaatcgggagaattagcttctcgatcgcctccggtaagccaaaaaagtggttaatcgcaacagcactcatcttctccgatcaatgactgccagaaaacaaaacagttaaaaaaatcaacaattctgaaattttccaggaaaagatcgatacagagaataggatcattacctgggaattaggataaccctttccaattggatcttcctcttcttcgatttgatagtatggggtttgaaattttcactccattgatatatagtgagtaaacaccagtgagctagaaagttccagagaaaatttctagaagtaactagtgaacttgagagttgtttcaaaagcttccacgtcattaaatctccttttattgggccttataagttatttataggccgtttagcacattggacttgatttatgtctttgttctattttgtatttttatttcttatatctgtttttattgggccttgaaagttattccaggccttagcccattagacttgatttatctcgttttattttagttagagtttttgagacttgagacaacctacctaaccatactatagacaagaaaataaaaatacttttgtatattagagaaattttgaaatccgtcagtgtgtatattcaatattcctaacgaaaaaatggccaaagcataaataccttatagcgatatttgagtatttaccataaaaccattcgaatactgtcacggttctaaatttctaatattgttcttttgttattaaaggaaagagtgaagggtgttttcgtcatttaacatatccatcgggtcaataacggagattacctatccggtgaccttatcccctcgccggtgagcgaatctcagatccaaaattttgcaaaatcctcagatcgtcttaccttctccgaatcgatcgatttttcatggaggacgacgacgagattcagtcaattccatctccgggagattcttccctttcaccacaagctcctccttctccgccgattttgccaacaaacgacgtgacggtggccgtcgtgaagaaaccacaaccggggctttcttctcaatctccgtccatgaacgctttagcgttagtggttcatactccttctgtaaccggtggtggtggtagcggaaacagaaacggacgaggaggaggaggaggaagcggtggtggtggaggaggaagagatgattgttggagcgaagaagctacaaaggttctaatcgaagcttggggagatcgattctctgaaccaggtaaaggaactttgaagcaacaacattggaaagaagtagctgagattgtgaacaagagtcgtcaatgcaaataccctaaaactgatattcagtgtaagaacagaattgatacggtgaagaagaagtataagcaagagaaagctaagattgcttctggtgatggacctagtaaatgggttttcttcaagaagcttgagagtttgattggtggtactacaacattcattgcttcttcaaaagcttcagagaaggctcctatgggaggagctcttgggaatagccgttcgagtatgtttaaacggcaaactaaaggtaatcagattgtgcagcaacaacaagagaagagaggctctgattcgatgcggtggcattttaggaaacgtagtgcttctgagactgagtctgagtctgatcctgaacctgaggcttctcctgaggaatctgctgagagtctcccacctttgcaaccgattcaaccgctttcgtttcatatgccaaagcggttgaaggtggataagagtggaggtggagggagtggagttggagatgtggcgagggcgatacttggatttacggaagcttatgagaaggcggaaactgctaagcttaagttaatggcggaactggaaaaggagaggatgaaatttgctaaagagatggagttgcagagaatgcagttcttgaaaactcaattggagataacacagaacaatcaagaagaggaagagaggagcaggcagcgaggagaaaggaggatcgttgatgatgatgatgatcgcaatggcaagaataacggcaatgtaagtagctgacaattgaacacacaaatgttcctatgatatttgctatgataagctggattttaggttttgatgttgttgttgttgttattgttactgccttgtgggatgtgtaaatgtagagaagttatgactctgattatcatcatgttgttgttattgttatccatcttcttgtcttaaacatgggcaaattaaaaagctttgaacttgaatagcttgttgaaaacctctgtgattcttaagtagagttctgaactagtagtttgtgattctaagttaagacacagcttatagaatattcaccaatgagattagagactaatgattggattagtcagcatatttatccttaaattaaaatctccttaattaagccaaagcttataattaacctcactaaaaatattcaatgcttctctcttctctttcatccttacctctctactacctctataaaaccatttccattgcaaaggaaaaaaaaagaagatagagacagtaaaataaaaacccgaaataatttgaaaaaatattgttatatatttttggataaatttttgttgatcggatg

SEQ ID NO: 18276 - DNA, 3003 bp, Unknown
  misc_feature (1)..( 3003): 2750-1469P.txt file - cDNA_ID_1816411; gDNA_ID_1621121; Annot_ID_56282
ctatactttctaaccgaatcttaaacatgaattcctaaatccctaaaaccttatttaaaccctttatccatgcttcaaagtttcaaattctttacaactaatcagtataaattgatctgactcaaactcaaatatatatgcatatatatatatatataatattaatgatatagaaaaaaatgaagaaactcaaaatcacgggtccatcaaactgcgacatgataatgattaaaaaaaaaaagttgcgacaagataaatctcaatttgtttttgcatttttgaagaaatatgttagttagaaacaggggcggacctatttaggaaaaaggggggtcacttgacaccctcaactccgggatcaaatctctagcataacacttttgcttcttttttctccatttagctttaaatacatgtatttttattgtcttatatacattttttcttttagatattacactaattaatatactatttataattgcctatgaaaatgccactggttagaagatatttagtcatgtagaacaacctgttagttataggggaaaatgctattgtaattcacatttttattttatttctcaaccaccaccaacacatgcatgtgtgttgttgtgcccacactttttcaataaacttaaaatcaagtaaacttaataaaaattatagtaagtataaaatgatatggaccaaatctatgaataagtttagtttaaatagtagatttgtaagatattcattatgttttataaaaagtgtaataatgacatgtttttgataaactatcttaataatgacatgtttcacacaaattaagataattacgcaaatttttactatatcacatgactaaattttttaataagctgtaaagaaaaactatatcagaaaacataaaacagctcactactggccaaaaaaagtgttaaaatgttagtcaaaatttcaaaaaagaaaatatgatacgtacatgaaattaattaattaattccataacattcgtagaagcaatacgttatcgccaatcaataatttgactaattcaaaatatcgttttcgttatcgaggtgaacacatggagctgctgatccatgaatgaagttacaatcttgtatccaaataaaataattatttatgccctcaggccaccgaaaaaaattaaaaatatggccacatagcgacaatttcgtgataaaacaaatatattaatataatatacatatatatatatatattaaactagtataaaagtaaattttatagtacctatcacataaattgtcaaagataaaattagttattgataatacaatgactatgttatctttatttaaaaaattaaattaatttaaatatttctaaacaattctaaatcaacatcatagtatgataagtttacatttttctgagcgtaatattgaattatttttcaacatttttgtgatttgagttggaacaatatctactccatttgttccaccaaatttgatattgtgagattttcacacaaattaagaaaaacaacttttatattttaaaattattgttttgttagtttaataatattaactatatatctctcttctttttattggtcagcaataaaaaaattaatgatgtgatatagaacatcaatctttgtgaaacaagaaaaaaaataatttttaacactaaatttatgcactagtggaacatttgaaaatgtgtgttatttttagaaacaaaacttatttttgtattatttgtgagaatttttcaaatataaattacttctatataactttttgaaaataatttaatctttaaaagaaaaatattaatctcttaacactaaatttatgctattagtagaacatttgcaaatgtgtgttatttttagaaacaaaacttatttttgttgtgagaaactaagaattcctcaaatataaattactcatatatataagttttgaaatttataagctaatattttttgtaataattggtttattttgattccaaattcagttttcaaattcaagttcaaaattgtttgtaatctttgaaaataaacatgagaaaaatactataaaacttttctaaataaaataataattttatcatttgttcacatggaagtggatgtaaaatgaagttatactagattttaacccgcggtataccgcggtgacaatttatctttttaaagttagtataacttttttttgcaaattatatctgtctataatatatttttattttatactttacaattattattaagaacgtcttgccaaacccgtcccgccaaacccgtcccgtaaaaaaaacatttatttatattaatgttgatcttatttctgatatgtttataaattattgtctaaatatttttgtcgatgcgggacgttgaacccacacattttttgccagttggttaatatatgtttattttaaaaaatttgaatcataaaatatgacagaaaaaattaagatttttttaaactctatatattatataatgatgttaaacaattgtgatatatcaaactttttataagtttaaatattaataatgttttataaattttatatatataaataataatattttaaaaataatatttttgcttataaggtaatgacataataactctaaaagcaaggatttagaagatttaaatctttaattaaatattttcattgataaataattaatgtcagtaacatgacattgtaaataagttcaaatacaaaatttatttatttaaacaaaaaacgtttagtaagaataatatttatttaacaaaaaactttgttttaaaatattgttagcaaatatatttatgctaattttaagggattaatttgaagtttgttgggattaaatttgattgataatgtgattgacaatttaaatcaaaaatttaaagtaaaattaattattttggaaaaaagatttaatgctaatggcattagattgtaaataagtgtcaagtagaggatttatttgctaaaatg

SEQ ID NO: 18277 - DNA, 3003 bp, Unknown; identical to SEQ ID NO: 18276
  misc_feature (1)..( 3003): 2750-1469P.txt file - cDNA_ID_1816411; gDNA_ID_1621121; Annot_ID_172074

SEQ ID NO: 18278 - DNA, 3000 bp, Unknown; identical to SEQ ID NO: 6993
  misc_feature (1)..( 3000): 2750-1469P.txt file - cDNA_ID_1816419; gDNA_ID_1621121; Annot_ID_56280

SEQ ID NO: 18279 - DNA, 3000 bp, Unknown
  misc_feature (1)..( 3000): 2750-1469P.txt file - cDNA_ID_1816423; gDNA_ID_1621121; Annot_ID_56279
gaacgaattggctagaacagctcctgcatcagctcctttccaattcaccgtctttgatttctacaacgcgattcttactaggacgcagaggaaccaaaacttccgtgagttggttaattatcatggtttaatttcatttttaaatttttttataacttctaataccatgtgtttaatatttgccattcttaggatttttcgttacgaacgcatcgtgctgcggagttgggacacatgatgcttatggttgcggttttcctaacgtacattcgaggctatgcgagtaccaacggtcttacctattcttcgacggacgtcacaacactgagaaggcgcaagagatgtttggtcatcttctttttggagccgatacaaatgttatccaaccgatgaacatccgtgagcttgtcgtttaccctgccgatgaacctatgcgtgagtcttgggtgcccccaacgtcagccaccgttcaactcagggagagccgcggttacgagtattactgagtctctaaaatcaatatttagggatcgatcggggtttctataagggttatgagtcaaattataactggatcaatatcggaatcttgagtagttttaatttccaatgttttcatgtttctctagtgagttttcctccataataaaagattgatctctgcaactcttaccccttgcaaatcttttatttaaaagaaacaaaacttttacataaatttatttcttttttttgtcaaccacatattaaaaggtaattccataattaaaaaaagaaggcacaagaagcgttttctcatcatcttatcttttggagcggacccaaatgttatccaacctatgaatgttcgtgagctcattgtgtatcctgttaatgagcctatgcgtgagttttgggaggatccaatggatgagaatatcatcgttagtccatgacgtcgacgtcgatgctagtgaatctatctaactcgtttagttcttgagctcactattttccatctctataccatgaacgagctcttggaatttgaaatgcgctgttattaatttgttgagatttaaaataataatgtaacctcaactctgttttttccataagaaaaatctcaatgagtaacgtgataaacctgacaatatgaaccaaagcgtgtccaatgacctgctttgtgctcagattagacaagtttcgggccacatgcactccattagaacaaaatgataaattttggtggaatcaatttaagaaggtagtggattcaatttgagaccttttttaccctctttttttgtttgcaattattcttgcaaggtaatattcgaaatgattggcaacaaagaaaataaaaagtagaaattataaagttccagaaaagataagtttatacatctggctttggggccggctatatttacagttaattttcatatgaaataaaaccaaaaatcatatatatagataatagatgaaccaaacaaatgaggcgttcttcatataaaacttcatcttcacgtaagcaaatgtgttttatttttatctagtttctgcactcttttagaaacaaaattgttcacctttctgtcgttctaatgattccaatcaaattgataattactagaacttacaaacgaataaggaccaactcttctgtatttgatatagacactctctcaaaacttaatcttctctaatcttcactgtaaatcttaaggaacaactctccacaagtttttataatttatatatacataactaagctattacctatactattaagattgtgtcaacgcaaaattgagttattctttcttatttaaatttgaactattaaaaatatgtaaataattaacgaaaatctttgtcaaaacactattaagaaaataatttcaaaaattaacatgatgataaaatatagattgttaattgttttttttaattgttttcaagtaatttaatcaataatatgatgaggatgattaaggaaattactataatttatcttttaaagaatatcttagcataggtatgagttgtttttgcaaaattttaataattgatttaagttatctaaacgttattaaaattattatccaaattatctataattatccgaacatattcgtctcttgtctattctggtagtgatattttatgtatctatattattcatatatcgtatcagtataatctgacttatttaaaaatatctatttgatatgtattttgatattaaaaatattttaattcgagttgtgtactcgtaaattatccaaaagttttagcagaaataaacatatctacgtatatgttggtgttgaaatttttttgttgaatttggctagtcagcaaaatttagttttatgcaaatggttactgcagaaattactgaatctggtttagtgttaccatttacaccctatatttccgtgaaatttgtatgtttaattctacttcttgcctctaaatgcacgatcttttcagcacttcgaagaggttaaagtgacttttacccgatgagaagggaattgtgtggcagatagaattgctagggaatctctttcttttctgaattatgatcccaaattgtattctatattgccggattgggttaaagcttatgtgtattcagactcttgtgtaattgtaagttgttgttgaaccaaaaaaaaaaaagcacgatctttcttggtactcgtagtaacaatagatattttgttgagaattaaaaataaagtagaagagaaaccagtaatgcgtcagacgtgattaagcgaactatataatataattgatcgataatcgtttgctagtgcgttaaataggtgtatagtaaaatgaacctcgcgctacacgttattatttgtatagtaaaatgaactattattttcattgccaaattgtagtacttgcaatataaatataacgaatcggtctacgagctaaggcacaaaagcaatcttcttctcttttcacagttctgtttctccctctctctaaatgatg

SEQ ID NO: 18280 - DNA, 3000 bp, Unknown; identical to SEQ ID NO: 7025
  misc_feature (1)..( 3000): 2750-1469P.txt file - cDNA_ID_1816456; gDNA_ID_1621122; Annot_ID_56319

SEQ ID NO: 18281 - DNA, 3000 bp, Unknown; identical to SEQ ID NO: 7024
  misc_feature (1)..( 3000): 2750-1469P.txt file - cDNA_ID_1816460; gDNA_ID_1621122; Annot_ID_56318

SEQ ID NO: 18282 - DNA, 3003 bp, Unknown; identical to SEQ ID NO: 15647
  misc_feature (1)..( 3003): 2750-1469P.txt file - cDNA_ID_1816468; gDNA_ID_1621122; Annot_ID_56314

SEQ ID NO: 18283 - DNA, 3003 bp, Unknown
  misc_feature (1)..( 3003): 2750-1469P.txt file - cDNA_ID_1816472; gDNA_ID_1621122; Annot_ID_56313
gccagatagagaaaacaatttgtcgaaaaaaggccaactctaaccttaactcaccagtctaactttgtatttacatccagcgaaaatgttgattcaattggcgtcatagcctcctcagcagtctgaacttccagtaaacgaaagtatatgaattagatcattggaagtaatattgaagcagtatatgatatgttctgaactggaaggcgaaagaatcaaagtatatgcatcagttcaacaaagtaaactcatcctcgtgcaacaagttttcatggagaatctaaatccagatcaatggggaatagcaagtaaatcatttcatttacaacataacttgttcatcagcatgacctgtgtaggtttcagatacgcacatctaattcaaatacataccttctggctcaaatccagagctccgcttataatcattgtttcctcgtgtgtcagttcaccccccttaccagcctatgttggagagaaatagcatgtcaatgggagctggaaacaacaatacttttgataatcaagcaacgtaactaactacttcacaaatcagacaaggttacagcgtaatatctgtccttttcctattctggattcgccaggttagatcataaagggaaactacctcctggctgtgaattgagacaagggctttaagctgagctcgcctaaatagtgtgtcattatgcccaattacagcatcaagaacctgaggcatgtaaaacgttgataaaagtaaacatctacagctccataccactgtggcataataaatgtatcaacttgtgttgatgatataatcaatgcagttagctctaacaagtaccacttcttaaagacattgctagatttttcaacaaatttccaaatcttccatggttgtaacataacgttctgactattgtagcaactagtgaaacaaaaccatttattatgacatttagtgctctattaaagagtagtctacaacaacatcacctttccgatagggtaagcaatcggatagcagattatcatcaaaatgcgaaccaaccacaaaaagtttgcgccaacagcaagtccatatctagagcatatagcttgcggaattatctggttagaattgcaacaacatagtttgtatcagtcataactgaagagaacacaatttgataccaagaagatatgtaaagtaagttacctctccaaaagcaagaacaaaagtaactgagagtaaaacagccacaaaaggatggaatatcttatccaggcatataggaagagcctgagacaaaagatccaagaacaaaattcactgattctgaggtgcacaaagacagtaatttatcgttgtaaatcagaaaaactagggtaacaaatcaacaataattaacctccatagcagctgcattgcaaagaagtagagtcacaagaagttgatgctgcttctttaccactggtaagattgcagctgcaatatccaaaaacaattcaagtaactccgtcaagagtaaaaatagagactctatcactctgcttttaacaaaaattacagaataagaaattagaaatcaagttttaagaaattctatagccattacgaattgaacaagtcaggtatgtaattttgagccaacaacacacagatatcgaaagtcgaaaaaaattaaagaggcgtaccggcctgttttttctcggcggaggaaccactctgttggagaatctcgagctcaacgagaccaagggacattagtccgagtgtgagacccgacattattccggcgaagagtacgaggaaacacgcgacaccgacgacgacgaaccaccacggagaaccgaatcggatgtcctcggcttcaaagacgaaactgttgagcgagtaagcggctcttaccaacgccaaagtgctcagaacaaccattgccgcgcttcgatgagagacaaaatcaaacagagacggagctagagagagagagtgtgtgttttttttgttggtaaggaagaagacgacgatgaatacctttgatacggggatacatggaccacctgacacgtcagcatcctacatgcgttatttccttatttttctctctctttttttaactcatgcgtttttttgcgttattcttcttttaattgatttgttggattattgatgacttctgagttttgctaatcatcttatttattcagcgtccaccggttttaacgcccgagaacgatatacaccttacctgattacctctaatcacattattcttgagattatcgaaggtacatttggaccgctagcaaaaaaaaatatgtaaatacttatttttcaagttacaaagctaatgttattgacaaaagaaaaaggaaaaaaaaggatgaaatcttggaaagctacagcattttgttctgcccaacgcaaattgtaacactaaagatttcgtatggtcaacgtgaatgataatttaatcgtaaatattttcttaagtgtaaaccggtatttaaattcccttaattcatcggaaagattttggtataaaattgatttactttctttgggcttttgggggtcaaactatgagcctaataatggcccaaaaagacttggcggaaattactttttttttttatttgactagtgaaaccggaacgagcgagacgcaacagaatctgaagatcgaaggacagtgaaatcgaagaattgaagcacaagcttctccatctctgcaatctctctatccatctctcgtcatcgcatgtttcgcttcccaattcggaagaaagagagacgacgcgtctgaagcatatctccgtaatcggggtgaagaaaaacgcggcgagaagaagaggcagattttcgttttgggagggtagacaaatctggcgaaagtggagggcctaagggcgaggccgtggcttaagccaggagcttgtataaatggagatcaatatgactacgacggttcggaagacgaccattccaggccttggtggcgccgtcgtctcagatccttgtatatggcagccatg

SEQ ID NO: 18284 - DNA, 3003 bp, Unknown; identical to SEQ ID NO: 18283
  misc_feature (1)..( 3003): 2750-1469P.txt file - cDNA_ID_1816472; gDNA_ID_1621122; Annot_ID_172124

SEQ ID NO: 18285 - DNA, 3000 bp, Unknown; identical to SEQ ID NO: 7014
  misc_feature (1)..( 3000): 2750-1469P.txt file - cDNA_ID_1816478; gDNA_ID_1621122; Annot_ID_56311

SEQ ID NO: 18286 - DNA, 3003 bp, Unknown
  misc_feature (1)..( 3003): 2750-1469P.txt file - cDNA_ID_1816493; gDNA_ID_1621122; Annot_ID_56306
cataaaaaaaagcaatagcatatatctataaatcatctttaaaacaaaaaaataaaaatttttgagaaaaatataggctcgttgtgtacttcttaatatgtttatcatttataaatactattaactaaaataaaatctttaacttgttaacaaaaatataaatacgttgtgtacccggatgaatatctagttattaacaaaactgtaccatttgttttgtagaattttacttattattttattttttggaccaaaccaacttattatttattggcatgtctagttagggaaaatgtttcaattgaacatgtaccgtatgtgtgcatgtataaatagaaattttatgattggattttaataatgcaacgaatcgatgtgaaactattagtgtaaaaccacaatcgacgtcctttgagaatttactggtaagaagaacacagaaaaggatagaaaaggatctggatggatccaagagaaaccctcgcgtgagtaattaaccctcacttaaaccccaatcaccatttcaaggcgagaaagcaagttgtttcttgagtaatccaagttgtttctattttgcgattttaacgggtcaaagatttgctctaagggaaggaggtagaacagttggagccggtgtggtatcaaaagtgatgagctaagtcgctatagcagatttaaaagttcttcaaacgaaaaaacacaactgttctctagtatctaaagattcatctctcatgagatttctactactttgagagtttatatcaaataaacgagagattagtgttttaaaagaaaagcttctcccagtgtgatatcttcactttattctacaacctaacattgacaaattaacctttaagcaagccaaagaatggagttagaaactagactccaaatcatcagcattccaacattcaaccaaacctaagtgcaaccatggcaataactgtggcagctctgaagtaaacttctttgattcttctttccactttatttgagacttcttcttcgttgattgttttcctattgaaattaacaagggcttccctgagtctactcacagaccacgagagcaataccaaactcaaactcattgcaccctcgaagaattggtttgcgcaaaagggtacctgcctggaagcaacattacaaacgagaaagaagagcacagccataccagtgccagcaaagccaattgaacactgagtcaaaagctcgaagagttctccacgtgatttctttagagatagcattgtggtttttctatgttgttcattgcctatcatcagagagagaaggctctcacacgcatgaagacggtttcgttcgtagaggtcatattccttatctcttatcttcggattttgtttctttggtgaaggcttgagcctggttttcttcggactgttggaaatcgaaagaaacgttttttaaagatgcaaaagtaccaaaaactagttgatgatattagatacctctttggaggagctagtgtaactgcgtcctcgggtagctgcagagtgtctattggtacttcactgtcgaatctgcagaatgagaggagagcaaaaacttaatgttaaacccaaaaggatgagactcataggtatgaatcaaacttgcagtgaagaattaactaccgctgaaactgcgggacaagccgtgagagctttctccatcttgttgagttccttaatctatgaaactcagctgccgtagagaccaaatcattcaattcagctctgctacttgagaacagaatgttagcatccaccatgagatccaataacggctttgcatatggttgctgagaacttgatcttaaagcatctagacccatcaattcagataggagagacaaatcgaatccttcttctttgagttcttcttctgatctagacaaaaggaactctaacacctcctcttttcttgcatactgctgagtgatccccaagcttaaacacacagggtctggtccagtttctgttaaccacagttcatgtcagtcgaaaaaagggattacaatttggtgaattcaactgaaatttgatcaaagtcacataccatgaacatccatgagtctatgcttcatcatggttgaatcaaactccaaaaagtggttagacttactaaaagaagaaaaaggtttcaatggctccaagagttgtgatttcaggttaaaggagctctccggtaatatctcatattttcttcctccaggattcaccagataagcccggcttgtctgaatcattcatagacataagaaccaaacaaggagaagacagaaccaggacaagaattcaacgagagattctaaacccaagtgttttaaaacagagaaagtaaaaaactgaccttgatgatctcgttgcttcttagctcttgaaggagactaaacctaagtgttgaatagctatgagaagccattgagaaaaaactgacttcttatttttttttctcttcttcgtcacaaaaccatggaaacaaaacgaaaaagcttatcgtcagcaatctcgcctatatatgcgtcagatattataagatttgtgtaaatcttttctttattcagttttggctggtgaccaaaacacactttgagtttttaaatatttaccctttgaggcacttattacttaaattaccaagaacatacccaatcttttcaataattacataaatatacctttggtttcttatattctcgaaattaacccaaagatcattagggtacatacattctttactcgagagagagaagttctaaagtcctcaaatcccgcaaagctttttcagcttctttgttgaattgcgagcagaggtagaaatcagcaggaaacaaaaatggtaaatttgaatgctttcttcatcttcatgaacttgattgttggcagttgttttgtttgacctagaaaaggtttcttctttcttcgtaattattcatgggtttactcttttttagccaatggttctagggttcttggagatttcgagtttatg

SEQ ID NO: 18287 - DNA, 3000 bp, Unknown; identical to SEQ ID NO: 7010
  misc_feature (1)..( 3000): 2750-1469P.txt file - cDNA_ID_1816504; gDNA_ID_1621122; Annot_ID_56301

SEQ ID NO: 18288 - DNA, 3000 bp, Unknown; identical to SEQ ID NO: 7038
  misc_feature (1)..( 3000): 2750-1469P.txt file - cDNA_ID_1816519; gDNA_ID_1621124; Annot_ID_56345

SEQ ID NO: 18289 - DNA, 3000 bp, Unknown; identical to SEQ ID NO: 7038
  misc_feature (1)..( 3000): 2750-1469P.txt file - cDNA_ID_1816519; gDNA_ID_1621124; Annot_ID_172202

SEQ ID NO: 18290 - DNA, 3000 bp, Unknown; identical to SEQ ID NO: 7040
  misc_feature (1)..( 3000): 2750-1469P.txt file - cDNA_ID_1816531; gDNA_ID_1621124; Annot_ID_56342

SEQ ID NO: 18291 - DNA, 3000 bp, Unknown; identical to SEQ ID NO: 7035
  misc_feature (1)..( 3000): 2750-1469P.txt file - cDNA_ID_1816538; gDNA_ID_1621124; Annot_ID_56339

SEQ ID NO: 18292 - DNA, 3000 bp, Unknown; identical to SEQ ID NO: 7034
  misc_feature (1)..( 3000): 2750-1469P.txt file - cDNA_ID_1816550; gDNA_ID_1621124; Annot_ID_56336

SEQ ID NO: 18293 - DNA, 3000 bp, Unknown; identical to SEQ ID NO: 7034
  misc_feature (1)..( 3000): 2750-1469P.txt file - cDNA_ID_1816550; gDNA_ID_1621124; Annot_ID_172187

SEQ ID NO: 18294 - DNA, 3000 bp, Unknown; identical to SEQ ID NO: 7033
  misc_feature (1)..( 3000): 2750-1469P.txt file - cDNA_ID_1816559; gDNA_ID_1621124; Annot_ID_56333

SEQ ID NO: 18295 - DNA, 3000 bp, Unknown; identical to SEQ ID NO: 7031
  misc_feature (1)..( 3000): 2750-1469P.txt file - cDNA_ID_1816574; gDNA_ID_1621124; Annot_ID_56325

SEQ ID NO: 18296 - DNA, 3000 bp, Unknown; identical to SEQ ID NO: 7031
  misc_feature (1)..( 3000): 2750-1469P.txt file - cDNA_ID_1816574; gDNA_ID_1974074; Annot_ID_180340

SEQ ID NO: 18297 - DNA, 3000 bp, Unknown; identical to SEQ ID NO: 7031
  misc_feature (1)..( 3000): 2750-1469P.txt file - cDNA_ID_1816574; gDNA_ID_1621124; Annot_ID_172157

SEQ ID NO: 18298 - DNA, 3003 bp, Unknown
  misc_feature (1)..( 3003): 2750-1469P.txt file - cDNA_ID_1816590; gDNA_ID_1621126; Annot_ID_56366
ataagatttgtcggcttcgaggattgcaatattatattatttgaagcattattattagatgtgtgatcatttttgtggctttaaatgcttcccacgtcttctaaaatgaaaattcaaaggaatgttgataaaatgttttagccttttagggtctaatgactcgtgctagcattaagtattcaaaaaaaaacaaaaaaaaaggaaataattctggttatcgcagaatagtaactagtaaaacgtataaaaattaataaagacaaaactaagttgaaaaagatagagttccacaacaaacaatgacgccatcggtagctaagtaaagtcaatatctaactaattaaatagcaaaatagtagtagatgttaacgtaatcacattcgtaatattctgtaatgacgcaaactcggggatgcagcgacaaaagaaccattacctaacaaaagtaggaaactctcttgtaatttgaacaatcttccaatagtttgtccattatatttgttttttttttgtactattttattcaagaatcgaacatatttctaatttttctacatggaccaggtctcaacattatgaatcacatccgatattacgaaaaactctattaaaatgattactaactctatttttaactatttttcaaccatatagattatttacaaattcatacatatggaccgttttggtgtcttcagatacgacctatgaggagataagaaagaatcgaatcattgacaattattgtttgtgattctgcagaaactgaagagcacttcacgttctttgcacacgtgtatgtccaatatcgcacgccatattaaccgcggttccagttgcatcagaatgtgtccagagatgaaccacgtggaaaccggtttgtggaaaaccggaatcgtcataaacgcttatcggtttctgtcatgatcgtaataatcatgcacgcgtggatcaatcatctctcttagtaagttttgatgatattttgtagacgtttttctttacttttgatgaaactctctagaaaactttaaattatccacgaatatgtggagctctatgtagacgcataattgtgccgcatataaatgccgtcagcttaattttggcagttttcgttacacgaaaatggaacaaatgtaaatgatcaaataagagaggacccataacatcatatatgtgtcggcctttcgatcaccctctccacataaaacctcaaatggccatatttttttcatttatatatttcttaaatggagtaatacccattacccaaaaaagtggtcaccaagaggaattattctgttatagattccaccatcgaagctaaaagcaaatagatatattattgataaaataaaataaggatggctgctagaaatagaaacgcatgggtgttttggataatcctataatatatgtttggtaaatataatattacattttcgataacttattgtattaagttcatatttaaaaccaactcgtgctaagaaacgaataaatgccgtggagcataaatattagtaacttggtatattaaataagtgagacttacatttgtttttaaaatttggtcaagggtttacatttctcatttaaagaaatgtcataagataaactaaacaaaaattatagttgttgagattaggtagcttgaatgttaactcaaaagtttcatgctttttcattcgctcaattgcttttgttttgaatggagcaatcagaagaaaataagtttaattgttaaaacaagtcgccaacaatttttgaaccattgaaaacataaaccaatatttgaagcatttaagaaagattttttttttgaatcatggatgttgaaaactttgacttcgatcaaaggacaaaattttcaattttcaatctttatgatatcgtaaatcactttatttttgaaaagtgaatcaaaaaacatttgtcgaactctaatagcttgaactcaaaatttttcagtaatcataaaatctccagattttactgcattttttatttttacattcgaattaccttgtttaaatatgtagattatgtactttcgcttttgttttccttaaccatattgttttccttttaaaacatagatgccaaatattaagtttattttagtatcactttaaaccacatatcttaaacaatttagttacattaaattcaaacaatataatgcaagtaaatgaataaagatggggatataaaaaaaggtaaagaaaaacaaaggtaaagattgctttgactaaatatagccaaataggcaaatataattacagtccttcatcttttctctagctttagaatttgtcttcaaatatgaacataattagtatagtattttgataatcactttatagaaagcttgaattatatgaatcaacatcccacttatcaaaagccacacttttcatttcctttttcactctcactttgacattttaactttcctcataattacaaaaaaatattgtattaaatagtaattactaaaattaagaaaattcttagcatctgaagatttagttgactaatctcagacctaatctgtttcagtaaactctatatatgtaaattaaattatatctctgattataaattaaaaacaaaaaaacaaaaaacgtctctttgtatctcctcaaaagccgaaacaaaacctctctttctcacaagtaagcaacttcaaaatctggttaacccaaattacaaaaaaaacaaaaaaataaaaagtcgctctctttcttcttaaaaatctcaactttgtcgtccaaaactccaaatccagaaacccatacgcaaatatccttctacgtgtttgctcctttcacgtttttctcgaatcttctcgcatttaccaatcaaacagattctaaagttccaaactttttctttctttctcaaaccattctctgtttctcaactcttcactttccagtggtaagatttgaatcatgggtttctcaaattcttaacttttcacaaaagcccaccatg

SEQ ID NO: 18299 - DNA, 3003 bp, Unknown
  misc_feature (1)..( 3003): 2750-1469P.txt file - cDNA_ID_1816594; gDNA_ID_1621126; Annot_ID_56364
cgtgttccagctatgatcatgcaggctgtgcttcagctatgtgcccgtctaacgaaatcacatgctttagctatccagtttctggaaaatggaggcttatcttcactttttaatcttccgaaaaaatgttttttccctgggtatgatactgttgcatctgttattgtacggcatcttgttgaagatcctcagactctccaaattgctatggaaacagaaatacgtcagaccttgagtgggaagagacatataggtagagtattacctcggacattcctgacgacaatggcacctgtaatttcaagagatccggttgtttttatgaaagctgtggcttcaacttgtcagttggagtcatcaggaggtacggactttgtgatactgacaaaggaaaaagaaaagccgaaagtttctggcagtgaacacgggttttctttaaatgaaccccttggaatatctgaaaataagcttcatgatgggtcaggaaaatgttcaaaaagccacagaagagtccccactaacttcatccaagttattgatcagcttattgacattgtcttgagttttcctgggttgaagaggcaggaaggtgaagcagccaatttaatttcgatggatgttgatgagccaactactaaagtgaagggtaaatcaaaagttggtgagccggagaaagcagaacttgggtctgaaaaatctgaagaattggccagggtaacttttattttgaagttgttgagtgatattgttctcatgtacctacatggtaccagtgtcatactgagacgggatacagaaatatctcaacttcgagggtccaatctacctgatgattcacctggaaatggagggttaatttaccatgtcattcatcgattgcttcctatatctctcgaaaagtttgttggacctgaagaatggaaggagaaactgtctgaaaaggcgtcctggtttctggttgttttgtgcagtcgttccaatgaagggcgtaaaagaataatcaatgagcttacgagggttctatccgtatttgcttccttgggaaggagttcgagtcaaagtgttctattacctgataaaagagttcttgcttttgctaacctggtttattcgatcttgacaaagaattcatcttcaagcaatttccctggttgtggctgttcacctgacgttgcaaagagcatgatagacgggggaactatccagtgtctgaccagcatccttaacgtgattgatcttgaccaccctgatgccccaaagcttgtcactcttattctcaagtctctcgagacactgacgagggctgcaaatgccgctgagcagctaaaatcagaagtaccaaatgagcaaaaaaatacagattctgatgagagacatgatagtcatggaacttcaacttcaactgaagttgatgagctgaatcaaaataatagcagtctacagcaagtaacagatgcagtagataatggacaggagcagcctcaagtttcctctcagagtgaaggtgaaaggggttctagtctaacccaggctatgcttcaggagatgaggatagagggcgatgagacaatactgcctgaacctattcagatggatttctttcgagaagagattgaaggtgatcaaatcgaaatgagttttcatgttgaagatagggctgacgatgatgtagatgatgacatggacgatgaaggagaggatgatgaaggagatgatgaagatgcagattcagtggaagatggagctggtgttatgtctattgctggaactgatgttgaagaccctgaagatactggccttggagatgaatataatgatgacatggttgatgaagatgaggaagatgaggatgaatataatgatgacatggttgatgaagatgaggatgatgaggatgaatataatgatgacatggtggatgaagatgaggatgatttccacgagactcgtgtaatagaagtgcggtggagggaagctcttgatgggctggatcacttccagattgttgggcgatctggtggtggaaatggttttattgacgatattactgctgagccgtttgaaggtgtgaatgtagacgatctgtttgctctgcggagatccttgggcttcgagcgtagacgtcaaacaggcagatcttcttttgatcgatctggctcagaagtacatggttttcagcatccgctcttctccaggccttcacaaactggcaatacagcgtcagtttcagcaagtgctggcagtatatccaggcattcagaagctggcagctacgacgtagcacaattttacatgtttgattcaccggttctaccatttgatcaagtaccagttgatccttttagtgatcgtttaggaggtggtggggcacctcctcctttgactgattattctgttgtgggtatggattcatcaagaagaggggttggtgatagtcggtggactgatgtaggtcaccctcagcctagtagcctatctgcttcaattgcccagttgatagaagaacattttattaccaacttgcgtgcttctgctccagtagatactgttgttgaaagggagactaataccacagaagtccaagagcagcagcagccggatgttcctccatctgttggaagcgaaactgttttgggtgatggtaacgaaggtggtgaacaaagtgaagaacatgaactgttaaataacaatgaagttatgcaccctcttcctttgaacagtacaccgaatgagattgatagaatggaagttggggaagggggtggagcacctattgagcaagtagaccgtgaagcagtgcatcttatctccagtgctcagggtcaatctgatacttccggtattcaaaatgtgtctgttaccgctatccctcctccagtagatgatcctgattctaattttcaaccaagtgttgatgtagatatgagtagtgatggtgcagagggaaatcaaagtgtacaaccttcacctttggacggtgacaacaatgagctctcatccatg

SEQ ID NO: 18300 - DNA, 3003 bp, Unknown
  misc_feature (1)..( 3003): 2750-1469P.txt file - cDNA_ID_1816598; gDNA_ID_1621126; Annot_ID_56363
gtctccgagtgtctcagtggaaccgattttggagccagaatcatcaagacgcttgtcaagtacccgttggtaagtcccaataagcatgtcagtatagttacaggaatctcagtcctgagaaacatcggaccgtgcaagcaaccccagaagagagggtaaaacaagagcctagcaatggaaccaccaacagcgattttctcatcctccagcatgaatacagcagtcagacacttaccaaccaagtcaaacacattgtacgctgcaataagcagaatagggtaccaatctgtaagaagctctgaatgaacatcctcagtaatgtatccaggaaatatcgacaatgtcaccatgtataagagaacaatcccgaaaccatgagatttaactttcgtcacgatatcccagagtgttgtcctccacgctaaaccggttaaagaacctttctcttcgctcttctctctgattagttcttcattcttacgctcctcatggaacttgatcaccggaagcttatgcgctacgttgtagaacacagcacaaatcaccataacaacaatccccacagcaaagtatagattcgcactttttctcaaaccatcaggatcttgaggatacacagctttagtcaaaattctcaatagtgacacaagaacacctacacatccaaaattcccaaaaacctaaattaatctaaccacagcaaccaaatcattctccattattgaggaagatgaaacatttaccggagccagcagttccggcgacaacagcttgcatatacctctccggcatttcaccggcaacaccgataagacctccttgcataagtgcatcacctagaccggataaggcaacggcggcggaagtaacatcgaatccggcgtataatccgacctgtcctttaacataaaccagatccaaaacaggaaccacaagcaaggcgattacgaagagtaaaagaccgagattgattctaaagctagcgaggctcttatgtgcatagaagacaacgataacgaatagacaaacaagagcaacgagcatgtagataacggcgaagatccgatcgacggccgtggaaggatagaggtaagagaagtaatcgacggcggtgatgaatgcgttccatggaagaagaaagccaacgccgagggtgaagtagatgatgtaagcgaagtggtaggaatcagaaggagcttttttggtagatccttcgtgaggattgaggagaagagaagtctccggtccggcttccgagtcagttacgattccggcggatttatcggtggtggtcatttgaatttgtttagtttctctcagttttggggatttttgggaaattcgttgactaatgggagtcattaaaacggtgcggttttgtatgtgtgtggaattacataaacggtgtcgttttgctggccgagcaaataatttggttggggatgcagtagcgtagacgcattagttggagtattttattttactagtttttgatttttggcaatggccctaaaacgtgtatttgataaataatttatatctgttgtagatgcgaatctcataaaatagtagatattattagttgtagtgtcctactgtgcttttgtccaaaaaaaaaaaaagtgttatagtgtgcatcaccattatcaagttgcattgcattatcataacgagttaatgacgcttgtgtcatccaaaacagatatgtatgttctggtagaaacagatatcataaagtgtttgttttccggcttccgcagtacaacaagagttcgaacaagcctcagtcttattcccatcatgtggatagttaccacatgaaataccccacaaattgcatcttttcgagtaccgagttagtcaacggcttaatctgctttcgaaaagaaacaaaacccgtaatttggaactttagcacgagacagctcttaaccttaaccaaatccatataggattccgtgtataatgttatagtctttctaggatatgatccaatcgagagtaaacacaaagttgtgtgtataccgtctggtgaatcttctgatgaatgtcgggttttaacattgagatcagatcagctgaaaatcatggacaacggttaaaaccaattacaaacatcgtcctttgtagaagagttccaggagagcatcaatggttttctatattatggagccacatatcttgatgatgatttggagattacatactaatgagttttaatggcaatactgaaaagtctgatatgataaggttaccaaacaataatccaaactcacccaaatgatttagtaatgatcgattttgatctctactaaagaagtcggaaaacaaatcgaccaaccaccgaatgagaaaatgatagatgtcgggctaaagccaattgaaatcaatcgaacggctttgctagaaaattccggatggcagagtaaagaagactttttctcttaaaagtatgaagagagaagagtgaaaactgagactatggaataactaatgtatgactatgtttactcttattaatgaagttctatcgagtaaaaaagatggtttttttaattaaaccgaccaattgaacaaaattttattaaaccgacattggaacaaaatttatcggaccgtcttagaaatctctctctctcacaccgtctttctctctccctatcaaatcccttctctctaatatgcgatcttcaaaaccctagtttcttcggatcgcttccaaacttgcgattatctccaagatagtcaaatccttcgctctttctccttttctttcttctctcttcttcttcttcttcttctcgttcgtctgcctcaccgatctccatcaatccaaagtattggaccagatcaccctcgtcgatatttttgattcgattccacaagtgattactagttctctcaatcggtgtaatgatcaattctctatcgtgttgaggatttaaaatcagtgcttaatccttctagttttggagctcctaactggattgtttctaaatcatg

SEQ ID NO: 18301 - DNA, 3003 bp, Unknown
  misc_feature (1)..( 3003): 2750-1469P.txt file - cDNA_ID_1816610; gDNA_ID_1621126; Annot_ID_56360
ttgtcgaaataacctgctcatataatttacttcaatatctacatatacatttttgcagctattttgtgaaataaatcatgtagttgagacttatttagtcactagattttaatgtttgtttttgttaattagaaaaaaaaattttcgaattaaatatttgacacttaacaatcttccctaaatctctccacattaactacacgattagttactaaaataaaacttccaaaatatttaatatcatttaattactacaaaattatcatttttgatattgtttttttccatgactataacaattcgattataatcatcaaaccggagagatatttgatagcatttaagtactacaaaattacaaaatatttagacaataattcataaacatatcataaataagatcaacattaataaaataaatgagttttttacgggacggattggcgggacgagtttggcaggacgttacttaataacaattgtaaactataaaataaaaatattttaaagataaatacaatttgcaaacttttatatatactaacttaaaaaaataaattgtttccgcggtgtaccgcaagttaaaatctagtatgttcatgtttttgtaattattaaaggtcaatcgaggctttacttttttttttttttttctcttttgtttctgctttcttttaagaagattgaagataaatgttacctaacctaactcatattttaagcataacatatcattctttttttgggatctacaaacgtataattatataattgtgggttcatctagtgcatgaaaatggaagaatccatcactttcaattaccgacttaactattttggcatgttatgtttgttactttttcccccttaaatttaggacgataaaaggattatattttttgttggtagaatttagtatggaaggataaaattaaatttgtttacatctatcacgtggttttcattactgtaaaaaagtgaatacaatccatcatcgtacataacaaacgagaggccagtagggtgtgaaactcataaccagaaacgatgttttgttatggaatcacaaggatcacaataactcttgttttggttaattggatatgtgtgtttataagttcacggttttgtgtcaacgatgctatgacaatgtaacagaggagtaatggagtttgacctctgtgtgtgatcagaaagacccacccatctctgtatatctctccccattgaagctttacctatatctcaactaacttggtccaaatccattattggatagaggaaattactgttttatgacaacaataaatttgtgaattatctatcagagaacctataaaggcatgaagtgttgtgagatcaaatcaacttcaatagagtttctgtgtttgtccttggcagagttttcacttcattcaatttggatccctctactaaatctgttaagtctgtttctggttggttgatacaatcaaagactaaatgccaatttccatgtgaacttcactctgtttcagtaactcaccatttcactatctactactattctagttttctatatacttagttctacaggacaaaacctcctttgcaaaatccgattcaatctcattcttgagtactagaagaagaagaactatactaagtttccaatgctctttacaccatcttaaacctataattgccaatttgcaagatttgaatacaaacaaacattcactccaccggattcaatatggtctctttttatcttcttccacgatttatgacgaaccaatgctccctgaaaaaccttgaaatgccctgcttatgaaggagaactttcccttttgcctccaataagtagcaaacctctccttccagttaaccacatcatgattgccttctgtcacaagatcttggcactcttccaagcacttctgcttccacaggtcattctacgaagccatgtctcgcagttcagaagaaacacaagccaatgtcccaatatccacaccgggaagcgactctagtatcttgtgttttagctctcgaggtagactgataaagcaaggtggaagttctaacccagttttgtagcaaagatcaaccaacagaggcgtaacaataccatcttttatcattctccaccacacgagtaccttacagtcaatgctcaaagtatcttcttcttcatcagatttcaaagtttccataagtaaatcaacaatgtgcacatagctacgtttatcaatagacaccacacgaacaaaactaccaacactaagagatccataaactacaacatcgcctccttctcaaaattcaaaccgactattcctttcacagaaggtagagtatagttaagcgataccaaagtcttcttcgagaagctaaaacgcatagatgaatcaggatcaaacaacacaaatccagattctaacataacagcatgaacagtcatgatcacaatcgtcaattcacaagtgtcaccagattcctccatcaatatatttttcaacaagagaggctcgcttaacctttttacaccggagagattcatgctgccaccggaatctacgaacaatctcctgatgattcgtttccgatttctgatcaaacgcactaaaatcagacgaatcgagagagtaacagccgcgaggatatcaccgtcgttgtaatcaatcgacaaacgaacagaggaaggcgtcgattcattgatctttagccggagatcatggaggctagactcatcggcaaactcgaaagttggggtttcgttcgtctcgaggtttctcaactgataaaagagaaggcatagatgataaccagttattaattcccggttgaaccagttgctaaccggttatcggctcatttttaaatatctatgggccgaattaagctttgtactgggtccttatcgtaaagatccgacccgacccgggtttaaaacctcaccttcgtaaatgacagaaatgtcgccgaagttttttttgagagtttgagaaaagagtaaacatg

SEQ ID NO: 18302 - DNA, 3003 bp, Unknown
  misc_feature (1)..( 3003): 2750-1469P.txt file - cDNA_ID_1816616; gDNA_ID_1621126; Annot_ID_56358
ctactgatttgccactctcacgagctttgtcaatttcttgccgcaatcggacagagatcgagataatgctaaaaagacgaaactctattctaatcttaatcatttgttaaataatgcgatttttggggttcactattaacgaatcttactcagttcttccacttattacatcaacacgtaccattatctttttttggggctaaaaacgcgtctcgttgcaaccatttagtccatgacacgtagtatgatgtcagacaaaaattgtttggctttttaaaatcgaactggtcagaccgaaccgtgcttccggttgtcgatcgagaactggaggactagtgtatagtggatgaaataaatgtaaaaaatgcattttaatttcgaggatacaacttaaaattcaggcccgacaaaaatagttactccaataatgcaagctatgctttatcatggagctagttatgtaaaactagtactatgaaactaaccatttaacaaacttacggttaaagttgtagatagagttatgggcaccggttttactaaacaatacatatgctttgaacttttaaagttgagcctaaatctatagtccaacactatgaatacattttcgagtctctccctgtgattgatgacgtacccagttatagaagtttaattggtacgtacaccattagttgcatatgtataatatatccatatagtacgattcaaaaaaatgacatttacaaatgaaaaaaactaaattatcataagacgtcatatctattgaagaatatgtgtgctttcatcctttttttttggtagggttatgtttgctttcatcttgatttgaaggaaatgtgtgatagtatatgctacagtaaggattaagttataacgaagaaagagattcatatctaaaatttaggtgtatactattttggaaacctagttcaattcaacaaaaggttgggtgaaactaactttctagttaccaaaattgaatgttttaaaataaaaatcaaagattcgtcatcagacaaccaacaaacttctacacaaattactataaatgggttttactgcagtactttagtagttgttggtcatcagttactaacttactatacatagattcactctaggcttagagtagttgttggccatcaattgttgtagcctttttttggtcaaaggtaaattgagaatagacagtaaatatagcttttgactatgtatagatccacaactgcactcaatttaaaacattaatgcattttgcatgcattcatatcatccgttcatgagattttatacattagtataagttttacacgacagatgttaaaatgttgaattaaatctgttgtcgccattgattttcatgctcacttaatagaaatgtctaaaagcgtgacaaaatgttatattgctacttaagatttttttttttttgccaaatttgctacttaatatatgatagttcaaaaccatgtttagctatggttatagcattgaaattatttggtattacaactaccaaaccatccaatttaaaatagtccataagtaaaaagccaagcatgacacaagagggctatgtgatggtattggttcgagaccgtgtggaatgcataatattttatagacgtttttcaatactaatatcttaaacttatttaaattaaacataatttattatcttaataatcatttataaaataaaagatacatatagctaacttaatagcctataaaatccaaagtataatacatcatttgtgtttaccaatatcaaagtaggataaatggaccagttttgagtcgttagacaaaatgatatataatataccatcaacaatagtaattaactctgaaatgcagaatcgcagaaaatagttgataaatcatttgtcattttctaatgtgatttcagttccctatatagtatagttgctatttaacaaatggtgttggaaagttgaaacatttaaactaaaagccaaaataaaataaaatttaagtctcttcttgaacatttaccattaaattttgttttcttctatacactaaagaaaaatctcctaaaatagatacagctttcattgctctttttgtttttaaacggttaaaagaagaaacaaactttaaataaccgttaaattagatattgatcagaaacaaaaaaaccggtttcgaaaacgcgttaccaaaccggatattgcttaaaaagtcccacttcaatttgtttttttcctgcttcttcttctaaaaataaaaactctactcttgtcactctctttttgctgtccctattttcactccactctttttcatttttttagtccctactttatttctcattcattatccttttctaattaaaaaaaattaataccaaatctaaacatcatcattcattttaggagatgtattagaccttacattttgaatgatgagttttagttatatgattttgatgattttaggaaagttgatgtgatttattgtaaaatcttttcaaatttcatctaaaaccatataatttggatttctgtatttttaagtgattttttttttcaaatctttcaatattaataaacatcaaattcataaactgtttccaataacagtgaaatttaaggtatattttttagttcaacaacactagatttcattagaatttttaaaatttataatgaataacataagatttataaatttacacaaatcacttaaaataataaattgaatacgctcctcttaaattattcacaaaattatacgttaccaactatacataaattataaataaattaaaaattaaaagtctataaatagatttaaatttaattgtgtagggtttagttatggagaaaacataattgtgtaagtttttttggcttctatatatattaccacaaatatataacacaatccgctctcaaacccaaacaagcccaccaatctcttcttctctgctcttctctctctgtagacactagaagaagaacaaaaatg

SEQ ID NO: 18303 - DNA, 3003 bp, Unknown; identical to SEQ ID NO: 18302
  misc_feature (1)..( 3003): 2750-1469P.txt file - cDNA_ID_1816616; gDNA_ID_1621126; Annot_ID_172308

SEQ ID NO: 18304 - DNA, 3003 bp, Unknown
  misc_feature (1)..( 3003): 2750-1469P.txt file - cDNA_ID_1816622; gDNA_ID_1621126; Annot_ID_56356
caatttcaattatagggtttcggagataattagatattgcttcttccttttttcgttgtatttgtttaaatcctctctgctttggtctgtgcttgaaacttgcaaactaaatacgttggatctgttttgttgtaggcaactcttgaagatattggtatggacatgacagaattaaatacccttacctacgatgatctcgatagtgtttcaaagctacaaaaaagtcggagatatgctgatataatgcagcaagtggaagaggctcttgaaggatctgtattagagtacaagaagctaatcgtggactgcaagcagctcttagttgatattgagaatgaaatagtcatcgtccaaaactttatccgtgacaagtatagagttaagtttcaagagcttgagttgcttgttcctcacccaatcgattatgctcgtgttgtgaaaagaattggcaatgagatggatttaaaacttgttgatcttgaaggccttcttccatctgctatgatcatggttcttttagttactgctttaaccacaaaagggaaccaactgccagaggatgttctgctaaagacgatagacgcttgtgatcgggctctggatcttgattccgcaaggaagaaggtccttgaatttgttgattgttgcattgtgtgtgtcacattctaaacctaatgtgcttcttggtctactcatagccatctcatgcttcggaaacaccctcctcctctgcatctggatacaagtctctggaaaacgtaaagcatatcaatgtagctgccaataggtactatatatttctttccaaacaaaaatgatggaactctgtttatctttctctttacttacatattggttctgtgatatcaaaagcaattaagaccacagaaaaccgttgaggcttaacctcaaacatcgaacaaaaagaccgagactcgaactccaacaatctaatggtttcccaatttgtcaaaagtgtactataattatatcttctaaacacccaacaaagtattagccatcaacttataatactctaaacttgatttctctaaatcttttcataccgagacatctaaagtagcactatcaagattactacccgtgacctcagcctcaattacaaaccgggaggtcacaagagtttcttataaacacggttttgaagaagctaaaatggtaaaggtaatggtgtataaatagaatactaagtgcggctaaaggtttgcaaatgagtagtcttatggtggttgtaataaaacagaggactggttctcgaaagagcggcaactaaatggataggtggctgtttgaattttgtggttggctgtatcgctttctgttgcgattggtcatcttcctctgcttttattcattgttctgttactgttaggctgaacttttgtaactttgcaagtacgtaaactaattgtaccactctgataagtatacttcttgataataacattacattcattttatttcaaatttacataccgacataaaccaaacattcctcaacgataaacaagatgaaaaatagaggtttaaaaagaatcgacaaataagtttaatgcgtatacgttaaacctccctgtaattgtgtacaaattacttaagtgaaaactgaaaagtgaaaaccttttaaaaagttaaaacgtgtctgtatatttgaattgattttgtgggttaacgttgtcgattgactactagatgtgtatgatattctctatatttgaattgattttgtaacaaaccatgcggtcataagagtttcttctaaacatggttttggagatcctaaaaattttcggtaacagaaaacagagtgcggctaaattaagcttcggatttacaattgctaacgttgcttttttgctgtgatcaatctttttcttcttcttttgtttattgttctttatagtttggctaaactttgtaactcgagctgtgaagtactttaacagtatatttaataataatacaataacattacattttttaggtcaacaaaattatgttcaaacctttaaaaagatgaaaaagtgtttctatagttaaactaatcttgtggattgaggactagaagtatactatgaaagtcacttttggcaccaaatttctttgctgtcataaatatcagagagtttgacaaaaaaaatttgttcatgcaattacacataagtaaagtgggagccatttttacaattttgtttactaaaacgtgtatgataatagaaaatctgtcaaaatctgtcaatgtcatacttggtatccaataatctctatgctaattggccaacaattttagtaagtttttaacatatttgtggttgtcaaaatttttatttttgcttttagatgtaagcatgaaactaaattcaagtaaactaaaaatgtatacgttttacaactcaaaaagttaaactaaagtcacaagtcacaacgttggtaacaactctgctttccacacaatatatatcacatctatgtttttgtctcagacacataataataccattagagaagaaagaaaatggagatatataatttcgaaaaaattaatgtttcgaaacacttcctgaaaatattcaattgaacattatgtcacggttgcctctgatgaaatcctttaaaaaaatggttaacttgttatctatattttgacgtaagattcaattgtattcgaagaaaataaaaatattaaaaacgagtacgacgacgaaagacaatctgtcactttcatgcatggtatccaataatctctgtggtaattggccaataattttagtaagtttttaacgtgtggaactaattaaaatttcttcttttggtttttagatgtaaagcgtgaagtataattcaaggatatacgcgttttatgactcaacacgttagaaacaaactctgaagattctctataaatatcatcaattgtgtgtgtttgctagtcctcatctatctcaaacacataatataatatcatcagagaaaaacaaaatg

SEQ ID NO: 18305 - DNA, 3003 bp, Unknown; identical to SEQ ID NO: 18304
  misc_feature (1)..( 3003): 2750-1469P.txt file - cDNA_ID_1816622; gDNA_ID_1621126; Annot_ID_172305

SEQ ID NO: 18306 - DNA, 3000 bp, Unknown; identical to SEQ ID NO: 7103
  misc_feature (1)..( 3000): 2750-1469P.txt file - cDNA_ID_1816644; gDNA_ID_1621127; Annot_ID_56390

SEQ ID NO: 18307 - DNA, 3000 bp, Unknown; identical to SEQ ID NO: 7105
  misc_feature (1)..( 3000): 2750-1469P.txt file - cDNA_ID_1816651; gDNA_ID_1621127; Annot_ID_56386

SEQ ID NO: 18308 - DNA, 3000 bp, Unknown; identical to SEQ ID NO: 7105
  misc_feature (1)..( 3000): 2750-1469P.txt file - cDNA_ID_1816651; gDNA_ID_1621127; Annot_ID_172351

SEQ ID NO: 18309 - DNA, 3000 bp, Unknown; identical to SEQ ID NO: 7099
  misc_feature (1)..( 3000): 2750-1469P.txt file - cDNA_ID_1816662; gDNA_ID_1621127; Annot_ID_56382

SEQ ID NO: 18310 - DNA, 3003 bp, Unknown
  misc_feature (1)..( 3003): 2750-1469P.txt file - cDNA_ID_1816706; gDNA_ID_1621128; Annot_ID_56423
ctctttgtccaaataattccataatattttgacaaggaaaacattttaaactcatacaaatactttgaagataatattatttatcaaaagttcaaaactatcactgtatcacatattgacgcaaaagttttttttttttttttaacgttctataataacctaaagagtgtcaaacattgactaatatttgaagtttttctaatgcaaactaaaaaagaaaaaagaaaaagaaaagaagaaacagatccctcaaattaatgaggaaaccccgaggttggtttacgaacccaagttgagtaaaataaaagattagtagtaatatgtggataagaaaattgtaaagttggctttatggttaaagaaaatgggaaaaaaatagtggtggttagattgaagtggtccagatacgccgtcaaagcaaaataaaactccaaaatgtagcggcccagcccatttaattactcctataaagatggtccaattgcaaatgaaaatgtgttaaaatttcggaaagcattatttctactacgaaggaatttaactaacttaataaagaaaatattctaaactttggaccacaccaattattatacaatgtgttgatttctattgtaaatcatttatatcaacaaaagagtcataagtacactctaatttcgttggttaagtgctaaaaatcttgcgcggtttagctttcggattagattttataaagagtgctataatcaaccagcgattctgtgatcagatgtgggacctgcatcttctgtcattggttacacgtgtacggttgatacggtggcttgagatcttctactgctctgtagggcaagcaaatatttgagtgacatgtgttatgattaatcatgtcggcaaatacaattacgaacgaattatcatcattatcttcacttctttggctaaattgctaatggatattggaggaatttattaggttttaatccgacatataagagtatatacaaaagaaaaatattaatttttcaaattttattttagaaaaagtttcatgaaatattttgcgttaactgctactatagtaaattcgtgattgttacttaatggtctaatttatcctttaaaaaaccaaaacaaatcatttttgtgtgattagttgttgtagctaagacattgtcattttattttcagtataagttactaaattcgtttatatatataattaaattgcaaagtatgctacagtatgacatataatgagtgcagaaaaataaaagatgatgccataatactatagtgaatgagaaaagcctgcggatattcatgcctaataaaagtctttaactccttatggataagatatatatgggaatacaaaacatttaatttatatttattttttatcttacgttccactgacggattataaataaattttttaggaaaaactttatatttgtttgtgtgtgcaaactttatattacatatattagtcatcaaatgcttctatatattgtgaccaattcacaaataatgatataaatatatatatattcccatcagtttttcttggtataaatacaattaattcaattcaaacttatgacctgttctgtcaagaaaacgaatctagtaatttatgactgaaccaagaagagaatgtttctcaccgtacagaagaaatcaatgcgtgatgagtactgagtagctgttagcagtcacctctaattgtatgaatttattttgttgaaatatgttcgttaatcgttagtacttgttgaaagtcactacgtacgtatatatgtagataaaaaaaaaaaaaaaattcttttaggattattgttacacgtataatgtaaagttataacataagttcttaacaactctttgcatagtaccgattcggacttcgatttcgaaagccatgcatgagaaaaccaaaaaatggagccaaaacttagatccggttcaattcgagtaggttatgtcaaagacgtaaacatctacaataggagctccatataagtagaatacaaccaatgccacgctgtaacataaacaaagacagcgagaatctgttaaagatctctcaggttccaaaacaaaactacaagaccccattatgatgttactgacatttaactaaagccttgtgctagttgatccttaaggaagatgtcctgtcgtgatgctcagttttatttcaaattcatatatacgtgtgtgtgtgtgtgtggtgatcatgattaataggttagagacagagagacaaaagttgtgggctttaacaaaccccagtaaagaacaataagtaattttgtcacgtaggctctgtttttggctcttcaacacccaaagtacctgttttttgaagatgtgagacataaattattacttatgatctcaagtcaataaactcatcaaatctgaactacccacaatccaaacattgaacactagctacctttacatatagagttaattaaccatccatctattgagaaaacgagtaaaatatgtattcggttgttgttcttggtaagaaaagattatgagcttacgatccgaaatttcttggttgtgataagttattaatgggagatagagagaggtgatatgcccatatggcataccacatgtggtgggggattcgaagatttgatctggaccgtctatcacaagaaagaaagatgaaaatattttgtttttgggtttggacagatgggagaaaaagaaagtgtccccacaaatgtccccaagaagatgggacacacttttgcctcaaagttgctgttactgctaccgacaagcttagctttttttcctttgtccttaattcagaaaacagtttcttctctctctaccagtatctatctttattctcctttaacttgtataaaacactcagcttcctcgaagcctctcatcttcatcatcagcagcttctctatatctctcctctctttcaaggataataaccaaaagcttttctttttatcttctcctgcaattcttgaagaaatg

SEQ ID NO: 18311 - DNA, 3003 bp, Unknown; identical to SEQ ID NO: 18310
  misc_feature (1)..( 3003): 2750-1469P.txt file - cDNA_ID_1816706; gDNA_ID_1621128; Annot_ID_172410

SEQ ID NO: 18312 - DNA, 3003 bp, Unknown
  misc_feature (1)..( 3003): 2750-1469P.txt file - cDNA_ID_1816716; gDNA_ID_1621128; Annot_ID_56416
aaatctttctcttacttagttttgcaaaattatcacattaaatgttttacaagataagttggtgtagtagttgttttgcgagtgtgagttcggtttatcttggtatagtataacatcatccggtttactaaggctttaagttgttgggctgtttagtgttcaaacatttgattaaaccgattaaaaagctactatacattaacagccaagggtcgaagaataaacaagacagtgaatttttaaagctgtcgtctgatccacagataggtgaaagtttgatttcgttattaattagtgggaaacaaatggagatttgctgaaacgtactctcgataacagttcatattcaagactcaagagaatctcgtatattctaaggaagacgtacctaaacagaaagttggtcccaaaaaacgagagaaggaatgaaagatcaaggatacatgttttatatacatgaaaaatactaaattttaaaagaagtattaaacgtttttataatgtcaccggaaagaagatgtaaatgtattgatcaaatcatctgactataaaagtaattcaaatcaccatttttttaaatcaatttgaatatttgatgaatttccgtatataaacaatcagtcccgctcttgctgtataaatgaaacgtctatcaaacattagctagtcttgtactggattgcctttacagacaaaagattatactgtatatgtatgtggtctcatgcaaaaaaagtaaaaatgattctgtgtacatctgttttgatttgcatatatattggcttaagtggcaaaggtgcatgcactatttctatttctttgataaaagttttatgatgcatgcattcttaccagtgatttctttaaaaggagaagacatttgttttgtaatagtgacgagaatgtagacagaaaaggaaaggaatcagcacgtgttcatcgctcgacacgtggccaataatagcattggattcagaaaaaaagaaaaagaaaaaagcgaaaaaacctgtataacaggaaaaaaatacaatctgcaccagccgggaatcgaacccgggtctgtaccgtggcagggtactattctaccactagaccactggttatttatttaaaagatttatattggtataaaaccttgaccataaaatgttcctagtgcatccactaagatcaaattcatattaataaacaaaaacataaaattcaaaccgatatagcaagattgctgttagttttgtcttctaaatctgataagtgttcgttattgtcgaggttatgtagctagtttatatattacttgtactaaatttcaatagggcaatcaaaatatacggattttcatgtgtatatatttttctaaatttgcggtttacaaagaaaagttagtggttgatcatattgatttcttgaaagggaaatattaccaataaaatgataaaattgccaagaaaaattagtagtacgatcgataatttagtgatattgggatccaaagagatgatcatgcacttagttaagactccattttctgataagagttaagtggcggtagacccacaaagaaatttgattcggtattgttattattgagtagaaaaacaaagatggagtgtttaactaaatcatgtctaataagtagcaaggtaggtcaatataacgttttacaaacgaaaaatagcattgcatatttaattatctaccaaatatcttaagtcagtcgaataaactaactcattatgttatcaaatcagccgcaaattgtgccgtttaagtcaatactatttttaacttagatatttagtgagtagacttcatacttgcatagtctagtagttatcattgtttaatgcaattttttggttttaatgtaaacttatactactatttggtcatgtaatctcactttctaaaaaaccaatgtaatcatccataatagaaataaaacatttatttaatataattaactaatttttaaacattaaaaagaatagatttatttttatacataaaataatagaaatataaatatatatatatattattataggttgtttattgtaatccaaaagcagaataaaatttgggataggtattaagagtcataaatcttgaaaatagagtcattaattaataaagctgaaaaggaaagattaaaaaaagaagaagaatcctctaaaattgaatttggtaagagtccacgtaggtcaagaagaagaagaagaagatgtcgtgctcgtgttgtgttccaaacgaaaagcgtctatgttctcttcatgtaccgtttctgggtcccacccccctttccttcttcactctccccccaattcctccctctctctctctctctctctctctctctcaccaaaacgtaaatctactctctctatcgcagcagacacagaaaaagagagagcgagagactctgctcacacacatatttacttccctaacttgtctctctctctacacattctggtgagtttcgtaagattcaacaatcgtttagacttcttcttcttcttcttctacagcttttacgttttctggaaaagagatttttggctgatcactacgttgcaggtatatgatttctcaaatgtgagatgggtttgatgttccttttcgctatttctcatctgattttgaattttctgcggattttgtgaggaatcggtagattttgatgtttgttcttgtgggtggttcataacttcatacatttaggggattaaaagaaaattaatttacaaattcggtccttgttgtgaaaaagatttataatctaaaagacattaactttactctctccttgaacaagttttgaattttgaatctttttctgattttgattttcactatgttcataggtaattgcacaattctgggtatacaaaatccaaacgttacgcatattgaattgaaaaatctcgattttgagttctgggtatgaataaaaatctcacctttttaattaattcttactcagggaaacagtaatcgatg

SEQ ID NO: 18313 - DNA, 3003 bp, Unknown; identical to SEQ ID NO: 18312
  misc_feature (1)..( 3003): 2750-1469P.txt file - cDNA_ID_1816716; gDNA_ID_1621128; Annot_ID_172402

SEQ ID NO: 18314 - DNA, 3000 bp, Unknown; identical to SEQ ID NO: 7118
  misc_feature (1)..( 3000): 2750-1469P.txt file - cDNA_ID_1816720; gDNA_ID_1621128; Annot_ID_56413

SEQ ID NO: 18315 - DNA, 3000 bp, Unknown; identical to SEQ ID NO: 7118
  misc_feature (1)..( 3000): 2750-1469P.txt file - cDNA_ID_1816720; gDNA_ID_1621128; Annot_ID_172397

SEQ ID NO: 18316 - DNA, 3000 bp, Unknown; identical to SEQ ID NO: 7116
  misc_feature (1)..( 3000): 2750-1469P.txt file - cDNA_ID_1816751; gDNA_ID_1621128; Annot_ID_56403

SEQ ID NO: 18317 - DNA, 3000 bp, Unknown
  misc_feature (1)..( 3000): 2750-1469P.txt file - cDNA_ID_1816755; gDNA_ID_1621128; Annot_ID_56402
acgcctaaaaacacttagtcatagacacacgcctaaaaacacttagtcacacgccaaaaaaaaaaaacacttagtcataaagaactcacgcctaagaaaaacatacttggtaaaacactatatatattcaaccaaatcactttagtaacaattagtcattaccttgcgtctaaaaacgcactttacaatttacactaaatcaattgaacaaattcactttagttaacaattagtcgaaccacttagtaaacacttagtcaatatccatttaggggcgacacatttaaaatttttttaactcaggcacttattctttttactcgtaacatttgaatacctaatcgtaccacttggtaaacacaaaatcaatattcatttaggggaaaacattattttcctactaaacgaaacttagtggaaggcttagaaatatgataaacaccctttggaagaaatgtaacgctagtcacttccaagtccactttcataacatgttatagtacttaataaggcaacaaattattagtccgaccactttaatcaaaacacgagtgatttaaactcaagtagtcaaacaaattagtccgaacattttagtcaaaacacaagtcgaaacattttaactgaagtacatttcagcattaagatcgtaactgtagcaaagaaaataaacaccttaatcgtaataacaagttgcaactgcaaacaataaacacattcgtcaaaatactattgtcgtaccacttttaaatcatttcatttgattatcagtcgaagcgctttgctcaatgtagtcgaaatgggagcatgcgttcaagcagtcaaaattcactccaaatcgtagcactccagtcgtaacacctccgtcgaaagaaagtgaagggtcgaaaaagggaagctatttttagaaacactttgaagtaaatatgtaatgtcgttgtttcttctttcatttccgttgtagactttcgttctcctcctttactgttttgttatgttatggcctgtctttctgtagatttttgttaagaaacctttcaataaattcgatttcttgtgttttaggttacaactctcgacccttatatatggctgatgagcttcaaaatagagtaggaccctaatacacgttttagaccgttattaacttaccagccaatttagcttgatctttttccgtttttgtattctttgtaatttttgacgcaacttcaatatttcactctttgaattatgttgttcattagttgaactattttacatagataaaattaataatattttaagatagaaaaatttatagcaaataatttatgtgtccaaacctagaaacattagataaaatgaaatagaatgagtaataaacaaaaacccaaaacaagaaaactatgttagttttagaattgaactaacacgttaacaaactttattttaaaatcaagaaactttttttttaaaatcactgtctttaaaaatcaacagattttatttgaacttatcactgtctttgtcaaaaaaaattgatgtaaactttattttaaagtcaacaaacttttttgtaactttaaaaacaaaatatatttttcttttaaccaaacagtgtattcgcatggaaaattattctaattatacaaaatactatataggaacggaggagaacacaatttaatggtcagatctagatctcgtcggtcatccacctttcagttttcacgagtgtgtcgaacgaacgatattaattaaaaactaatcaataaactgaataagtacaagttgcatggttaatgaagtaaatcaccgatttgaagtcattaaaccgaccgacacaatgaataaaaacgcgttcacggattttattccgtgttgatgggcagtgacactgacttctcccattaggcaactgtaattttttctcgtcactatttttcatagcaaatctaaaataagttgcaagaaattaatttgatatacaaaaaaaaagaaagataaacaccatgtgggggttgttgttaatggtggaattgaaaacgcattaagtggaaatctaaatacaaagatcatgaaaaatctaataaaatatttgtaagttgtaacaatctatatgtatatctttgctccaaatattaattactagacaaataaaaataagggaaacaaaaagatttaacagcaagtcgacagtgtggacatggaaagagacctttacaacgaaaacaatgtacttatcttccaattataggaataaacatttcgccagtgaaaaaaggtctcattccttccttacttgtggagatggagatctgaatctctaaagtttcgatttttatttattcacttttatgcccaaaaagaaaaatcgttactttaaagccaaaaagaagaatacacaaacttcattcactctctcccattctcggatctctctcagtgcacagtggttgtcactcttctcctttggtcggtgagttttcaatcttttttcctttcttctgcgattttcattcgttgagattcgtattttgcttccttctcattctctgagatattcgttaatcaatgagcggtttttttacttttcctgggaaattgagtgagacttttcattaaaagctctcccgataaaatggaaactctactctcagatctactactactttctatttaattgcataaagatccaatctttgacaaaaaaaataattgtcggtggccatttttataacacttgtgttacttacttggtttacacttaacttgggttctgaatcaagagtgagtggtttctgacccaataaacacggatctgactctaccaagtctgaatttatcatgttctgtttattttaagtgccagtggctttttaccaaactctatgcttaaagtcatattctttataagtgttctgttcttgatttctgcagaaactctttcttggaaagagcattttgttatcaagactctgaagagctcttttgggaggatagtaaggttggatgatg

SEQ ID NO: 18318 - DNA, 3000 bp, Unknown; identical to SEQ ID NO: 7115
  misc_feature (1)..( 3000): 2750-1469P.txt file - cDNA_ID_1816759; gDNA_ID_1621128; Annot_ID_56401

SEQ ID NO: 18319 - DNA, 3003 bp, Unknown
  misc_feature (1)..( 3003): 2750-1469P.txt file - cDNA_ID_1816768; gDNA_ID_1621128; Annot_ID_56398
cagagtgagacaaaagccatcgacactagcaaaaactcagacataatgccgacattatgtaaccttgtcgcctccttgtcatggcgcaacgctactccaacaaccgatatatgccattgggctgatggatacccacttaacatccatctctatgtggcgcttttgcagtcgatatttgacatacgtgatgagaccttggttcttgatgaaatcgatgagcttttagaactgatgaagaagacatggataatgttggggatcacacgagctatacataacttgtgtttcacttgggttctgtttcatcagtacattgtgacatcacagatggagccagacttgcttggtgcctctcacgccatgttggctgaagttgccaatgacgccaagaagtctgatcgcgaggctctttacgtgaagctcttgacctcgacattggcctctatgcaaggatggactgaaaaaaggtatttctttttgccttgtaaatggacttgatcacacaaaactgaatctgattgtgaatgtgtgattataggttgttgagctatcatgattattttcaacgagggaacgtgggattgatcgagaatcttctgccattagcgttgtcttcttctaagatcttgggggaggacgtgacaatctctcaaatgaatggtctagagaaaggtgatgtgaaattggtggattcttcaggggatcgcgtcgattactatataagagcatctattaaaaacgccttctcaaaggtaatagaaaacatgaaggccgaaatcgaagaaacagaggaaggagaagaagaagcggcaactatgttgcttcggctagctaaggagacagaggatcttgctttgcgcgagagcgagtgttttagcccgatacttaagagatggcacttggttgcagctggagtcgcctcggtttcgcttcaccaatgttatggttccatcttgatgcagtacttagctggtcgatcgacaatcactaaagagactgttgaagttctgcaaactgcggggaagctcgaaaaggttcttgtgcagatggtggcagagaattcagatgaatgtgaagatggcggtaaaggccttgttagagagatggttccgtatgaagtcgattcgattatcttacgactactaaggcaatggattgaagagaagttacaaacagttcaagaatgtttgagcagagcaaaagaagctgaagtatgtttattaaagctttacttgcagttcaagtatacaaaatgtatcatctatacactcaatatttttttctgtagacatggaacccgaaatcaaaatcagaaccctatgcacaatctgctggagagttgatgaagctagcgaatgatgcaatcgaggagttctttgagatccctattgggattacagaggatcttgttcatgatcttgctgaaggattagaaaaactcttccaagaatacaccacattcgtagcatcttgtggtaagtgaaaggatacaaatttctcatttcatacaaaccattggttactaattggtgattgttttgttttttgtcaggttcaaaacagagttacattcctacgcttcctccacttacaagatgtaaccgagactcaaagttcgtgaagctttggaagaaagccacgccatgtgctgcctcgggagaagaacttaaccaaatgggtgaagccccaggtggcaaccacccgcgtccttccactagccgaggaacccaacgcctctacattcgtctcaacactttacatttcctaagctcacaacttcactctctcaacaaatccctctcactcaacccgagggtcctccccgcgacgcgaaaacgctgccgcgaacggaccaaatcatcgtcttatttcgaattcactcaagcaggaatcgaatctgcatgccaacatgtctctgaggttgcagcttaccggttaatcttcctagactcatactctgtattctacgaaagcctataccccggagatgtcgcgaacgggaggatcaaacccgcgttgcgaatcttgaaacagaacttaacgttaatgaccgcgattcttgcggacaaagcgcaagcattggcgatgaaagaagtcatgaaggcttcattcgaagtcgttttgacggttcttctcgcgggaggacattcccgagttttctgtcgaacagatcacgatttgatcgaggaagatttcgagagtttgaagaaggtttattgcacttgcggcgaaggactaatcccagaggaagtggtggatagagaggcagagacagttgaaggagtgattcagcttatgggccaaccaacagaacaacttatggaagactttagcatcgtgacatgcgagtcaagcggaatgggtttggttgggacaggacaaaaacttccaatgcctccaacgactggacgatggaacaggtcggatccaaacacgattttgcgagttctttgctatagagacgatcgtgtggctaatcagtttttgaaaaaatcgtttcaattgggtaaacgaagatgacacaaaagagaaatagtcaaaagaatgtcatctcgctaagacgtgatctgttgtatattttgagattaagatgttacagaaccaaaaaaaattgcttgttcattagataaatgagaaaaatcttgaaaatgtaatgtttttggtttatacattaaacccggtttagagacaaccgagagcgtgtcacccatgatctaacgacatcgtattgtcgattcgatgccatcaatcgtataacttgaccttccgttccctctctccaacctatcgtcgctcgtaagcttctctcagttcttcttccgcctatattcaattagggttttgaaatttgtgttaaagttcggatttttggagtagtagcttgtgtttggttctctgaaattgactagaattcatcaatgcttcaagtcctgtgacgaaattttatctcgattctgattgattacatcacaaaagtaaacatttttcgatgattagtgaatg

SEQ ID NO: 18320 - DNA, 3003 bp, Unknown; identical to SEQ ID NO: 18319
  misc_feature (1)..( 3003): 2750-1469P.txt file - cDNA_ID_1816768; gDNA_ID_1621128; Annot_ID_172378

SEQ ID NO: 18321 - DNA, 3003 bp, Unknown
  misc_feature (1)..( 3003): 2750-1469P.txt file - cDNA_ID_1816771; gDNA_ID_1621128; Annot_ID_56397
tggtgataataaccgatggtgatgatctctgaaacaaccgtaattgatcggagcgaaatcacatcatcatcgtttcgtgattgaatgagaagttacaaacgttgcactgtaagcaccttacacattttaactaattaagctttttcactattgtaatgtgttcataacattataacaacagaacagaaaagaacttagaaaaaattgtcaaaatagccaaatcatttgaatgtcagatacatattgtcagaaaataaaaatatcttgctaccaaaattctcaaatttgtatctagacatatccatcaaatacaagcaattgattgatctgatcattagacaatggcattggcagcactagcaatccttggccaaagatcagcacactctttcccaataggaccagtaattgcagaacctttcatttctcccttggggttgacaatgactccagcattatctgtgcaacaaaaaaacacagaatcaatacttgctttcatacacaatcactaacaatgatcaatttaaggattatatagagtccatatggagcagatgcaagcgttcaagcaataaagcatctgtaacgaaggacacaattaaattttccagacttgtacgagcatcaacaccctctaaacgtgtcggtggatacttgacttaagcctggtgatatcaatcacataaactgacaaaaatcatagaatcagtaatactaaaacaatgggaatgtagagttcaaatggagcagatgcaagcgtttgagcataatagtatctgtaacgatagaacacatttaggtgtaccagattttgttttgtatttatacaccctctttatgtttcggtggatacatgacacaattctggaaatgtaataatctaaatctggcataactagaccatatactatctattcataagctagatgaccaatagaacaaatcaagctattgataattcggagtccaagtagtgtaacggtattaaacacacactaaatagtgttggtgaacaaattacgaatcctattagggttttaagagagaaagtaagtaatctaaccttcgaagtacatgaaaacaccatcctttcggcgccatggtttgcgttgcctaacgatgacggcaggaagaacctttttcctgagatcaggcttaccctttttgacggtggccatcaccatgtctccgacgcaagcagaaggtaatcgattaagacgacctttgatacctttcacggaaatgatgtagagattcttagcaccggtgttatcggcacagttcaccgtcgccgccaccggaagacccagtgacatcctgaatttgttaccagaggtacctccacgccctaatcgaaaaaaatccaaatcaacaacgattaaaacgaggttcgaaaagctgaataaacacatattgatgaactgaaaatgtaacagatctaacaactgagatagaggaaaagtgcgaacctcgcttcgacattgttgacggcttgaaggaagaagaaacgatttcggtttaatatatagtgacgcattcttcttgtagggtttcagtaggcttaaaaaatggaagaagaaacgatttcgttttttagcccaagttcaaagtatattaggcccataaaagcccaagcagagttttaaattaaatcagacgcgtcttatcactatttggagagtcccacatcggaaaggtgagagagtttgccaagggaaactttagtatatatagacttcactctccatattctcgaaccacgcagccatgtggtgagcacatagcgaactattctttcgccttttactaaagaataccgtgtgctctccacgctaagtggcatacgcctatttttggagggttcccactttactgtgggtcccaacatctctcagtttaatttttggtctcgaagtatctgagaatcctttgtggcaactctaactgttagacaattaaatctataacccggttattaaaccgtatatacccagttaaaatgcaaacagttatttaaaatatcctctattagagtctttgtgttttttgcctgttgatggatatatgaacgagtttgctatctagaatcgatagaataagctttgaggttatataagatatttggattggtttctggtgaatccattatttgtacaagtttcatggtcgtaagttgtaataactgtatttcttcataatcttctgttatagttgttttcatagaactcaatttgattagcaatatttgtcgaatcctaaaatctgaaattgcttgaggattatgagattccatatttctcaaagttaaaagataactgaaagaatcaatgatcaggtcctgaccagtgccacttgattgatatatagttgaccttaattgaaagtttgaaacaaatcccatcataagatcataaaaaatatagttatccagttaacaattaaaggacaccgtttaagtaactgctgcagacagaattgagattaagtattgacccgaatcttatcttcttttctccggatacatcaactacaacaacaaccaggtgcaaaagtatgttgagtaacaagtttcccaacaatgttttatgctggattctgttgtcaacaaaagtgaggttggattttgtttttctctctcaaaagattgtgtatatggaagagaatacatatggaatttacgaaaaacaagagattcggcttggcaaaagttacttggaataggagatttgctaattatggttaagttttcatgaggcttcctcattttactcacatcctctctccttccttagcacagagaaatttgttgtcgcctagctttttccaagttgtctctcgtcttcctccacctcctcatttttctctgtttttttgttcgttgtctctcatttttcccttattaaaaacacataactccttctctctcctcacttctcggacatctgatttcttaaacccgtatccgtctggtttctatttccttcttgcctcccctccgtgatg

SEQ ID NO: 18322 - DNA, 3003 bp, Unknown; identical to SEQ ID NO: 18321
  misc_feature (1)..( 3003): 2750-1469P.txt file - cDNA_ID_1816771; gDNA_ID_1621128; Annot_ID_172377

SEQ ID NO: 18323 - DNA, 3000 bp, Unknown
  misc_feature (1)..( 3000): 2750-1469P.txt file - cDNA_ID_1816775; gDNA_ID_1621128; Annot_ID_56396
attcagttttgtgtgatcaagtccatttacaaggcaaaaagaaataccttttttcagtccatccttgcatagaggccaatgtcgaggtcaagagcttcacgtaaagagcctcgcgatcagacttcttggcgtcattggcaacttcagccaacatggcgtgagaggcaccaagcaagtctggctccatctgtgatgtcacaatgtactgatgaaacagaacccaagtgaaacacaagttatgtatagctcgtgtgatccccaacattatccatgtcttcttcatcagttctaaaagctcatcgatttcatcaagaaccaaggtctcatcacgtatgtcaaatatcgactgcaaaagcgccacatagagatggatgttaagtgggtatccatcagcccaatggcatatatcggttgttggagtagcgttgcgccatgacaaggaggcgacaaggttacataatgtcggcattatgtctgagtttttgctagtgtcgatggcttttgtctcactctggcggatgatttctcggagacgcattgcaaagttgttggtcttctctagagggattgatgggtgaatgagaagaccagcttcaaggactttgagttgccgtctttgccaaatttgatactcatgtacatcaccaaactccgatggtttcacgtgacggagaagctctaacggaaggattattgtctctgctcgcctaccggtctaaaaaataacagttataaacattttattaattaatcaagaaacagagtttcattcacaatttaaaaacagagcaacttacttggccaacaagcgtcctcattagggttttccgtagccgagtgtcactctgttctgtcaccttcatttgctgcctcatgatttctgcagaggttaacggtcgtcgaggccgagcaggcgggactgtaaaaaacccagccccagggctaaagtgtcctgaaccacttcctatgcttccattattacctggggatgaaggagctgagacggcccctacaactgtccctactgtcgacattcgcctagaaggagatcgtttaagcatctttaaccctagcgcccgttttactcggcttgttggtgttgtcaacacttcttttcttcctaaagacccgaatccagagccgttagatgatccagatcctcctcctcctcctattccatccccttgatggtcaccagcattgtgcttggagtagaatgtgagagcatttctacctccaaatccaggtgatgatcgacatgcggcgaaaaagatctcatacgcggtttcacggatttcatcccgatcaagaccatcaagcttcccgaatggccaaagaagatcggtatcaggacaaacctcaaagccaaccatgtcgaaaaaggactccctccgagaatgacgaaccatcacggaggggaggcaagaaggaaatagaaaccagacggatacgggtttaagaaatcagatgtccgagaagtgaggagagagaaggagttatgtgtttttaataagggaaaaatgagagacaacgaacaaaaaaacagagaaaaatgaggaggtggaggaagacgagagacaacttggaaaaagctaggcgacaacaaatttctctgtgctaaggaaggagagaggatgtgagtaaaatgaggaagcctcatgaaaacttaaccataattagcaaatctcctattccaagtaacttttgccaagccgaatctcttgtttttcgtaaattccatatgtattctcttccatatacacaatcttttgagagagaaaaacaaaatccaacctcacttttgttgacaacagaatccagcataaaacattgttgggaaacttgttactcaacatacttttgcacctggttgttgttgtagttgatgtatccggagaaaagaagataagattcgggtcaatacttaatctcaattctgtctgcagcagttacttaaacggtgtcctttaattgttaactggataactatattttttatgatcttatgatgggatttgtttcaaactttcaattaaggtcaactatatatcaatcaagtggcactggtcaggacctgatcattgattctttcagttatcttttaactttgagaaatatggaatctcataatcctcaagcaatttcagattttaggattcgacaaatattgctaatcaaattgagttctatgaaaacaactataacagaagattatgaagaaatacagttattacaacttacgaccatgaaacttgtacaaataatggattcaccagaaaccaatccaaatatcttatataacctcaaagcttattctatcgattctagatagcaaactcgttcatatatccatcaacaggcaaaaaacacaaagactctaatagaggatattttaaataactgtttgcattttaactgggtatatacggtttaataaccgggttatagatttaattgtctaacagttagagttgccacaaaggattctcagatacttcgagaccaaaaattaaactgagagatgttgggacccacagtaaagtgggaaccctccaaaaataggcgtatgccacttagcgtggagagcacacggtattctttagtaaaaggcgaaagaatagttcgctatgtgctcaccacatggctgcgtggttcgagaatatggagagtgaagtctatatatactaaagtttcccttggcaaactctctcacctttccgatgtgggactctccaaatagtgataagacgcgtctgatttaatttaaaactctgcttgggcttttatgggcctaatatactttgaacttgggctaaaaaacgaaatcgtttcttcttccattttttaagcctactgaaaccctacaagaagaatgcgtcactatatattaaaccgaaatcgtttcttcttccttcaagccgtcaacaatgtcgaagcgaggttcgcacttttcctctatctcagttgttagatctgttacattttcagttcatcaatatg

SEQ ID NO: 18324 - DNA, 3000 bp, Unknown; identical to SEQ ID NO: 7110
  misc_feature (1)..( 3000): 2750-1469P.txt file - cDNA_ID_1816786; gDNA_ID_1621128; Annot_ID_56393

SEQ ID NO: 18325 - DNA, 3000 bp, Unknown; identical to SEQ ID NO: 7109
  misc_feature (1)..( 3000): 2750-1469P.txt file - cDNA_ID_1816790; gDNA_ID_1621128; Annot_ID_56392

SEQ ID NO: 18326 - DNA, 3000 bp, Unknown; identical to SEQ ID NO: 7138
  misc_feature (1)..( 3000): 2750-1469P.txt file - cDNA_ID_1816790; gDNA_ID_1621128; Annot_ID_172371

SEQ ID NO: 18327 - DNA, 3000 bp, Unknown; identical to SEQ ID NO: 5042
  misc_feature (1)..( 3000): 2750-1469P.txt file - cDNA_ID_1816798; gDNA_ID_1621129; Annot_ID_56437

SEQ ID NO: 18328 - DNA, 3003 bp, Unknown
  misc_feature (1)..( 3003): 2750-1469P.txt file - cDNA_ID_1816806; gDNA_ID_1621129; Annot_ID_56434
gtgtttggcttggtatttgttaaatcatcaatagacaataatagtttgataagacttacaacaactgaatatttataactcgcaattagccctgttaacattccaggcagtgcctgcgtttaagcaacaatacagaggcttcttttaggtcatatgtcaacacctaaaacaaatagataacatgtgagagaaatgtgttaggtatattacactatgattagttcttttgttaaaggaccacgcaccactatcattatccacgttacacacggtttgaacttaaagaagatcgcatgttccactatcttttttgttgttgtttgtcctcctcaattgaacaatttgcatacgtaagcgacatttggttcatatacagtgttcatgaactgagcaacatatatactgtttttttttcatctaagaaaagctacctttttgaaatttgtatttatgcaaacgaaagataatggaaagtgagctggcatggaccgaaagtggtacaaaaaaagtttgaacaaagccattactataccaaacaaacgcaaatgacaaaaactacgcagcattaacaactatattacaattgtcattatttatgtataacattataatacactatcaaggcttctagattgttacatcatctccttaattcttccaagttacatcatcatatatagttgaaattaatttctattattcgtgagaatataagttgattggaagaaggaagattcagtctatatatatatttgaaatactatatgtggaagaacgtagaattccctattgcgaactagaaatgtgttgacgtaccgtgtataaccaaatgtaatatattaatcaaaggacatattaacgtacacattttttactgcatagtcagcaataattgacatttaatcatacatgtattagaaaatggtatgccacgtaagacgcattaccttgcatgaatggcatgtgtagtaagtcgtcatccgcatattgtccaaacaaacaaacaaataaacacatacgggcaagaattaaaaaaaaatcatcttttgttggtcttatatagttgcttatctgaatagtctcacactctctcacttgagagcaagagtgcatgtaattatactatagtattagtacatacgaacaatttggtggtgagtataagtttggatctttggactatatataaagtcattaatttcatactcttacgctattcttttatatcttttaatcaagttgacacatttgtctcattgttttggtgcagagatgatagattggttttctttcttttatatatatgtattgaaacgataacgtgtatgtctccactttctacaaatgaattttaaaaagctcaatgtgtatacataggaattgataaaccagtgattatatagtattttgtaatatactgacacctatacagttttattttagtaatatttgtagccttgtagacaatacataatactcatcacgtcacgtgtagaatattccatggaccgtataaggttcctcctccattgtatcccacaattaattagacacagcttagattagcaaaatggtaatttctttcgtttgagttatgattggcgatttcgtataaaacgaatcgagagaataaaaacgtaaaagaatcggaatatgattcattgcttaccatggttaagtttaatgataagtgcttttattgataacatatatggtcaaataatacaataatttgatcataaagagtaaagacaattgaaaaatgaaatcaccaaaaaagtcagatcacatacagacacattgacgcatcgacgtcaagcatcgtgagcgcacaaagagcttacggctttattattaacacacacactaagcaaaacagtaagtccacgagaaagcatccaaaaagcccaaaggaaccacctttattttttattttattttaggcaaaggaagctcctttattaaattcccaatcttcttccactactttgcacaatctttaatcgatccaaccaataaattttgcattttttttcgttggcgaatgaaggattagagagaaacagaagaaattgttaatttttttcttgttgattttaattaaagagaagagagatctctcttctcgattgctctcaagaacccaagtgacgtctggtttcagctgatttgtttcttctcattctctatcttcttctctgggaaatatcgattttgatctattaagagctggtgagagccaaagtttcctttttgtttgtttgtttgtttgtttgttgtttgtatttttgtatctctgtgatcgcttctacgtgttgggtcatgcagagaaactcattttgttttgatttgcaatgtgtcaattccactttgaaatataagattcatcgcctctctctcctttgttttttttcttcttctgcagctacgagctttgggatgtggtgagatgcttgttctatctcgaacaatccgccggttgttgattttaaacaaactctctatcacaaatctttcccgatcatggattttattgagatctcgttgatctttcgagagcatttgccactactggaactatgttcggtcatcatcaacctcctactctttcttgtctttctatttgctgtctccgcgaggcagattctcgtctgcgtgagaagaggcagagataggctctctaaggacgatacggtttcagcttctaatcttagcttggaaagagaggttaaccatgttagtgttgggtttgggtttaatctgtctttgctctgttgcttatatgtgttaggcgtccaagttttggtgttagtatatgatggggttaaggttagaagagaagtcagtgactggtttgttctttgctttccagcttctcagagtttagcttggtttgtccttagcttcttagttcttcatttgaaatacaagtcttcagagaagctacccttcttggtgaggatatggtggttcctggcgttttcgatttgcctctgtactatg

SEQ ID NO: 18329 - DNA, 3000 bp, Unknown; identical to SEQ ID NO: 7147
  misc_feature (1)..( 3000): 2750-1469P.txt file - cDNA_ID_1816810; gDNA_ID_1621129; Annot_ID_56433

SEQ ID NO: 18330 - DNA, 3000 bp, Unknown; identical to SEQ ID NO: 7157
  misc_feature (1)..( 3000): 2750-1469P.txt file - cDNA_ID_1816818; gDNA_ID_1621129; Annot_ID_56430

SEQ ID NO: 18331 - DNA, 3003 bp, Unknown
  misc_feature (1)..( 3003): 2750-1469P.txt file - cDNA_ID_1816826; gDNA_ID_1621129; Annot_ID_56427
agaggagcaagacggcgccctcatcagctaaaaacctacattgccagattgcgttattacacagtagcatagaaagcattgaattaagaatttgatacaggatgcatctctatcaatacaaaaataaattattgtagagaaaaagctcaagaaaatataacttacatgccgagagtatcaaatagtgaagcaaatggtatccgaacatgtggaccagcagggtgggcatttccctccacatctgagcggtcaactgcaatcagagtaatagtttagataaacacatcgaattcttcttattcagaataatgaagaaaaaaaaatctcacattcaacatctctagcatttgctagagccttgctaaaagtattgtcagaggaaaatacatggactttagaaactgattctgaggtcgcactgtcatcacttttatccgtcatagactcatcactcatgatagacttgtgatagttaattaggataagtaaaacatgcaggctgcactccgctagtggatttttagatccgccactgttacttacaagatagttcaaaggcaagagcactaaacttgctgtatatgcaacagaaaagttttcatgagtacatggactgtttcatgtagctagttaggaaaacataattgaacggaaagtcggaaaggcaatagaaaaagatcaacatttacaagttagtacaataatacatcatatatgaagtaatatacgaacacctaccagctgcagaaccaactctctctaaaatgccttgtgaatctccatcagaatacatataggattttgcatttggaggagtacggtgtcgggaaatataattaagtagcaaccttctgactactagagaaactagagacttttcctgaaaatcgttgaaccaaaggaaatggcggaaattgatatgaggtaatatctatgctaaagacaaagaaaaaagtaattaatttggttacctgagtcattgctgcatcaataaaagggttcgcatctgttggtccatgtgaaggtccagagagaagctgtgtcgacattgtaacaagcatgaagttgagaagttcctgatgtagaacatacgagttgggacttgccaaataaatgatgaaaatcaggagaatgaaacatctaatactgaaacatataaggaataggtgatatagagaatcagcattggcatacctcacttcatttgatccaatgaagctcagaacactatgcatgacaaaattttggatgtcttgatctgccatcaaaacactcttaattagccagcttagaaataccttaacgctggaaataactattatgagagtcattacccattacaaatccatgtggaactggttcactttcgtccagagaaagatgcaactcctgaagactgtcactttttccattctcaatcaaatactttaaaaagacggatgaaatatatgttgcattaacagctttcttatagagagaagactgatcatctgaagcttgaagaagctcttgcaaacaccaggacagatgaatcaatagttttgcaaggtgcctagtgtagccattactttgtgctgaaacaaaaaaagaaaataagatcatcctcctactttcactaggtcatcatcaacattcaatttcattagctcaaagtgaattcgacaacacatcctttacaatttcaacactaaccgaaaagttcacaggcttgttgaacccgatcactaggccagcgagaactcaacggaagctcaagtagcttgttccagaaatcagacgctaaaggaaacgatttctccccaacaaaagtggcaatgaggtactcggccaccgaaacatcatcaccaccggtttttcgcggcgttgaaggcacacctcccatgtctcctaagccaagctcgccgagtcaacaaggatccaaaagagaacgagtcaattgatcgcgtccaccgagtcggttacgatgaagaacaacggcattacaaagcaagagatgaacaatgcaaagatcttgctctcaatttggtctctctcgatctaaatctgagattaattgaagattcaaactgttaaaccaaatgcttcgataccaagggtttagacttttgagcaaaaaaaaaaaagagaggacgcgttattttatttgtttatttatattataatctttttcttttaatgttggaaaactattattcctgcgtaagtttatttccaaattgattttttgatacaaataatttagcgactaaatgtgacaatttttgattattcattccatcagcacttgtaattaatgaagttaaataagtgttttcctaattttgaaaaatacaggctacgtgctaccaaattaattcccaccaaactctcataaatatgattcgaatactttatgggttcttacgttttctcttttacaagagcttatataatattttctgtatagattaacctcaaaccaaatcttgactttttttttgaagttaacagatgacttgttctattctactagagaaatgaaattattatttactagtctacgtggaataaaaacagagataatggatttgggataattcaaacgaaatggagtcaaattgatgctagctactaccgtctttgaaccgtcggttgtcggtggagtgggatgtggccgaatcttttttactgtatttacaaatttgaggcccatttattttcttgggcttttcatttcttcaatgattctagaactgaaattgctcaaggtattagttcaaacttaatcgttattgggcttttccatatgttcaatattcttagttatgtttaattaaaaatatatgcacaagtgagagaactcaaatgatgaacaaaaagtaataatatttagagaaaaaactaaaagaggaacagagcagaagtggaagtctcttgtccctctgtaaaccctaaaatagaaaagcaaatcacacttgggggattcatgttctttggctttcttacaaacctctagaaataatg

SEQ ID NO: 18332 - DNA, 3000 bp, Unknown; identical to SEQ ID NO: 7144
  misc_feature (1)..( 3000): 2750-1469P.txt file - cDNA_ID_1816834; gDNA_ID_1621129; Annot_ID_56425

SEQ ID NO: 18333 - DNA, 3003 bp, Unknown
  misc_feature (1)..( 3003): 2750-1469P.txt file - cDNA_ID_1816846; gDNA_ID_1621130; Annot_ID_56467
ctgcggttcgtttaacggtaaaaacttaacgatcattgtaactgctggcgttattggagctgttggttcattgtgtgttggatttgggatgttttggtggttctttattagagataggaggaagatgaataactacggttatggcgccggaaaatgtaaggatgatagtgattggattggtttgttgagatcacataagcttgtgcaagttactctgtttcagaaacctattgtgaagatcaaattggttgatttgattgaagctacgaacggttttgattccgggaatatcgttgtttcgtcgagaagtggtgtctcgtacaaagctgatttgcctgatgggtctacattggaggttaagaggcttagtagttgttgtgagcttagtgagaaacagtttaggtctgagattaacaagttaggtcagatcaggcatccgaatttggttccgcttctcgggttttgcgttgtggaagacgagatattgttggtgtataagcatatggctaatgggacgttgtattctcagctgcagcaatgggatattgattggccaactcgggttagagtcgctgttggagcggctagagggctagcttggttgcaccatggatgtcaaccgttgtatatgcatcaatatatcagctcaaatgtgattcttcttgacgaagatttcgatgctcgtgttattgattacggtttggggaagttagtgagttctcaagactctaaagatagctcgtttagtaacggcaagtttggttacgttgcgcctgagtattcgagcactatggttgcgtctttgagtggagatgtgtatgggtttgggattgtgcttcttgagattgttacaggacaaaagcctgttttgattaacaacggtgaagaagggtttaaggagagtttagtggagtgggtgagtaagcatttgagtaatggtagaagcaaagatgctattgatagaaggatttttggtaaaggatatgatgatgagataatgcaagttttgagaattgcgtgtagttgcgttgtatcgaggcctaaagaaagaccgttgatgatccaagtttatgaatctttgaagaatttgggagatcaacatggtttcttctctgagtatagcgatgagtttccactcatctttaacaaacaagaacacttaaaatgaatgaaaaggttttattactttcgtactccaatttgataccacttacttatctaccgttctcacttttaaccgcatttttttgtttttttctgttttgtttttgtgtgctgtataattctgtacatcatgtgatgcatccaatgaaaatgagaagaattgttttatatagatcaaactttgaagattctgattcaaaaagtctatcaagtgttagtgtttctatgagattctagttgtagttgttatcgaacgatttgaaattcgatttcaagcgaaaagacattatccaacgatgtttctgtttcttctaatgattctatggataattataatcttttctgataggagaaaaaattaatgtttcccaagtcgctaatgaaaaatttgataaaattttataagataataggataatattttttgaaaatctttgtgtaaatatatagtcccttaatatttaaattgataatcatataaattacatatatataaattgatatattaatgtactttatgcttttagtgtgtgtttttaattaaaattaaattttttgttacagcttatctctaatttttattgtataaaaaaattattatgttgtgtttttaaaatattgaatcgtaatatactttataaatatgatagcattagtttgaaaaacttggtttggagtgaaacattctctatagtttttaaattttgaatatatctcatttttgcgtgttctaaaaaatagaatatatatcattttcattttaatagttttatttttaagaaaaaaaatacgacaaatgaagtcaaaagagtatgtagaactgaattcatctaaagagtttgtatttttttttttaatttacatctatcgtttgtataagtgaattcatctaaaagatttgtaatttattatcaaaagatggttttcctaaatattaaaattttacaatatatcaaaactataaaaaaatgataacatgcacaacactaattttgtttagataaaaatttcttaattcatcttttaataaaaatttaacaattaattcttttaaaaattattaaataatagtagataaactaataatactataaattaataaaatatcacatgatctcaacatttttattttatagaggttttactgtatatggaaataagaaaggtaaaatattagtagaaaatttggaaagaatgaaacaaagtagaaaaactggaaactagatatatgtatattaaaattttggcatgcatgatattacattatacatttttataatcacattttttcaattctctgtatagtaaattttccgtaaatctcagtaattaacttttatttctatgtatctagttatatatacacgctctttgtttattttctctgtcaacagtaaaaacaacacacaagataagaagctaagttaagatctttgaataagaagaaagaagtatgtcgaaaattttgctcctcataggacttgctctccttgtaatccttgcaattgctgttatgggatacttaataatgaagcgtggtcaagaatagaagccggatgtttaatttaacggttatgtagtttttttttttttcttctttctccttagagtgttggggtgaaactataaaactttttgattttctatttgtgttgctccatattgttatcagtggatagaagtaggaatgatttctagctatttcatgtgtgtttgtgtcataatcacctaagaattatgattttttctaaatcttatggatgtcatctgacccccttaccctccatgtaaatcttaatgactaactttgaaaacaaaattttatacaataagataatg

SEQ ID NO: 18334 - DNA, 3003 bp, Unknown
  misc_feature (1)..( 3003): 2750-1469P.txt file - cDNA_ID_1816870; gDNA_ID_1621130; Annot_ID_56459
atgctgcttccttgtaacggtgctgatgcaaagaagataacttgtttcatccatacgcttgttagtctgggagtctcttaccattttgaggaaaagattgttgagttcctgaaggacgctttcgagaatatcgaggacatgatcatcgattgcaaggaagatgatctctacacggtttctattatattccgggttttcagattatatggtcattacataactccaggtgaggatctttcatctttattacggaactaactgacttggttggtttatgctccgttccgttgtttttaagtggatgtgtgatgtgaacattttgaacatgtttcagagttgcatataactatttcatactacttttttttcttaatatttcatacttgcatgtgtgtagatatattcaacaggtttaaaggagacgatggaaattttaagaaatgtctgaatgatgatgtaagaggtatgctaagcttctatgaagcgtcacactttgggacaacgacagaagatatccttgaagaagcaatgagtttcacacaaaaacacttggagttatttttggtaggcgagaaagccaaacattatccacacatcaccaagctcatacaagctgctctttatatacctcagaatttcaatttggaaatattggtggcaagggaatatattgacttctacgaactagagactgatcacaatgaaatgttactaaagttggccaaactcaactttaggttcctccagctgcaatacattcaagatctgaaaacactaaccacgtatgtatattcatttatatagatgcttcatatatatgtatattttctgaaagttttatcgattaggtgtatgtatgcagatggtggaaggagctagatttagtatctaagataccagtttacttcagagagagattggcagagccttatttctgggcgactgggatttattacgagccacaatattcagctgcacgaatcatgctggccaaatccatcattttagtggacattgtggacaacacttttgatgtatatggtactattgatgaagttaagagcctcgttcaagccattgaaaggtacgaactatatacgatcatttgttaggtgctttgtaatcacactcatggtataaacgaaaaacgaaaaaagttacaaagtggaatgaatttaaaggattaaaaagtcatatttaaaggatataaaagctcaacatctaggtctctttatattgttggaatgttggtgttctatttaattataaatcattagatgtgatccctaataattgtatggatccaatattaagtaaaggtgggactccgacgccgtagatgtcctaccggactatctcaaagtcgtcttcagaacaacgtttgacttgtttaaagaactcgaagaatatgtgagctctgaagcaagatcttttactatgcaatacgcgtatgagcaggtactgtttcttcatctatttcttaaatctaagccaaattattgcatctataaaaatagttactatacaactaatgttttaaaatgtctccaaacaacaccattctcttatatgagtaaaacaataaggagagcatttggatgttggaaatgttcattttctacgtggtatttttttcctagatcatttagctccacaaattcagccaaaaaataaaatatatatctctatattaaacgaagaattgaaggttatatatagttcgtatttaatataatgttttgcagctaaggatactcatgaaaggatacctgcaagaagccgaatggtcaaatagagggcacctgccaagccatgaagaatacatagaggtcggggtagcttcgaccgcaggtgaagtgctgctagcaatgaccttcatccctatgggagatgctgcaggagtcggagtttatgaatggctgaggtcaagaccaaaactgacccatgctctttttgtgaaatctcgtctcagagatgatattgctacctataaggtaacagaagtcctatatatatatatatatatatatatatatatatatatatatgtatattttaaatgcaaattataaaaataaaatgctaataaatcttatcgtatagtatttcacgtcataaactactttttagttatttgattgataattttgacatgatcgaaatatatgatgaatttgcatcaggaggagatgaagagaggagatgtttgtaatgggatcaactgttatacgaagcaacacaaagtaagtgaggaagaagcgtgtattgagtttgagaaaaagactaatcacatgtctaaggtcatgaacgaagagttcttgaaggcagccaaatttataccgcttcatattctaaggcctgttttgaattacggacgcttagcagatgtgtgctataagtatggagatgggtacaccttcgctggagagaagatcaaagattatatcacctctttgtatgtcgatctcatcactctttaagagtcttcagagtttgggatcacgtgaatggccaagccaaatttgtatccgcagccgcaacccaaaaataagttgtttcagtttaagttgtctttgttttcttggttgttagtctgtcttgaaaaccatcttttaatcagtaataaagcttgtcattagactatcaaaactaacaataatccgaataacaatctatgaatacgtagttaacacttatagtagtgggatttggctttctctgcagatgtgcaattatctatttttttattagcaccgataagaaaaaaaaaatattaattttttctttgttattcgcttagttaataatattaaaacgggcattcttcgaaatatattgtgtacgtaagtgacatcaagcgggtcaataggaacttttcgtagaaaataatccgtttttacatcagacaaaaaaatattcatttatctgagaaaataataattaattgggtgtaatatccaaaagccaaaaaaaaatcaaatcttgaaatgccctgaaaacatg

SEQ ID NO: 18335 - DNA, 3000 bp, Unknown; identical to SEQ ID NO: 7178
  misc_feature (1)..( 3000): 2750-1469P.txt file - cDNA_ID_1816878; gDNA_ID_1621130; Annot_ID_56456

SEQ ID NO: 18336 - DNA, 3000 bp, Unknown; identical to SEQ ID NO: 7168
  misc_feature (1)..( 3000): 2750-1469P.txt file - cDNA_ID_1816898; gDNA_ID_1621130; Annot_ID_56451

SEQ ID NO: 18337 - DNA, 3003 bp, Unknown
  misc_feature (1)..( 3003): 2750-1469P.txt file - cDNA_ID_1816909; gDNA_ID_1621130; Annot_ID_56447
gaatagtgacatttttcacatacactgtgcacacagtaactaaagatcattgctttctcatttccactttggtcttggttgaagtaattttatttagtttctgaaggttgaattgtttggaaaaaaaaaaaatgatctccaaaacatgttattttgcatggattgaaaaaagcatataaccatagcaaaatagctgttaatataaaaatgtatggttttgagtttcttttgactataatttatagctcagttttcacaatctccataatattgatcacaatctccacaatcaaactttttattattagagtgtatagttaagcaaaatcccaaaaataaaaaacctagctaggaaaatattcctctaaattaatattacacactagttctaaacaatctgatacgagttgccatcgagatttgcacacgaaaaatgttcaaagggacccttttttcatctttaatctttttggactttggtcggcgttggctgattatgactcgctataccacgatttctgtcccttgttacaaataattctattagctagtctcgattctcttttttctttcttcttttgtttaagtaacctccttatctttcttgtttagtggaatacaggctccgatcaaattcagtcacatgtcatcatttctctaagatatatgtttccacgtcaacaattaatttcagttagtttgtttttatgtgtttatataatacgtaataaatacataaactataatttaaacaagatgaggatttaaaccagcccctagtaataatctaacattaaaacaaaaagtaataacataacaacgatacaaaaaaaaaaaaaatataattacaaattttggtattaaaattattttttctatacattaaatatggaaaaaatatttctcataaaaatatatgtaaatatgtaaaaattcaatcatccttatatattatgttaatttcctttagagtttaaggaaatagttttcgatggttcatgtatttctcattttatatcatattatcacttcgtcaaaactatataaaaagttaaatggtacgaaaataattcgtacttaaaacacataataatgggacatacaccacatatcaccaaaaatattaataataatgggacatgcatagaaggaaaaaaaacataaaaactgaggactgttttgatgaaaacaagaagaagcctaaaatggaattcgtaggatattacattgaaaaatatgactgtaataaatttaagaggatatcacttcaaacacttagttaaaaaccgactatagtacatcctattctttgactttatctagttatatttagtatttacatttgtataccgtctatatatgcccaaaacatgtgaaactatttttaatatagaagtgaagatgtgtccccaataattaatgaatcacatatacgtttttcaacctaaatgtgaattatttcgttaattttgggaaatcaagtttttttctgtttccaaagcatatcttataaactcactttttgttttgataatatataggcacctatttgcgaacaaatttttattatgtacacagtacactcaaaagctttatgtagttattatcattgttatagtgcctaagttgctgcttatctaactatccactaagttttttagtttggtctatatcttagctattaactttagtcgagatcatttaactactatggcggcttgacagactgaggctattctttaatgaaaaactctataatgtaaaattctttttcttagtcatatagaattatagatatctatcgtggtttcaaactttcaatctatatagtatataagtgtataagtgacattatctaaacatgtttatatcctcaaagttgtaaagttactaaacttccgaaaagatgatagaaatagcaaccagaaaaactatattgtattgacttttgactgactttagaactcaatagtgtaggccaactcaacctaacattaaatatttatgaagactaattaacaacaatcatagggagcctattaaaatgttaaagtcttgcgcatgtttgactatataatactaacgtatagttgcatttatttcaatgatataaatattttatatctcattgtactacttaagttatagattgattattcgttggtgatatttaagaccaaatcctaagacgacatatatatgtaagtgtaacccaaaaaaatctaaaagtcataaaccgtatgattataagtatatataagatacgtattatactacagaaacacacacatgtgtaacggaccaacatggatgaagaaatggtcccattgagaagaagagatctaatgacttcaaatcaagaatggtccattttccaaaatagacacgtaaatatatacaaagcttaatccccatccctctattgggtctacacacagcctagcatttttgtattttctgctctgtttttatttttttttaactttacaaattactttttaattcttattatcttcagcttttgttctgtctttttttttattttcctgataaattctcacaacttccattcatgactcgagctgggtcctttgatttgtcacagctaatcaaaacagtattagcacaaaaaagtgtatatcaatatgaccatgaagttcataaaaacatgggacctttgaaagatgttgtctcacatattcatacatatttcaataaaatccattacgtacgattccatataaattattggtcagtcatgctaaatgtaagcaagcaaacatatcatttatggtgttacatcaagttatgacagagtatgattgaggccagaaagtaacttatgggtctaatggatcgtattccaaagtaatgggctttttattaaggccgtaagaggcccatttatgtgatttctttgaagtcgctttgtttgcaagttgcgactactcagtttcttctccggcgaagaagaggataacgaaaagaaaacacatagctatg

SEQ ID NO: 18338 - DNA, 3000 bp, Unknown; identical to SEQ ID NO: 7198
  misc_feature (1)..( 3000): 2750-1469P.txt file - cDNA_ID_1816933; gDNA_ID_1621131; Annot_ID_56481

SEQ ID NO: 18339 - DNA, 3000 bp, Unknown; identical to SEQ ID NO: 7190
  misc_feature (1)..( 3000): 2750-1469P.txt file - cDNA_ID_1816945; gDNA_ID_1621131; Annot_ID_56478

SEQ ID NO: 18340 - DNA, 3000 bp, Unknown; identical to SEQ ID NO: 7190
  misc_feature (1)..( 3000): 2750-1469P.txt file - cDNA_ID_1816945; gDNA_ID_1621131; Annot_ID_172502

SEQ ID NO: 18341 - DNA, 3003 bp, Unknown
  misc_feature (1)..( 3003): 2750-1469P.txt file - cDNA_ID_1816954; gDNA_ID_1621131; Annot_ID_56474
gatcaattacaattttcttgggtagttttataccaataaacaagtctatacatgaccaataaacgccaatccaaagtacattgtccatttttctttgaccatttattcacttgtgtataaacaatcccatcagtaggacaatgtcagttacatagcttttataaaaaaaattaacgaagatcttatttgtattacactctcaatgaagaccattagttcacttggatacacccgtctatactaattatttgtaataggtagaagacagaaggatatgtcaattcccaaaaattactgatttttattcaatagaaattcaacaaatatacatcgattgtataacgtcataaactcacaaaagttactttgattttcatcatgtctcaacctctcgtttctttcttcatcttgactttgaattagaagtgattaatctcaggaaatcaaacaatcagaaacaatactttcaaatttacagatctgatgtggaataagattaagaactttctaattttgtagatcagagataccagagtcattaggagcagagaggcaccaaacaaaacgacgaataaggcataaagctccctccgccaccgctactaccaactacgccatcatgtcttgattagctttttaaaaacaatcatagcaaggagtcaaagcaaatatgtcggagattagaagataaagccctcgtttttgaactttgatttttcgtaaaagatttgattttggttttggaaatagaaaaataaaatcgatggagaagcgctgagaagatatgacaaagagaatgagtttgcagttaaaaagggtaaattggacaatttagtttgacaaagtgctttatcattttaaagtgtctaaatccgtacatagttttttaaaagtgtcctagaatgtaatattctttttatttattttgggtaaggatcatagaagaagaataagagaaattgagaattaaaaacataaatattaaattgagggtaaaaaagtctaagaaaaaaagaattagtagaaaaagtgtctattccctataaagtgcctcaaatggaaaaacattctctaaaagtgcctcatagtggaacattcccttcaataattagagggcaccattttttttttttcttctaaatattaaaaaaaaattagtaacacaaaaatgaaatttagaatggacctataatttttttaatgtattgttttttgtttttaactaaatctttaacaaaattatcatagaatggacctataatttggcctccttagaaaaattgaaagaaacattttaagaaaatgtagtgaagattgacaacatagttggccgagtttccggatctgcttgttaatacgataaagcaatttccaccatttttgtgagcttctctctattttttccctgtgaaactaatacacgttcatcggaaatgcttctcagtgacagagtttcttcgggagacgatgataaactcgaaaccaaatctctcggatgtttcccaattatcacttccaatatcaaaaccccgaagctatacaagataaataaactctgtttatcctcaaaacaaatagttgaaaaattattaataactaaaacatatttcgtatattttgaatacatcgacaaccaaattttctttttgaaatttatactaatattttgtatttattatattttaactttttctaaattttgaattctgttttaatttattaagaaaataacttttgttttaaatctggataaaactgtcattttcaatattaaaaataatgtttttattaaaaatggagaacaatatattttcaaatgaaaacttaaaatagggtagttttttttttcaagtttttttcatgtttttttttctaattcgttctaaaataccgaaaataacaagattgataatttttgtttcataaaagatttagatatttgaaaattagccgccgaacttttctctagtattacctttaatgtgagtggttggtttaattgcatatatagatatttaactttctcgaataacaaaaaaaaaaactcaaaatataagagaagaaaatgcaaaaatttagaaaaacataagcaaaaataaaaaaataaatataaacaaaatttgatctaattattttaataatgagtttttgagcgcactaattgttatttcatatattaacaatagatgttttgtattattgtggagatatagtatattgttggataaataaataacccagaaaaaatgtatgaaaaaaagctataataaacatgtggcaccaccgcaccgaaggtaaaccaaagccagattaatttgtctcgtctcgggttcctataacacaatgatatgataccatcgatcgtatcaagaagccttgaactattgagaccgttttgttaggaaactaggtctgcgaggaagaagaagaaattgaggtatgagggtagaacgaggaacatgacaaacagctataagaagaagtaacggagaagagtgagtcctaaggttaaatataagtgcatcacacaaaatgatgaaatttctaaatatttgtgtgttttgtataagtctttccttcattcttcatgttgtcactctaagtaatcaaaacaattattagtatgttatatgttatggtgccaaaacaaccctacagcagttggtttcggtttagttgatgcggttcagttttgaaaaagacaaaaaaaaaaaaactgaaacgaagaaaccgagaaaacgaaaaagagaataacggagagattgagagagaatcagaaagcgaaacgaaattcagtatccattgcttcaaaattcgacataacttcgaattgttgggtagttgaattgtgccactgaactcccacatccggtgaagtgaaagttactgtttttcccggcgaagccaagagaaagttactgtttttcccggcgaaaccaagagaaagttactgttttttccggcgaaatttgaacctccggcgagatagcatctttagctatg

SEQ ID NO: 18342 - DNA, 3003 bp, Unknown
  misc_feature (1)..( 3003): 2750-1469P.txt file - cDNA_ID_1816958; gDNA_ID_1621131; Annot_ID_56473
accagacatacttgcagcttctcactggaattcctgttcagtagctttcaaggcggcaaatggccagatcttccacatctccttaatcaccaagcccatctacatccaactctttccaggatacatgatcaaagcaaagtatataggtctgaactccctggaaaagatttcatacttggagttgatgtccttcatagccttaagaaagtatcttggaatccaaaaagacttaagcacaagaaccaactgctaccatggactaatgtctcccatctctaccccatggaatatgaaattctatcaaagacgagattatcaaggcttcttgtgctacttcacattcagagttcctcaccaaattttcatcacctttatgaaagaatccggactttttcatatcattacccttcaagaagaatgaggatgtcatccaacaaaagcaagccttccaggaatgaatccaaaccactataatcttgctctcgaagaagtcgaccaactccaaagagaagacctcattgagaagaccacctccccatgggcatgtgaaaccttctatgttaacaaaagagctgaacaagtacgaggaaaactgaggttagttatcaactaccatccgctcaaccatttccttgcagacaacaagtttcctctaccaaagcgagaatttctattccatctaaaaacctctcaaattaattacaaactctaacaatcgagaatgggaaaaatgtcaaaaaaagcacgaactttcaaatttgggaagaaaaaacataaactttcaaaatgccattaaaatcgtaaagttttgtttgacttttgattaaatagtcaagtttcgttgactttgccatttcgggcatctcgttaagtttccgttaacaaaaaaatcacagaattaacactccgttaccattttctgttaaaagtgaaacgacgtcgttttgaaattctaaataaaagaaaaaagtaaacccacaaggattcgaacctatggtcttttgcctttcaaagaatcattaaaccactgagccacgagaacatattaacaaaatgaaaaacacatatatatataagatataaatatacaattaattaaaaataaccaaacaaagatctatattaatgcatttaatttaaattattctttcttaaattatataaaaaaagaaacatatgaaatagagaaaatgaaatatattgcctaaataaatggtttcttatattgtttccatctaattatgaacatcacatttaattatttgaagatggaatgattatattttatgtttatcttatatatatatatatatatatatattacaagttaatttatcgaatagatatgtttttataattaaaaatatttataaaattaaattgaataaaattctatgtgcatgtataaattaatcctatatttatttgagaaggattgtataaattttagcctattttctaatttcataagtttcaatttttttcataaaataaaatgaagaaaaaataaattttcagataaaaattcaatgcatttagaagaaatctctatatgtaaaattaaaaatatgatatttcgaaatgtatatttatggtatgtatatttaatatttgtacatatttggttatttttaattaattgcatacgtatatgttatatagatccgtttgcaatctgtactagaataatatcgtggccccaatggttgagtgcatctgaggaaaacaatacgtatctggatcgacgtcgttattttattttagattttcgtggactcacaatcgttattttattttagattttcaaacgacgtcgtttcgtctgtaacagaacatattaaacggaaaattaacgctgtattttttttgttaacggaaacttaacgacatgtctaaaatggcgaagtcaacgaaactttactattttattaaaagtcaaacaaaactttacgattttagtggcatttttgaagttcatgttttgttcatcccaaatttgaaagtttatgtttttttgacatttttcccgttctatatttcacaagttatttttaattagttttgtgtatatatataaatatttcagtttacaataatatcaaaacgttatcgtagcatatttggttgagcgcttgtaataattctggagagtcatgagtttgattccttcttggcacatattgtgtaatatattttcattttgaaacgacatcgtttcgcttctaacggaaaatgttaacgaaaagttaactccgttgttttgttgttaacgaaaacttaacgacatgtccaaaatagcaaagtcaacgaaacttaattattttatcaaaagtcaaacgaaactttatgattttagtggcatttcgaaagttcacgtttttttatcccaaatttgaaagttcatgatttttttgagaatgctaattaatgatttcaagagttttctttaattgagaatgacgtcgtttagcaaatgaatggatacataacatgtctgattactctcttaaaccagttaacaatatttaaatcatattgaaaacaagaggacaaagccagagcgactctgcttttaagacacggcaaaaaagtcaaccaacgaacccaataacaaggaaagagatttgtttttcatttctaatggaaaaaaaacagcaaaaattgaagtctactcgtcgtagtagtcgtcgtcttccactaattccgtggtttttttatcgaagacttttgaataaagtacatttgcagagtctgtcaataaccctttcttcacggtattgctctcaagccgcgtactggtaggctccaaaattatcccttctttatggtttttggaacctgggttctccgattttgaggtaatccttatgtgggttctttctgatttcgtgttttgttttattaaaaggacttctatgtttttttgggggtttctgaaaagttcggtttttgcaggttgttgaaatctttgagtagatttttgtggaacatctgactctcatg

SEQ ID NO: 18343 - DNA, 3003 bp, Unknown; identical to SEQ ID NO: 18342
  misc_feature (1)..( 3003): 2750-1469P.txt file - cDNA_ID_1816958; gDNA_ID_2214458; Annot_ID_182714

SEQ ID NO: 18344 - DNA, 3003 bp, Unknown; identical to SEQ ID NO: 18342
  misc_feature (1)..( 3003): 2750-1469P.txt file - cDNA_ID_1816958; gDNA_ID_1621131; Annot_ID_172493

SEQ ID NO: 18345 - DNA, 3000 bp, Unknown; identical to SEQ ID NO: 7186
  misc_feature (1)..( 3000): 2750-1469P.txt file - cDNA_ID_1816966; gDNA_ID_1621131; Annot_ID_56471

SEQ ID NO: 18346 - DNA, 3000 bp, Unknown; identical to SEQ ID NO: 7186
  misc_feature (1)..( 3000): 2750-1469P.txt file - cDNA_ID_1816966; gDNA_ID_1621131; Annot_ID_172490

SEQ ID NO: 18347 - DNA, 3003 bp, Unknown
  misc_feature (1)..( 3003): 2750-1469P.txt file - cDNA_ID_1816968; gDNA_ID_1621131; Annot_ID_56470
atccaaaggtgagcaatcaaccctactttagcaaatcccagtttattccttttttatcaattaattattatagccctctttaatcttctttgtggggattcaaaaatagaggaacatacatgttgtggccttgaatgggaactccaagcaatgagagttgcaacatattgcaagccgagtatgttagcaaagctacatatttgatcgaaactaccaaaatttcgaattcggcacaaaaatcttactctacttgaaggtaatctttcacaaaatttgttcatataatcattgttcttggttaaaatgttacacaatcttcttaatatgtcttcttttgtgtctttagtattgctgaaataacaaaattattctcacaagtaaaatacatcgttggaaattagtgtcaaggtatgtgtcttttttatttagacctttgagcatgaacgaactaattttttcacacatacagcttcatcgatttctttacaattatgactctacttcagtattggtaatcctctcactttttttattaatcaatctaagattctgtaacaattttaatttgtttgaaaagccacgaagtgatcaatatgttttgtttaaacacttccgtttcggattcatgtctagttttataaatctatgctcttgatgctagtcccaactaggaagatcgattggttctggagctgataccctggtttggaatgcaccatggatctctctctcatcatccgtaaccccaatgggtcctcctactcaagagacacaactcatgactgttaaggacttaatatgtcctatttccaagtcttggaatagagaaaagattgcaacttacctccctcaataccaatcagagatctttcagttcagaccaagtaggtttgttgctagggataaatttatctggcttcccacgaaatctggtgattatagcaccaaaacaggctactacgcagctaagactttgcggaatcttcatacacaagttccacctcaacctgtgacctcaattggaactcagagatatggaaaaagaaatgctccccgaaaattaagtttctcttattgaaagtattgaagaatgctttacccctaggtgccaacttgaaagctcgaggcatcaaccctacaactgcttgcccacattgtagtgcagaggaatcaggtcttcatctgtttttcctttgtctatttgctgcacagatctgggagcaagccccattcaaaaataccctttcgaccttcacttttaccaatcttcagatgggttttgaagcggctaaacatctgatttgcttaccactggtggaaattggctcaaaccctcttttcccctggattatttggacaatctggacctgcagaaacaagaaaatatttgagtagaaacatctatctagtcgggatgtcatatctcaagcaatttcggctgcaaaagaatggttattggctcagcctttacctcagggacaccagactctgctttcaagaccaattgtgccggaatttgaatcggatgcaatcttgtgtttcacagatgcagcgtggcgagaggattcacatgatgcgggattgggatggatttttgtagataactcaaatcactctgagatccaggatcacgcagtggcgagagaggtatcttcccctttaatggcgaaggcgatcgctctcttctctgccatccaacaggcgtcaaatcgaggattcaaaaaacttgttgtagcttctgactcgcagcagcttgtcgaagcaatcgtgggggagcttcatccaaaggagcttcaagggattctacatgacatcctttttatctctctcagtttcgctgatattagctttcattttgtcaagagagaaaacaatcgtaaggcagatgcagctgctaaagctgctttactcgcaatcaattctgtaccggtttaacatttaatgaaaaccagaattttcgacaaaaaaaaaaatgctcttgatgctctgttttctttacttatattctaaaataaacatttctaattattacatggtaaaaatgtgactacaaaacatcgaaggtacattgaaacatatattcacttgatgtttttcttctaccttgagaggattccaactctaagtacacttcaggacttagacaatcaccacatcaacaaattgtatacaagaattactctttcattgggaaataaaaacaaagcatgatatggtgggaaaaaaaactgtatataaagactttgcggaaaaactgtattgaagaagacttgaactctgcaaaagggagagatattatcgtattgtgcataaggaaccaaccgaattgtgtttataatgctaatttattaagaccattatggtcaaatataaacagtgtcgataacttaatatgtttcaatgctcatattaataaaaacataaaaaaaaaaacaatctcaaataacaattaactgtattgagtaaacaatataatttttaattaaagaaacactagtagtcaataatactctttcttcccacgtgttgaaatatccaaatattagttgttcatatagtaatattttttataaagaaaagacctaaaccaaaatcgaaatcaaaatcgtattgaagcaaaaattctgagtttactaaaaaaaaactccggtttattaaaaattctggtttagatttttttttttttctaattttgtcatgactttgtaagattttttttttttgcttaattgctttgttcctacgagcaataacccagtacccagcagcaaccacaacctcttcttcttcttcaatatctccctcaaataacagattccattaccgctgcataaatatctcttcagtaaagaaacatcattgattcaattcccagaaacatcaacctctcacctgtttccaatttgtcggcaacaacaacaaatttctattctgggttctgtgaatttcgtagggagagaaatagagatagagagagagagagcttctgggtattttttaatg

SEQ ID NO: 18348 - DNA, 3003 bp, Unknown; identical to SEQ ID NO: 18347
  misc_feature (1)..( 3003): 2750-1469P.txt file - cDNA_ID_1816968; gDNA_ID_1621131; Annot_ID_172489

SEQ ID NO: 18349 - DNA, 602 bp, Unknown; identical to SEQ ID NO: 7242
  misc_feature (1)..( 602): 2750-1469P.txt file - cDNA_ID_1816972; gDNA_ID_1621133; Annot_ID_56518

SEQ ID NO: 18350 - DNA, 3003 bp, Unknown
  misc_feature (1)..( 3003): 2750-1469P.txt file - cDNA_ID_1816976; gDNA_ID_1621133; Annot_ID_56517
tcattgaccaaacaaagattcgtcgattgatagttacggtatggttaaaattatcaataaagatcaatctcttaatatatagtttcacatcatgcaatcaaattttctttcaccgtggactcgtgagagagaaaaaaaaagaagaagctgtggttacttatttgtacagtctaaatttttttttcatatattaaatgatccatgcgtacgttaaaatttgtcccaaaaaaaaaatgtcataatcttttttatttattaatataaataattttttatcgcgccttatcgtcggtaaatatatacgttttatttgatttttgttttaagccctaagattttcaggataatataaaccaagatgattagagccaaatgagaaaactgctctggcttaatttttttctttaaaatcactgaactaggttttggttgtgtaattcattgaaattttttcatatctgtccgaattgttatcatggttgtggatctttctttttagtatatagcctaagagtaatctattatagtaattctagttttacgcttaattagaccatctatatatattatttctagttacgtcacctaatcataaaagactctacaacagcaagctagggaaacacagtagcaaagaaagttttttcttactgattttcaaaggtttgaaacacatgtgtttgtttggactcactagtgtcttctggcgtggaatcaattatttatgtctccacctaatcagaatatgacaaatgaatactcgcaacataaacataaaaataacgctctaatgataattctttttttttattgttttatgtcggaaaaagaagagtccaccgagaaaaagagccctcaaacaaatttgaacatggcaattatggagcggcagaatttaattattagtcctatagtcgatatattattgcattacctaatgtgtacacacacaatataaggttggttaatttggtaatcaaactaaagatttagaatgaaaatttccttttaaaaaaatagccatttgttttgttttaagataagagctaagacatataactacttcctaattaactttggaaaaaagtatattgtcgcaagttgcaactcttgtgccataaaaagcaagtgttcaacacatgtttatagtgatgcctcatcaacagctcaattaaattgaaacgtaagtataatacacaatcatctacatatttttgcagacattttagcaaataaatcgtagagttgaacttatttacaactcaatgtcattagcattaaatcttttttccaaaataattcattttactttaaattcttaatttaaattgtcaatcacattatcaatcaaatttaatccaaacaaacttcccatcaatcctttaaaattagcataaacgtatttgttaacaatatttaaaacaaagtttttgtttaaataaatattattcttactaaacgttttttgtttaaataaataaatcctgtatttgaacttatttacaatttcatgctactggcattaattatttaggaatgaaaatatttaattaaagatttaaatcttctaaatccttgcttttagatttattatgtcattacctaaaaggcaaaaactattagttttttaaatattattatttatattttaaatttttttaacattactaatatttaaacttataaaaagtttaatatatcaaaaaatcttaacatcattatataatatatagagtttttaaaaatctcaaatttttttccgtcatattttgtgattcaaaatttaaaaaatgaacatatattaaccaattggcgaaaaatatgtgagttcaacgtcccattttgactaaaatatttagagaatgattcataaacatatcataaataagatcaacattaacaaaataaatggtttttttttttgcgggacgagtttggcaggacgttacttaataacaattgtaaactataaaataaaaatattttatagatagatataatatataaatttttatatatattaacttaaaaaaataaattgtcctgcggtatactgcagattaaaatgtatattaatacttacgacggacgtgtacaaaatattatatagccccaaaaatagcgctgcatataaaaaccacatctacctaagcctaccatgtagtgtagttgcatataagacaactataaattaataatgtagtttaatattttttttggattggtttctttgtttttggttaagtttttttttcttgggggtataatgattttagttaagttttgtttaagtttcctcaatgacaaaggtacaatttcggcgttacgtctagtctaaaataatctattaacaaaagaatgtacttaattagtcaatactctactcaatagtaggatatcgtttcagttttgtatgtggatttttttttaaatttttgaaaaattctattcaatttcaataaaaaatttctgaggatagtcaatgaaaaccaaaaaagccataataataataattataaagtaatatatcaaaacgctcatataatattccacatacatttactgtataatcagaaaactaaatagtatagttatcaagggtccctcttaataaaaccaatattattcaactaagatatactttatttatttggagataatttaattttcgtaagcaccatataaaaaaacaatgacgcaaattattattttgtttatgtgataaataaagaaatataaaacgagagaaaacaaaaagagtgagtgatagtgattacaaaggtaagccaaaatttgaatatttaatggataccaccagataagaagaactttgcttcaaagcggcaaagcttaagcttttttctcgcgcccgcctctctctctctctctctctctctctctctctctctctctctctcttctcctctaaccaaatttcccgatgtgaaaaaacaagtttccgatcaactcaaaccaccgtcaccacttcttctctccgacatg

SEQ ID NO: 18351 - DNA, 3003 bp, Unknown
  misc_feature (1)..( 3003): 2750-1469P.txt file - cDNA_ID_1816980; gDNA_ID_1621133; Annot_ID_56516
tcgccgacccataaaataagtttagcgtaggagttaaaccacggtgggcagaagaaagtgaaaacgttgtccccggcgagggaaacggaggcgaatttctcttggtagtattgaagacagtgagatagaaactgggccacgagagattgttgttcttcgagagagatacgattagtttcatccaaggaagaagcacacataagctgttcaacgaaatacctgtgacggattaaccaaccatcaacgaagatagtgaagctttgagagctgctagtgtttggcatgtttcttatgtttggagtactcactaagtaagtatggactgtgagtgtacgttgtgcaagaatgtttatatactactacattgggcttgaccaagaaaaatcttttaggaattaatttacgatatgtcggtctatcgacgatgtgtcggcgggcgaaatggatttttgtgacttttgtcttgtcggagtgaagtgtaatcagagcagcgtcttatcatcatttgctgttgttattcaactctggttttagaatcaagttgggttaaacaatagtataaaattttaatatggatgaaaataaaatataaattatccttggtaattattgattataacctatagaatcgacaaaaagaaagactataacctagagaatttttttttttttttaaaacaagtgttcattaaaaatctttaaaatatttagtctgttttataattaaaatgtttatatctgaaattgtatctatcactactagttccagttggaattatatatctgtcagggtcgcatctcgatattatggaatgacctaaaataacatctgaagaggaaaccgacacatgttggtaaaataagaaggcacacgtcatgtaaagaagatgacatatgtcaggaaaggaacatgtccttacaaaatagaaaccaaataaaccaacagttcataaatgctccagttatgccgcgagccatcttttcttctttactaagaaaatttctacattattttaagatttttcttttccatgtagttgtctcatacttccttcgaaaagatctttctctaacttcaaccttggggatcgagcaaccatatttcaatcaacagattctttcatcactctaataacggacaaaaaaagaaaagatgtcaaaaaaaaaaaaattggaatatgcacgttgatactataagttcatttaaatcagtcgttagagtaaaccttattgagagttcaaattcatttaaaaacctgatgagataattatataatttcttataagatttttttttcttgtaagaatttaacgaatagaatttttctctctattacttaaaattcctcctcgtcaaaaattgcaaatgcttggcagttttaccattttctcagaactaccgtatgagaaataaagtacgtattaaaaaacaatacaagctttaaagataaaagaggcaacaaatttttttgacaaaaaaattagatgaaaagaagtgacgacaaataactgagaaaacacgttttgcaaaactaaaaaaaaaaaaaaaaagagagagttggaaaatgtttggagctggtgggcattagttggctatgcaacgcacggacgcggatacttttcaactcgttgcttacgcggccacgttttcgtcacaaaccgtgtttcttttgcggccttttaagttttaatcaaacatttttgttttcatttgaatcttttttttaaggcggttatacgaataaaatcattaaaaggagaaacgggccttcatgtttaggtttttgttcttcctcatttgggttatttagcttattggttcagcccacaagagtttccttcaatggatagggccttcagttgcatgccatcatcctttcttgtttctctataagccatttttgcaatgagaatttctcaatttcttatttttgcaataaaatcattttgccttagatgatggtggaatcatccgtttttctttattttgacccggtgagtaattgaacgcaaaaaatagtccaattattcaaaaccttacaatttcatatcgccataataaacctaaacatgattcgagtgagcaactacataaaaaggggaacgaaatgttggtacaaaactgaattccaacccaatcaagtgcatactaaactattgagcaaaaacaaagataaaaatcagttcacctaccctaattaaaacatgattaggcctaaaagactataagtaaagataaaaaagatgccattttagagtacgttttggtaaattggcgccatcgtgttatacgtttaaaccgtataacctgaatcatgcagcacgtgtacggctcacattggcccaagcttgattaacaaacaataacgtcattttcgtatttcaacaattttgatcgctcaatcctttcgacctaatttccatattaagtaatttattagttaaaacaacggactcaaccaaattacatattaagagaatatttgaaaattgtctatgtagatgaacatgtatttgaaaattgcgtaagcacactctttctctctctcttttttttttttttttttccccctcttctttctttgaataaagatgacatttttttctgttccaaacacaaaactgcatattgatagtgttattgaatactcaacgtctcttcttccagcttacgtaagtggaacttactttttgccccgtgatccaacagaaaatgacgaatgctccctcaaaatcatttcgtttcaacaaaaatatgtattttatccatagagaaacaacaaaccttacactatataccctcttttaacgtgcccacttttcattatttacacaatttccccaacaaatttaaaacaatttacaaaaagcactcaactttcctaaagtagattcctttagtccaatggaattcttacaacatcttcttcttcgccacctttttctctccactttaagctttttcactctctctacgccacgacgactgtgaagcgagaaatg

SEQ ID NO: 18352 - DNA, 3000 bp, Unknown; identical to SEQ ID NO: 7228
  misc_feature (1)..( 3000): 2750-1469P.txt file - cDNA_ID_1816988; gDNA_ID_1621133; Annot_ID_56514

SEQ ID NO: 18353 - DNA, 3000 bp, Unknown; identical to SEQ ID NO: 7228
  misc_feature (1)..( 3000): 2750-1469P.txt file - cDNA_ID_1816988; gDNA_ID_1621133; Annot_ID_172571

SEQ ID NO: 18354 - DNA, 3003 bp, Unknown
  misc_feature (1)..( 3003): 2750-1469P.txt file - cDNA_ID_1816996; gDNA_ID_1621133; Annot_ID_56512
tttaggtaaatgaaaacagggccatagactttcttccaaggctcaccgtgttcaaaacgaggcatcatggtttttccagcataatgagtactgtgaaacacctgaaataaccattacggaaattaacacttctaagtattatactgaaacattcaccacatatgtcacagggacacttactgcaagagtggttgggccaacatgtgaagtcaggttttgtttgagtggtccgcctgagcggaactcattactgggcgtaatttgccaaaatcctactggtggatcgaaggatatccatccatgtactctcagatccttattctcacacgaatattggtatttatcatctacctgtcagagaagaaaaatgatttagttatctgtgaaacagtatttaccggattcattatttgaagttgtaatacatcacaaaacgagcataagttcataatatacgcattcatgtatcagtaaatgggagaataaacagctcaacaacgcatgagaaagaacaaaatgttgtaatttctaaacgatggaaaaaatatggaactcatacttcgccttgtaggcgtggatcacaaggagcagtgagcagagaagcttcctggtaatctagagtttggcatcttcctttgcatagatcatctggaaaaggcattatcctttttctgtcatctgccacagccatgtaatggaatctgtaaaaaaagaatcgcaacaggaaaatatatgagtatcaaacaactacacacttttgtgtttacgaacaattaaacccaataaatagatatctgacatattgcacaattcttttgcttggaatctatggtactcttcacatggacaggcaatcactaacatttctaactttcttctcttaaggagattagacattacataagatagagaatggggataatattacttgtcttttctgagcttgaaggcaattctagtttctccaagttcaaagccaggccaatccttaagatgttcataaatgccgtatgagtacactccagaagagccacggagcattataaacctgaaagaaagagcaactagtcaatgtctttctctacttttgtttctcgccaaaggaaatatattatgtaagatagaccttttatcgatattcaagggaatgtacttgccctcaagggatggatcccatgttcttagaaatgagatctcaacctgttcttcggtctcgactatgaccctgaaagtcactccactgatgctgcatatatgatatcaaacaatccaacgattagtacacatcatataccatccaacaattagtaccgattatataacatcatatacacaagagaaaaaaagagaaaagcattaaaagagaggattctgatgcagcagtgacagctgacaacttcagttaagcagaggaaacttgttttgagtatacatcaacttaactccaccaatatcgaaaaatcccactaacagatgttgcaatcaatagcacgatgaagacctatagaataacattcctgagctcctaatcctagtgaatgttaaggtaaatgcatagagtgcatacacatcaaatattcccttgcctccaggttcattccagtgcaggtcccagtacctatacattcatttatattatcgattaacttggcttctcacagaatttgaaggaaaaaaagacttttgttctcctctgaagaaagcagtataactaaaatcatatattaaaacatgattcataccctctgttagtctccttgttacgaacttcgagcacattgtcaataccgttatactctatcccagtgataattccacctggctttgacagtgtaacttggaggatcccattgtccatcacaacctgcaccatttccgtctatagtcaaaacacattcaataaaagacacatgaaagggcacattgtcgactgaggacgttgcattacatatcgatcatggacatgcaggtggacaccatgagaggacatcctgtgatccttcctatgactaagaccacttgtaccttgatctgtcccctctgagcctgatattagtgtaaggaaaaaaatcaacacttttgaatgtagaaaaactaaagagattaatatgagaactcctctttacgcagaatgcagcagcacgagatactcaaagtttcataagtgcttgtgtaaaacaagagttttgaaatggtcatagatataggatctgtagaacaggtcttaaaacaaactgaaaaggcgtttatttccgatagtcaagcaaaatggtttatttccgatattcaatcaattgtaactctgtgatcgtttaaagtcccttcctttctggatttatacgtagacccagtgaagggaaatcatctttcaacaaagaaacaaacccaatttgatgaaacaaggaaagaaaaacagtttacagtgtcataaaaaatgaagtaaacaacaaatttaagcttatttactaatccgggctaaaaatacaaactttgctgtcacaatttcgttgagcagcctaaaaaccattctcaagtgagagaaattcaagaggatgaagaaaccatgagaagagaagggtagacgagaaatcacagtggtggccggcgtttaaagcggtttcatgattagtaaaacgatgaaggagccgatcagccagtttcttcatcagtattcgacccaagtgatcaccaccgaagcccagagagagagagagagagagagagagagagagagagagagagagagactgcgttagcgtttgttaaagcgcttctgtgccttggtttaggcacgactgcgtttgtcaactctcaaggcattgcctttgcattcagttttaattcttatcaaccaaaccgaatgtaatttgattttagtttggttttaactccaaaaagaaatctgaaatctcttttattgaaatcaaatataaaagcaagtctcatggtgatcagctcaaacaatcttttggggtttctcttgtctgggtaagctttaaaatg

SEQ ID NO: 18355 - DNA, 3003 bp, Unknown
  misc_feature (1)..( 3003): 2750-1469P.txt file - cDNA_ID_1817011; gDNA_ID_1621133; Annot_ID_56506
ctccctgttcttgtagcgtttgtcttgtagaaccttcttgatggcaacaacctccccagtttccctacatttagcctaccaaaaggaaacataaatgtgcaggggaatggagccaaatcaatagaacgaacatcatgggtcttatgttaaattagctcacttggaaaaccatgccaaaggaaccagtaccaacaacatgttctgatatgtaactgactgtctgccaatccaaaaaaaatctatatgagaaacagttagataaactacattaccaactaacacatacaattatccataaccatccaacctgtcttgattgaccatttcgaccacggagtgtggttctaatcacatgaccaggctcagcaccagccccatcaataatatctggttcactatcctgcaacgtaacgaaaacctcagacactgtaaccaactccataacatatataagctcaggataaagaagtgaagctaaaaaacagttgaataaacatgaaaaaaagaagaagcaatgcaagacttactctctcatcatcggtctctactttgtcccttatcctcgtctcagccaaatctctggtcaaccaatcgacagaactagaagagctctttaaacctttggcagatctcgaagtgcctactccatttcccagtccagaggatgccatgatatatattcagaagataacacgtactactagtaattgatagcatcataaacccatggtgatttcttggtgtcccatcccatcaaagagccgatcttcctagtagaatttgtaggcccatttgcattaaataaggtgtgttattatatctcaagtatcttgatcattagctaaatcatgaacacatacaaaaaaaagtaaacttgtgtaagcactgatgaactttgaactagtggtgaattgatacactgtaaaacctagcccaatagagacagatcagatctactgccgactagaattgatttgaaatcgacaaggtttggtttgaaaactgaaattctatagccaaaagcagctcagaaaatcagcaaaacagttactagtacccagaagaaccctagttcaacaacaactcagaaaaaaagcacattgagagaataaagagcgaaactttggaaaagattcgcagtgatatgattaggtagaagagtaaaataaaaatgatcatcaccttgagctgtcgtgaagaagaactgaaaccaaagtcaagcatttgacgattgtcttttcttcttctttcttcaattgaagagcttcacataaatatataaaatagaatatttctcggtgaatgatcggattgagaaaaaagctaaacctttagattcttcaagcgttaattttgttttcccaacttcttcacaccttctttgtcgatttctatcgttttgaatcaaacgagaatatgagacgacagctcatcattataagcatcatatattaatctttttcttatatttatgtttctataagatttttatttatgcttagttatatattttttccttcaaaaaattaattagaccttgttaaaatttcatactatactttttaatggatgtccccaaatatcataacaactggaactcaattttcaaacctcagcctacctaatttttgtaaccggatattcaaactttttggtgtacaacttatttcaactatagtggaaaatttacaaaagaaaacaacattttgtgattactagaaatcgcttcaaatgtatgtttttgtcaacacattcgagcctccactccaaaatgcatctatatgggatttatattctaatatgtgccttttgatttttgagatacgataaaacaacaatatattcttggaattttctagtgaattaaaatactgttgtagggcaaaaaataatttcaaaaaaataaagccactttcgtatttgctggttattatatagtaaaagtcgcctttacttgtcgacagttaggtaaggcttaacacatcacacttctttttgtgtgtgtggcgatggagattttgtatcgggttttattagtgatattaaagcttaaggatgtattttttttatctgcaattggttttatcataatataagccttctaaatacgaaaagattgatcaaatacattcccgttttcacaaaagtgaagttaattatttttgctttggtgagctctctcgaaaatacacgttaggcatgcacattgctttggttactactactctctggtctccgcgtgatcttatttactaattagaataagcaaaaaagggctaaatgcaataaagtcgtaagtaggtccaaagtgtactgctcatcagcctacacaaatagggagtggtggtcttataacctaaaaaggctaaagttgctttcttttgcttaataaagtatcgtagatatattacccatttaacaatgattttagtgttgaccaaacaacaacaaaacaatgatttacgatagtactgtgtgtatgtagttggattggaagctaaatgtgttaggcttttgattgccattggcctctccggcccggtcctgagcccgtgaatgatgaggataatactgacaagtccgcattttttttattaaacaaacattcaaattttgataatgatcgtttttttatgttaaaaggctttcatgataatgaacgtacttattaacattacattatgtttgtaatgcatatttcacaatatgtataattaaatttagcaatttaaaattttctggtggcaaagttgtggataattctagctacatccctcctatttacacacgtggttcacttcttctgcctcaatcattttgttcggcaatttttcaacgccaaacgctttttgtttaaaacgccaacgcaaaaccagcgttttgtaatcttattggctaaatctcaaaagaaatgggaaaaaacaaatctccaggctattccttatttctaggccaaaactatctccacgattctaacaaacaaaaattacagaaatgtcaatg

SEQ ID NO: 18356 - DNA, 3000 bp, Unknown; identical to SEQ ID NO: 7216
  misc_feature (1)..( 3000): 2750-1469P.txt file - cDNA_ID_1817015; gDNA_ID_1621133; Annot_ID_56505

SEQ ID NO: 18357 - DNA, 3000 bp, Unknown; identical to SEQ ID NO: 7215
  misc_feature (1)..( 3000): 2750-1469P.txt file - cDNA_ID_1817019; gDNA_ID_1621133; Annot_ID_56504

SEQ ID NO: 18358 - DNA, 3000 bp, Unknown; identical to SEQ ID NO: 7215
  misc_feature (1)..( 3000): 2750-1469P.txt file - cDNA_ID_1817019; gDNA_ID_1621133; Annot_ID_172558

SEQ ID NO: 18359 - DNA, 3000 bp, Unknown; identical to SEQ ID NO: 7214
  misc_feature (1)..( 3000): 2750-1469P.txt file - cDNA_ID_1817027; gDNA_ID_1621133; Annot_ID_56502

SEQ ID NO: 18360 - DNA, 3000 bp, Unknown; identical to SEQ ID NO: 7212
  misc_feature (1)..( 3000): 2750-1469P.txt file - cDNA_ID_1817037; gDNA_ID_1621133; Annot_ID_56499

SEQ ID NO: 18361 - DNA, 3000 bp, Unknown; identical to SEQ ID NO: 7210
  misc_feature (1)..( 3000): 2750-1469P.txt file - cDNA_ID_1817041; gDNA_ID_1621133; Annot_ID_56498

SEQ ID NO: 18362 - DNA, 3003 bp, Unknown
  misc_feature (1)..( 3003): 2750-1469P.txt file - cDNA_ID_1817045; gDNA_ID_1621133; Annot_ID_56497
tttacgttcttcgtacgttttgatttgaagaggtgcttaatggcgcttgaccttctacatatactttgtatgaacggctatcttcactacgcataacatggcctgcagtttcatctcttgcttcagcgatgtgatttcttttctaaattagtttctcggtaattgatgatattgagtgacaagatacaaaatactaagaagaaattctaatgcgaaaagagcataagcaaattctgtgtgcaccctcgctctccatgccaatgcagagacttaaaaagactacaatcctctttggcattctttttaagggttcaaaacagatgcctcgagcagtaaatagtttacaggttccaactgttgcgcatgagttcctaaggaagtgacagaaaccgtacaggattgccagagaaaacaattgctgtgagcattctggagcagtagctacaacgattggaggggcaacagtcacgctttctattcctgtaaagacaatatgcaagagatttgtcggtcacactgaatttagctatccagatttcttgaacaaggagcaaaattaaaaagataagcaaatacctccatgggagcagagtcatttgtggccggatcaggaattatcaggccagcaggaacctgtccaaacttcaaagcctatatatccacaagccaaaaaaaaagaagactgtcaaaatcaatcaaaaacaacatcatcaggcacaaatttgatattcaaaagaaaaagcaagggacctgttcgagtctggcaatttcttctatcgtctgagaattgataattgcagcctggaacatcatggaaatgaaatacagaaattactatcaaccacacagcgttgacctacttattataaagacaacaaaacagtgaatatgtttggtcctatataatttccagtttcgcaccttgatagctaatatttgctccgctgttggcgccaccactttcggagtctctggattttctgcagtttctgacacttttttaacctcctcccgagaaacctttttaacttcctcttctgcttctttggatgaaaacaaagatgcagcttcagctctctcctgttaggaaccaataatgtcaggtaaaaggtcttgctataaccattgtaaaatttagatatacaacagtgggctaaaggataaagccaaactattatccgatccaaggctacaaggttataacacgaggaaattaaataaaaacaccacaccctacatcaagtctggtttatatttatgccctaaatacaaaaaactttaagataatcaggcaaccaagtcatcaagacccaaactatatatactttaagcaaacccttttagctaaatgttgttaatattagtgaaatttcttatttcagcatacagatataactgtgcacaagaatcttaaacaacgtaagacaaaaggcagaccaatttcttgctctcagatattctatttttcagatgatattaaggttagctcccggtgacttgtagcatataaaataacattaagttggcatctagggtaagcaaaaatgaacagttgataaagcatatgataaggtccttaccttggctttgattttaatgaaatccagtactcgaagtgattttagcttgtgaatcacataaaggcgataatttgcctttttggtgatattattatccaacaaactaaggtactgcagcttgggaatggaggcaaggggatcaatctcaaccaaattcacaagcctgttatttgtaagaaccaaagagtgaagcttcggtaggaattctgcagatgtacaaccatacgataaatacaacacaggtaaccaacaaagcaaacaatgtgtttgaattgacatttcttacaacacacagatagatgttacctccaaggttaggatttatccgggtgatacgattgttattgatgagtaaagttcctaaacggttgaggtatgggaagttttctagcttaactatctcgttatcagacagatcaatggtatcgaactggtcctgtaagcaaaccaagacaagttaattagagaacctcaaacctgcaaataatctacctaagccaaacacaaaatttatgggaggcctttcttagagaagactggctctcaaaagtaaagaatccacagtaagaaaaaggtactattacacgaagccacatatactcctaaagagctagaaaacagatactaactaagacaaaggagcaatagctacttcaacaatgtttctgtcaatgattttcaaaatacttgaatgccgaaacccaacaggcagacttaagaacatacaatacaaccgcatcaacaaattcttcagctaacagacaaagaggaaacgaaaatcgatagaaaaaagaaatacctcagtagcacccaagttttcgattacaggaatcttgttacctgcaacaaattaacccagaaaaacgaacgattaaccagagcaggtgcgtttagggttacaaaaccctagaaaatgtaatgggaaagagaagaagtgtacctcgtagatccaattctcgctccttgatagcattgaagaagtgaggacttttccagatcaaatcagccgtgagcttcaccattattctactagggttttactgcttcgtcgagctctgtcgctgctaagcattcagaggaaagagacaacaacagtggctagagatgacataaaaacgcagcaaaatgacctttgctattaatttatcacttaaataaacggcccattgaattggcccagtcggttaggcccataagtgtatcccgatatttatgattttggaaattaaaaagaaaaaacaaataaaaagaaaaggactagtgaacgattgaatcttttcttcttcgttggttccaaccctaatctagggttactctctctctcgcttccttctgttcttcgttcttaccgagttccacgagcattagcttcagagaccttgaattggagtgcggttggatcaaaaacagttgagcgaagatg

SEQ ID NO: 18363 - DNA, 3003 bp, Unknown; identical to SEQ ID NO: 18362
  misc_feature (1)..( 3003): 2750-1469P.txt file - cDNA_ID_1817045; gDNA_ID_1621133; Annot_ID_172549

SEQ ID NO: 18364 - DNA, 3003 bp, Unknown
  misc_feature (1)..( 3003): 2750-1469P.txt file - cDNA_ID_1817049; gDNA_ID_1621133; Annot_ID_56494
aggatttggtccagttttccctcaagaagtcaaaattatttccattcatatgcagattgcttttcacttaatgctttgtctattttttaagctttaaaggcttacagtcgaatttccttattaagtttatattctcatagtgttctaaccaaatgaatcatactcataatgtagttcacaatttcccagatatcagacatccagcaaagaatatttttccttataagagcatgcaaatacatcttctaaatgaaaatgggcagaaaaaaaagtaatttttagttagcacttcataataatataagcttactcgaggtcagtattccacacagccgggtatttcacatgcagcgagtttatcttttgttgcttattaggccaattatgttcttttaccgcaatctttaactcctccatgtctggaaaccacatgaagcaatataaaaagttagaagagggaacctctatgttggaaagagtagatgcttaaaaagacagactcttcgttttgcagaaatgaaattcaataagacatctctctcttaaaactcttagccatcattaaacatgaacatacatgaagcggcaattagaaagacactatctgttcggcaaacaagcgaaatcgctaatatagatccatttaaagaattgcatgtaaagaagaattaaatatatctcactaggatatcagttcactttatattctcctttctatttaccatttttctactaaattaaaccaaaatcgaatgaaagcatgttctcgtagaatcaatagataacaaccgacaatgaaaaaaccacagtatcaggtgtctaagatgactaaccaaaaatcgtaatggtacttacaactaacaagtccgctttttacaggaagaattttatgataacctaaatggcaggtatacataccttcatggcaattttcatccttcagtagaactcgaattctgagaatgatcaatccaacctacaaaattgaccagcaaatattgtcagagtgatagaacctatgcccataaagtatccttcaaaataaaaaagtcgacataatgaataactcacattttggtaccaattgtattgaatactaactatgtcttcaactccaaattcacaagaaaatggcacttcttcattatttgcgaggaaactctttattttgatgccattgcatgaaaagattactagggatgcagcacaatgcatatccttaagtataacatactccgaagtcattataacagcggtgcttaagtcaatctgcgaagtggaaaactggaaatcattatctttttgcaaaaaagaatcattaatatcttttggcaaccacatcgttgccaaacaaattctggcagtagttttttaagccattggttaagaaactagaaaactcgttaccttttcctcatcgttgaagcaatgttcagtcatccaatctttcagcgcatataacattgaaatcaagacacggtcagacataggagatccaagcatatctataaggaaatatagagagaaggtgtagcatgtaccttcttcatcatcttctgaatcagaagcttcactcaacgcagatcgatcactcaagctttcatcaatagctgacatcatatcaatttgctcctcctgcaaatgtgaaggggttaaaaatgcaaggtaaaacttataaagtctttagcatacattaaaaacaagatagattaacatacactggatgaagaatctgaaaagggtgagtttagctggcgttgactataagatgaagtttcagcgtaaaaactatttccgcctagctggcaagagaaactctccactctatgatccacatctgtttcttctatgtcgtcttcgctattcaaaccaaacatcaatccatggttatcgtgatctatatctgtttcctttgccaggtcttcagtttttaaacctaacatcaatccctgattaacgtgctctgcatctgtttcttctaaatggtcagtggtttccaaaccaaatgtgagaatcgttctggactccttagcttctgttaccaaagtcgaatcatcttcacattgatgatcgtcagactctacagcagtagcaggctctgcacaacttggaccttccatttcttcttcctcaacacgtttttcattgcagactggcaacaattaaccatttccataagaactcactcatatatgataaaaattatttgcttctgaacaatatagtacaaatcattatagtgcctcccataaaattgtagtatcacaacagcattagtatcattatttctcacatactgcagaaacaaagcaatgttcattcaactatatacaagagtctggaaaactaaaataaacagaagaattccaaggttagcttaacttctctccgtttacaaatatctcaaccccaaaattatttttccacaactgaaactgaagcgagaatttaaatcagcatttgaagtttagagatgaatcagagtaataacttacagctttggatgcgttggcgttgcagaaccggagaattgcaaggactagggtttgtgaatttttccaataactttccagctgcagactcagcgagctcgtcctcttctttgaaatcgaatacttcaaagtttttcttcatcgctagggaaatctgaggaaaagccccaccggaaaacggagaatccaagccggagatcggcgatcagaaatcgagggggtcgagtgagggagaaggagagagagaaacgtctaaacgaaataagtcaacaacgaatgccagcgcgtctgaaactcacgcgcggacgtaagtttactctatttataatagtacgtaaataatttaatattttcattacataattcggctatggaatgacaggtatacccttttgtaagccgcgaatttaaaaatgggagacgtgaaagccatcgtcctcttgaactttccaagagttgaagaaaatcacagaaagccttagcacagagaagagagattgaagaagtcatg

SEQ ID NO: 18365 - DNA, 3003 bp, Unknown
  misc_feature (1)..( 3003): 2750-1469P.txt file - cDNA_ID_1817056; gDNA_ID_1621133; Annot_ID_56492
cagatttggcgttgtctcaattttctctgtctccacactcccaaatgctgcctcctttaacccgttcatgcatgaagaaggttccagatttggcgttgtctcaattttctctgtctccacactcccaaatgctgcctcctttaacccgttcatgcatgaaggaggttccagatttggcgttgtctcaattttctctgtctccacactcccaaatgctgcctcctttaacccgttcatgcatgaaggaggttccagatttggcgttgtctcaattttctctgtctccacactcccaaatgctgcctcctttaacccgttcatgcatgaagaaggttccagatttggcgttgtctcaattttctctgactgatcgttttgacaatgatcagtaggttgaggagggatgataatatcttcaggatttttagctactgtgcgttttcctttctgagctttcttcttgaactgagccttcctggctttaagagtcttgacggtttctttaagcgggatagctgcctgtattgtcttcttctcacaaggaagtacagtaagctgagtgttgtagttggcaaggttgtttttagtgtctgactggatcgctaaaagagcagttctcccagcgctaatctcagcatcttttttagttcttgttgcagctcctgtgtactttatgcctccaatctctacagtacatgtgaattgtgtaactctcccaagagtttcgaccttctggcactgatacaatggaatcgcgtaattcatcttttgagcgtattcttgaagtaggttcttgcataatcccgtttcgtgctgcattaataagccattcaaagttagacaagagcaataacttacagaaacagcctaagaatcttccctctagaagttggcaatacacataaatccgataagacagaagacactttattaatgagtggattctttaaactcttgaatctcgatcattgtccaaccaagagcctagacaaatacagaatgccccctaacgtattctcacagctcccctttaaaccttcaactctgaaactaaccatgagcttccctttaaaccttcaacgctcaaactaagcataaggactactgctgagatggcaaagctacaattcgctgctaaacccctaggctaggttcaatagttttgcagtgaacttaacaataatcacgagcgaaataagaaagatgaggtgcttacaacaggttgtgaaacacattggcttagctcactggattttgctaattcccggagagcaacctcggcagctgattgctctgcagccttacgattgaagaatccaggcaaagaattatatctgacaccatccagtatcacagtcgattgaaataaagatttgtgtgaagggccttctttaacgatctcataaacaggcgttgggagcttgtacttctgagcatactcctgcaaccgacttttgaaaacatagcaattggaaacacctgagcaggaaaaaaacttcaaaatgaggcaaaagataaaacagaaacagtgatgatgctatccactacagcataaattgcaaataaactcaaaacgacaacagggaacagcagtgaacgagttctgaataaagctgacgactttcacaaagaaactatacttatccaaaaggggagagacagttttaaaccaagcttctatgttccctaacaaattgagtcaataaatcatcatctcaaaagagtaaacttgccaattgccagagagatctacgcttaaacccacaagggacagatacacttgtaaattctaactaatcaaaacactgcaatccaatttccaagaagaaagaagtgagtaaagaacagaagaaaggggaaaaagcatgatctggtttcaaaattaaaacccggaaaaaacaacccatgaatgttgaattagagataatgcagacatgatggtgaagaagaagaagaagaagaagaagtaattcaccagaggaaacatcagtggaggtcattttcacgagcagaatgtagctgaagagacgaataataggttagtagggcacggcgaagagcaagaaagaaacgtgctgctgctgcgaagaagcagagagagagagatgattcttcttcaccaaaaaccctctcccctcgacttcctcctctttactgatttttatttttgtttttttttcacaagggcaaacgaaagaaggtggttcttaattgttatgttacaaatgttaatattgaatttaatttcaaacctttataaattatattatattccataaatttacctttttggtcaaattttccataaatataatttacttgtgaatattatatgaaagcaaaatgtttttatctttgaaatatttaatttaattaaaaaactaattacatatagcctaatttcgtatttcatatgtagttaactaatgtatatatccacaattgattaacctttttatggctaactttattcactagtaatccctttgttatattcacacagtttttgtattcacaaataattaatttgttctccaagtaaacatcaataatgataataaccgtttaataaaaaataaaaacaatttgagcccatatttgagcccacttgagcctatgtcccttaacagaaaagaaaaatatttgagcccatatttgagcccacttgatcctatatccctttaccagaaaagaaaaatatttgagcccatacttttcgcttctgataagcgtagaataataatagtcgaatttaccaccttccttttcgttccttttttttcttctctcttccgaaacacctctgccacgcgagtactctccacgctcttcgacagtcgtgaccatcttcttctccgatcgtcttcaccggttttcttgggcattccctcgtgcgtaagtctctgtcgtttcgtttcgtctataactccctcgggttttggtgaaatttgattcctttgtcctgttctctgcagaattgttgcaataaatacgacgaagatg

SEQ ID NO: 18366 - DNA, 3000 bp, Unknown; identical to SEQ ID NO: 7204
  misc_feature (1)..( 3000): 2750-1469P.txt file - cDNA_ID_1817060; gDNA_ID_1621133; Annot_ID_56491

SEQ ID NO: 18367 - DNA, 3000 bp, Unknown; identical to SEQ ID NO: 7204
  misc_feature (1)..( 3000): 2750-1469P.txt file - cDNA_ID_1817060; gDNA_ID_1621133; Annot_ID_172542

SEQ ID NO: 18368 - DNA, 3000 bp, Unknown
  misc_feature (1)..( 3000): 2750-1469P.txt file - cDNA_ID_1817067; gDNA_ID_1621133; Annot_ID_56488
atgaagtgttatttattacaaaggtgaaagttattgaatcagtgaagaaatcatattttgttaacgactacaaagaaataagccaagtcatcgttttcaactcttacatctttagccatttatgtacatctggacccatttgtttgttctgttaacgacaaccaaaagggaaaccgacaactgaaaaatgtcgcaatattagattagggatgatgagtaagctaaggtaccttttgtcgcctaacgttaagcccaccttgtcagaaacagactctaaagcttccttccatttcttgatttgttctccactcgaagtcttagccaacctccagaagttgcgaccaaactcagccttttgatatctaacagactctgccttcactttaaagaagataggaaccactcgtagcttgcatttatcggctcttttcttgatccttgcaagctcgtccaggcaccagcttgactctgcgtatcttttggaaaatatggtgagagccatcctcgattgcttgatccttgcaaagagatgtttgaggtctttccctttttgttcgtctttgtctatgaagaagttgattccatgtcttttaaaagcgtcaacgaggtggctcacaaagctgcagcgtagctcctctccccggaaattgatgaacacttggatcttcctattactactactccttttcatgttgtttaatttcctttagttgtgagcgtgagcaatgaagagaagttggttagactttgttccactcttatacaattttgtttggacagaagacaagttttgtaatgtaatatggaacaatggttactaagatgtttagcaagagcttaatttatagtatatgatattgggatttgggagggtttaggtacattgttaatgttaggtttatcgatattactggagggaaggcgtcgttaggaactttgtcattaactttcttgagttaacatgcgtaaatgcagtggcggacccagaatttgattattccaaaaattggacagaggaggaagaaaagtcacaatcccaaacagttaatacaagatcgtagaaaagcgtttttggcgcacgtgcgcggagagagaaagcagaagcagacctcacttttctttttttcttggttttttcttgtctctggatcctcattgttgttctcaccaccacctactagctactacccacatttttccccaatgtcgaacttctatccgttttcttctttggttttaggtctttctttttggtagttgtactacaacatgtatacttttaatttgcagcaaacatgaaacttctcctttgtcagcactcagccttacggaacaacatgtacccctaaacaaaactctacatgacctaggggatttgaaacatcccaagaaatggatttttttttttttttttttttttgggctgtgattgttaatgaaaacctttttatgtatacatttgataaagtaaatactacatatattctagtagaataataccatttacctaatatactgaaatttcttgggatgtttcaaatcccctaggtcatgtagaattttgtttagggttacatgttgttccgtaaggctgagtgctgacaaaggagaagtttcatgttggctgcaaattaaaagtatacatgtgtagaacagctaacaaacagaaagcatagaaagaagggaaccctaggataaagaattaaaaaggggaacaaagatttatgctgtttcttctttatttctcattggcaaaacggcagaatcttcattaagttgcgttttattattttttccatttcttatagtagccaacttccaactacaccatttaacccggccgtttttttttgttgctaagtaataggtaaatatcctattaatgaaaattatgatttacatgaacaatagctaagatttaggatacaaacaaggaagacgatcaaggatcttgaagatagaagtaggcgcaaatgtgttgtgaattatgcagcatcttatttctttgcttccaagttgtatataaatcacggcttgagtaactagcttccttagtgtatatgtgactgcatctatcatatacagtatgtgtgtaaactgcgtttggtgtaaaatgtaattataatttatagaaaataaattaaagtagtggaacatggaaatcaccgttcagatattctaactgattcactatagacggaattcttgttttcgtccattgtttttactttttagaatttttaagtaaaataaatcatccattacatcactgaggtgacatcatcgctcaggggacatcactaactacgttcccactaaaaatataggcaaatgcaatcaagtgaatgatgatgacctttcaagagttcgtagagataaataaaataataaatatttggcatgttgaggatcaaatgaattagatgcataagaaaggtactaggtagaccaggcccggcccaatgtgttttgttgtctaaagcaaaacaaaaaaaattaagcccattaaagaatagttatattgcctcggaagggctcgaatccatcatcttcatttttttagtttacacggattggaagtaggctacaatgtccctgagggaaggtaggcccattattagtgacctgaagcccaataataatgaaaacgcaaagaaccttttaagaagaagatgacagaatctctagagaataaaaaactaaacacaaaaatagaaaatatcgaaaatgagatgagagagagaggaggagtctctcatcgtgagtagggcttttgactccctccctactttgcctacttcttcttcttcctctgtggccactctacacagtccacacctacttcaagacacctttctcatccttgagatcggcgtcagatcctccgccgcttctcctcttcactatctccggtcacaacttgtttttctctgtttttctttatctctactttatgcacaatctgactttctaagtggatttacagtgttaaagatgatg

SEQ ID NO: 18369 - DNA, 3000 bp, Unknown; identical to SEQ ID NO: 7211
  misc_feature (1)..( 3000): 2750-1469P.txt file - cDNA_ID_1817074; gDNA_ID_1621133; Annot_ID_172530

SEQ ID NO: 18370 - DNA, 2300 bp, Unknown
  misc_feature (1)..( 2300): 2750-1469P.txt file - cDNA_ID_1817082; gDNA_ID_1621134; Annot_ID_56532
ttctcaatctgaaaagtgccatcaaaatgtttcaaaaaccaaatcgagaagcaaaacaaaagaaatatatatagactcacgagctcgatgtgcccttgaggaaagtaataaactttttctccaggtttcggaagaacacacaaaggtccagcacatatgttccataatttctcatacatataagtcttggttatatcaactagtaaaacgaaacaaaatatatggttgtttcatatttaatatataaaataagttcagacaaaatatatataaaaaaaaatctttacttatgcctgataattcaggctgtgcattcatttctccattattttccatgagctcttattgcaaagatcgatattctgtgaatcataaagcaagaaaatcatcaaaatctttttttttgttaagagtacacttattgacaggataaaagataaaaagtaatttttgtaatagaaaattatatctttccatcacaaatgagaagaaattactacaaactattaaactattttaaaaatcgtatatgatttgagtgaaaaaatttaaattagggattaaaataccaggcagactatttttctctagatccggctaccaatcacagagtaattttttaatttgatgtgtagttgatgtatacaataagcatgtatttatagagaattaagaccttattaagtcaccaaaagatatacataataaagctaccatattacacgcaagaaattaatgtattttgggaaattaagaacctactaaaactccacggtcaaagaagcccaacagttgtttaatgagttttacaaaaagtaattagggttataggttattattaattttgactcgattagatggaaagtggaaacctcgtaaatattgattctattgaattaatatatatctataactatatatattctatctttgttcatgctactatctttttggcttaatctgataatttctctattgttttaattagttcttagtgtccagaatcttttgatttcgacgatgttgtttatttctctttttgttttccattgtttgtaattaagattaatttttttttagcgtgtttgcttggatgcttattactagttgtcgaataactcctcattttgggatgaatccttctctaatgttgtttaccagtgatcagaatccctcacaaaagctctctggagaattgaacgagttcttcatggatttttcgagaattttccacatgacaagaggtgaaaattaaaacatcttctacaactgcatagagaacgttgattcacatgtcgatttttcttttttctcatccttgatcttatagatttgtgagtcttcataactaaataaatccatatgtttttgccacatttaggtttagatgtcttgtaatttttgtccttttttgtttgtctcctagtttttgtttagaataagaataaagttctatatgcataggttgttcattccattaatcgaatagatcgtttgccgatattcggtcctatatagctatctcgtcttcaaagcttactcttcccgtctttggattattcactctcttcatgggagctgcaagaattgcactctattatgggattttttaattttttcggttggaaaatatattaacaattgtaaaaaaaaaaaaaaaaatcttataatgaaaaatatgttactttctacaataatattaagactttcataacttctaagcactatttatatactttcaatacctttatcaaatactaactaatatatcaaatattattaagttattatgaataatgtaatagtaaattatgttatcttacaaaatgtaatcagtcacataaaatttattgaagtgaattgatgctacaaatttatattgtacaagtttttactctacaaaatttattttatttgattttatacgattattttattgtaagtttgaaaaatagtagtgagtggtggattcaacatttagttcctttgtaacaacaacaaattaacgaatattaaaatttatcagtttggcccctttgggcgtgtaattccaaaagcccagtaagattctcggaaacttcgttagtcagaaaaaagctgacacatataatcacaaacaaaatcatttttttgactctatccaaaatctatctaccgccgatcaaaaaaccctagaatttcttccactgttatgtaagtttgatcttgttgtctccactaagaggcgaagagagaaagagggttttaggttgtgtgttctgtttcaaagggtttacttctcgttgaccccgatcgagatg

SEQ ID NO: 18371 - DNA, 3000 bp, Unknown; identical to SEQ ID NO: 7246
  misc_feature (1)..( 3000): 2750-1469P.txt file - cDNA_ID_1817086; gDNA_ID_1621134; Annot_ID_56531

SEQ ID NO: 18372 - DNA, 3000 bp, Unknown; identical to SEQ ID NO: 7246
  misc_feature (1)..( 3000): 2750-1469P.txt file - cDNA_ID_1817086; gDNA_ID_1621134; Annot_ID_172611

SEQ ID NO: 18373 - DNA, 3000 bp, Unknown; identical to SEQ ID NO: 7245
  misc_feature (1)..( 3000): 2750-1469P.txt file - cDNA_ID_1817106; gDNA_ID_1621134; Annot_ID_56526

SEQ ID NO: 18374 - DNA, 3000 bp, Unknown; identical to SEQ ID NO: 7250
  misc_feature (1)..( 3000): 2750-1469P.txt file - cDNA_ID_1817106; gDNA_ID_1621134; Annot_ID_172600

SEQ ID NO: 18375 - DNA, 3000 bp, Unknown; identical to SEQ ID NO: 7244
  misc_feature (1)..( 3000): 2750-1469P.txt file - cDNA_ID_1817125; gDNA_ID_1621134; Annot_ID_56521

SEQ ID NO: 18376 - DNA, 3000 bp, Unknown; identical to SEQ ID NO: 7243
  misc_feature (1)..( 3000): 2750-1469P.txt file - cDNA_ID_1817132; gDNA_ID_1621134; Annot_ID_56519

SEQ ID NO: 18377 - DNA, 3003 bp, Unknown
  misc_feature (1)..( 3003): 2750-1469P.txt file - cDNA_ID_1817134; gDNA_ID_1621135; Annot_ID_56557
ggacgaaccaagggctcaaatctctcttttgagaaatcaaaactctgtactgaaacgggtttatgatttgacttattgtaagctatccaataaggagttccttgtaaacacacactcgactatggttatcaatataaaccattagaggtcttatcaacagccgtcttccaagaatcagatttgaatgagtaaacttcaaccgttgaacttaaatcagattcaaactcataaaatgtaattcctatctgtttcttgaatttgaaagtaaaaaaaaaacataaaatatccaaagatagaaactgagaaatccttaaaagaaaaaccgaaaatgttccaaacaatggagccagcttctttgttcttattctcatctcgaaaagcctggaatctgaagcaagctctgaatatagcagcaatcactgagcatgggaccaagaccagtgaagtattcaaatcttttgaattcttgattctctcccccaatgtagatgctaatattcctgcttttgatcaataatgcaagcctaccatttctctcaatgaaggaactgaaatattttccatatatcgcatcttgaggtacatcaactgtcatcagcctgctccaatgctgcttcttcatcacccataagtgtaacttacatgtttcgtggcattcaagtaacaaagaaagttgatctcctctgaaaatccctaaagagatatactttaccaaattacgtgacccaatggattgaggaggaagaaacaagggctcaaatctctcttttgagaaatcgaaactctgtatcgacatgagttcattaccagatttattgtaacctagccaataaggagttcctcgcaaacaaacacttgacaatggcaatccatcgaatccaccaaagtttgtatcaacaacaaccttccaagaatcagacttgaatgcgtagacttctacccttgatgaatttttaattccacaacgaaatcttacaactttgtaatcataaaaacctgatgattggttaaaaaggtatccaagaccatacgcgtccatggaatggtcaaacccttcgctacatttaatccatctcttttgactcaacaacggattcgcaaccaaaagcatacttttagtgacgtatagcaatagaccgtcacaatgagatatattgatcgctggtgaaagagctattggaaaaggcaatttcacaccacaattttctggtttgttgaaatcgatacctacataagaagttgtggaaccgaacaaaggagaaactatgtgttcgttgttaaagactgtgaattgttgctcacggtaacgcatgtgagacaagtgcttgttgacgaatctcggctctgcgattagggcttcccactgcttgcatgtggatctcaatcgtacaagagatctcgctggaacccgtgagagtatctcctctaccaaatcagacgaaagatccattgtagccatcgtgatcagtagttttttattcttctttaaaagggagtttgatgggatcggccatacgaagatctaggagattatgatatttgttaatatcttcgtttatgaatcatgattattcatatttatctctaatttttttatttttatattatgtttattttaattagtaaaatgatttgacatttaaatatgtaaagtcttggataaatccaaaatttaacaacaagtacaatgatcctactatattatttgggaagtacattttaaatataaccttaatttttgtaagtaattacataggtatgccattagaaataaaattttaaagagtaaattaatttatctctttaaagattaaaaagtcaaatactaatttaattaatgaaatttaattaaaaacgaaatacattattaattttcaaaaataataaccaatcaaaatcaacatataagatttgatatctaaatttaattctaaaactaacttcagtatattattattttcttacagaagtacaatccaattcattattactacattatcattatcatctaaactgattctaataaaactgatggttcttattcataaatacaaaagtcaaaaggtatatatcaaattagtaaaactttacgattttaatattctaatacgagttgttaaaaagaacgtctagttccaaacactatagtttgtatactattttctaagtaaacaaaaatacagtcaaaattataactactatcatatgtcagctagctaaacttattctcatgattataatgaaacaattaaatatgatttttttttttttttttttgtcgtaacagttaaatatgaattaacaaaaaataactgtagtgttatatattactaacgtacacaaacattttttttccccattaaaaaggggtaattgcaaggccgaatggcttatgacggctacaagcccaaacacaaaagaaataatccagagcaaaaatcagaaaaggcctcaggcccaacaagctaaggtaagagcagagaataaaatgaagaaatgaaatgaccaaaatgcaaggattagttgttcaaaaaagacgactagatatagttgcccactggcactgagccactgactatagtacttttttactcttcaacgtatggacaattcctatttgaaaagtagccactgacgatagccactgactataggaatcatactatggacaatttctcactattcatgctttgtttgttcacaaaaaacgatgagttccaataaaccctattaaataacaagtagaactagttccaataaacccaaaatgcaaggacaagttgttcaaaagagacgactagatatagttacagaaaactgactataatatttttcacgtttcaaatattttttgtttcaagtattttttacttttcaacgtacacaattatgcaatcaaactattcacgctccaataaaccctataaataaccagcagaagatgagttaaaaatcacaaatcatacactttcattttcatacatgagcaatattcaagaaatg

SEQ ID NO: 18378 - DNA, 3000 bp, Unknown; identical to SEQ ID NO: 7261
  misc_feature (1)..( 3000): 2750-1469P.txt file - cDNA_ID_1817144; gDNA_ID_1621135; Annot_ID_56552

SEQ ID NO: 18379 - DNA, 3003 bp, Unknown
  misc_feature (1)..( 3003): 2750-1469P.txt file - cDNA_ID_1817148; gDNA_ID_1621135; Annot_ID_56551
aattaatggtttctgttagagttcgattgcagaaaggttgatagaaataaagattcatataaaaggcatcggaaaattatttgattaacgtttgtttcgatacgagtatactataagtttgatagaaatgtgccaattgatttaaactcattagtttcattttcatactaaaagtaaaagcattattagttaacataatttttgctttacaactttagttgatgtgacgctcttcttaaatcttaagcatgtaccaagagttgtcaatttcctcttttaacatgtttcaattttgatcttgtagttggagttggtatttctataggatacacatattggataaaataagagatacaaattgcaagttacgtgctgtgcaaaccatatccacatactaatctttgtaataaccagaatcttatgttggtagtcagtagtctatattttttctcgatctcatccatattcggtcaaagaacactcaataaatcatttacttgcatataaagatcaatgatttccctttttcaaattagatattaacagaaattattattgttatattattacaagcttaatattttggtatgcttacgtatgtattattatgtacctaatcggctaagatctttgtaagaaaattagttgagtacgtatattctttttcttcaaaatattaaatatatccatgtcaccatgtgacatcgcagacgaaatgactcgttgtttttcataattgccacgatacgactgccatatttccaacatatcttaactgttagcattggcacgaatttaatgcaatatcttcaaaatctgtaaacaaaaaaaaaaactacatactataatgtagtgttctttatctacgccaacaaacccaaaagatatctttgatttttatttttttggttggtttcccatccgtttatcttcaaatgaaactcgtaagagatttaatttaaaagtagtattgtgatagattcttgttgagatttaaagaagggttaaattgtaaattagtcactttttcaaacttaattagaaaagtagtcactttactattcataatttgcaaaatagtcatttttcactgtttgatttgtaaatttagattgtacatcacttttagtgtacaaatatatataaaaatacacagtgtacactttacatttgtacactaaaagtgatgtacaatccaagtgtacgaatcaaacagtgaaaagtgattgttttgcaaattatgaatagtaaagtgactactttcctaattaagtttgaaaaagtgactattttgccaacacaccctttcaaaaatcggggaggtttataataaaataaaatatatctaagagacataattaataactacagttgctttaagaatacataatgatacacgtacgtcgaccaaaaataagagcttttttacccacacagtcgcagaagatacttagaacgaaactaaaatattaaacgtaacaaagtgtcaaaattggaaaggttacttttaattgctctgtgattgtgtagtagtgtctggacttaatttccgggaggaagtacgttaaactcacgtgttctgctttgatttccgcgttcggcgtttcattccacaagtgttgtcaaaaaaaagacaagatgtaaatttttcaattatcattatcattattgttatcgttactaatttatgactagttttctattttctaattaatatttttgttgagaaaattttgcgacaaacaattgtcaaaagaacataattagtaaactgtgacaacgaactttttcaataataaaaaaaaaactgtgacaaccaagagtgaaatgctgtgattagaacttgtatgattgttgatcaaaaagaacttgtatgaaaactgttgcttaattagagaaaaagaactgaaatatctgttttggcaaaaaaaaaaataaaaaaaaaattgaaatatacttctctgtttctttttatttgatttttcagaaaaaaaaattgttccaaaagattgtttttttaggtttttaatgcaatacttattagttataattgataaattataaaattcaatacaaattattgaatattattggtttatagttattgaaaattgtaaaccagaaagaataatatatttaaaagtaatatttaatatgatttcttaatatttctgtttttcctaaaagatcaaacaaaaaataacaaaggaagtatatcatttgttgtgtgaatacttaacaagacctatatttaaggaaaagagaagtttgtgtaaaaaatttataaatatgtaatatctttatacgttatatatatatatatatagatatgtatgtatttataactagttttatagttgcattaaagtatatgctacaccatacgtttttaattaagtttatgatttaaggataaatgattaatttgtgtatttgttgaagttcgtggatatcaagccggtggtcctgataaataaggttatgaatttataatcgcactttgcaaattatcgggtacaatctgctaaatgattcaatccggcacatcccatcacaaggcttatctggagtaacttgtttccatgtacgtactagctagtcatatcggtaggactcatatgactctatatatatattgatccaactattcaattttagttactttttagcctaaagagtaagatacgattaggatcggttcaccacatgccaaacatgcaaacgcctattttgtgtaaacattttatataattttcacgaaacggatgttatgattaaaaaaagaaacaaggcttattttcctctttttcagctttgttttttcttcaataatttaaaaaatagcagacacggcaaaatcgcctttatattacacctactctctgagccaagtcgcagaaagatacagacttaaacgaagatagagatagagagagagacgaagttttgtttttattttttcataaatatttgttttctttttggatatttaaaaaaaaaatg

SEQ ID NO: 18380 - DNA, 3003 bp, Unknown; identical to SEQ ID NO: 18379
  misc_feature (1)..( 3003): 2750-1469P.txt file - cDNA_ID_1817148; gDNA_ID_1621135; Annot_ID_172641

SEQ ID NO: 18381 - DNA, 3003 bp, Unknown
  misc_feature (1)..( 3003): 2750-1469P.txt file - cDNA_ID_1817171; gDNA_ID_1621135; Annot_ID_56542
ggcgtcggtgacgtaatcaacggagagtccgtattttcggatcatgtttccgtagccaccaccgctaatgtgacctccggctccaaccgtgggacaaactccggcggggaatccatgacttttggttttttcccaaatcctgtagtaaacttcaccgagtgttgcaccggcaccgacccatgcagactctgtggcggggtcgacggtgatgttacggagatttgacatgtcgaggacgaagaaaggaacgtgagagatgtaggaaacaccttcgtagtcatgaccaccgcttcgagttttcagttggatgtttagcgatttcgtgcagatgacggcagcttggacgtgactctcggaacgcgccgcgattacgatcgcgggtttcggagtcgctgtggtgttgaaacgcgcgttacggatgtaagcgcgtaagacgggggtgaaagcggcagcggtttttggtaaaacgacgtcggctaatgagttaggaggagcttttgtttggtttgtgaaacattggagaaagttttggtagattgtttcaggcggaggttcgacggcaagagaagtagagatgaaggaggagattaagaagagaattaaacaaaagatcttcatttttttttttttgattggattctatttggtgttttctgtagtataaatagttacatgtagtctttaaatttctgttgtgattcttatcgttggccatttttaggatttgttgtattggtcaaggtttctcctgttttttttttttttaatggtttaattgctcaagattttaatatagtcaagttaactatagaaagatcacaagtttcagaagtcaagttaactttagagattttaatatagtcaagttaactatagaaagaacacaatttgtttgaaggcattgtgagaaagataaatttttagaggtattggattaggttgttttgggaagagaataacatgtctttcaacctttatcttccttttttttgagggatcagttatttttgttttcatattagaacttgagatattaatgttctataaaacggtgaataaaagaccaaaaatgttttatactacaaaacaaaattatttttgattcaatctagagaatgaaaaaaaagagttacgaccatgacaagttatttgttattcaaaataaattttgttgaaaataatttaatgttcagaatatttgttctaaaatacatttagaataacaaatcttgaagcgattttacacttcgttctaatgacattaacaaactgaaaagatatacaaatataacgtttagcaatctttttacaaaaacataaggttatacttttcagctaataagagtagaagttattgtaatgatttgagaacaacatgtattttcgtgatgctactaaattaatatgttttgagagtttatgaattttgagagtagtgttgttatatgggatctgaagcatccaacatagcgaaacatcattcgttccatttttttcggtggcattctttcgaatttgcgtcgagtgtcacttttctatctacataaaccaaaattctaggcactgaatgtcaaaaaaaaaaaaaaaaaaatctaggcactataataaatgcaaggaggatgtatagctgatatatgatcttacaaacaaaaacacttcgaacaaaggcgagaacaagtaattaagcaatgtcaagagcttgtggcgcaaacgtaatgtttttttaataatggcatgttattttttgttcttgacgaattccttaaattgacatgaggataacatgcacataaacaaattgtccttctttgaatcattctgaaacttctcccttacacttttctttgaatgtaaagagtgattcttacatgaaaacaaagagtaataataatactttacaactatatcaaatcaaagatttgaataagcattttataaatattggataaacataggagagttttatcaacatccctaattccaatcatacatcttccgcatacggtgtatcaaagtactgtgatagatcccatcttcttgagcaacataattatacgagccaccatgaggcattctcttgtcttgaacatatgcgtcaaacttcttttgtaccttgtaatcagctcctttatacattgtacaccagaaaagtgtttctcccataacgtcatcgtggaaactaaaaccccaatcttctccaggtttcatatatctttcacgaacatcattgtccccagatttacaacgtaccttgagccatttgttgtgagaaagactgttcctgaataacaacgacgtcttttttcctttaaatggattcgaatggccatatgcattgctaatcatgcatagggcaaagacaactagaaagattgaagtatttttcattttttctttctagatgcttagaggttttgtcatcggagtaattttttatttacggtattgtatatatagacatatatgtatgctatttttgaatttacgttcttattatatattgctctcttattattagtattttctattaatgatttgcggtatcaaatcgtttcaaacacaacaatagatatggatggttgagtggagaacaatatatggatttagatctttgagtaaatatttccaaagaacatttgttttcaacacggacagtaatttgacgtgatacatttaccaaatactacctattatattctgccaattcgttacaaacagataaataattcgattagtatatacatatctatcgtttaattgtgataactttattattatattaacactaaagttgattaaaatcgtcttgatttcgattagatgttttattttataacattaaacacacatatttaaaagatgagaaattaaattgtatgtatatggaattttaacattaaaaaaaaaatccaaatgaccaatccggtttatgtcggtccggtttgtattaaccaatcttaatttcaatttttaccatataaacctaaccagactattacaatg

SEQ ID NO: 18382 - DNA, 3003 bp, Unknown
  misc_feature (1)..( 3003): 2750-1469P.txt file - cDNA_ID_1817171; gDNA_ID_1621135; Annot_ID_172628
ttaggaggagcttttgtttggtttgtgaaacattggagaaagttttggtagattgtttcaggcggaggttcgacggcaagagaagtagagatgaaggaggagattaagaagagaattaaacaaaagatcttcatttttttttttttgattggattctatttggtgttttctgtagtataaatagttacatgtagtctttaaatttctgttgtgattcttatcgttggccatttttaggatttgttgtattggtcaaggtttctcctgttttttttttttttaatggtttaattgctcaagattttaatatagtcaagttaactatagaaagatcacaagtttcagaagtcaagttaactttagagattttaatatagtcaagttaactatagaaagaacacaatttgtttgaaggcattgtgagaaagataaatttttagaggtattggattaggttgttttgggaagagaataacatgtctttcaacctttatcttccttttttttgagggatcagttatttttgttttcatattagaacttgagatattaatgttctataaaacggtgaataaaagaccaaaaatgttttatactacaaaacaaaattatttttgattcaatctagagaatgaaaaaaaagagttacgaccatgacaagttatttgttattcaaaataaattttgttgaaaataatttaatgttcagaatatttgttctaaaatacatttagaataacaaatcttgaagcgattttacacttcgttctaatgacattaacaaactgaaaagatatacaaatataacgtttagcaatctttttacaaaaacataaggttatacttttcagctaataagagtagaagttattgtaatgatttgagaacaacatgtattttcgtgatgctactaaattaatatgttttgagagtttatgaattttgagagtagtgttgttatatgggatctgaagcatccaacatagcgaaacatcattcgttccatttttttcggtggcattctttcgaatttgcgtcgagtgtcacttttctatctacataaaccaaaattctaggcactgaatgtcaaaaaaaaaaaaaaaaaaatctaggcactataataaatgcaaggaggatgtatagctgatatatgatcttacaaacaaaaacacttcgaacaaaggcgagaacaagtaattaagcaatgtcaagagcttgtggcgcaaacgtaatgtttttttaataatggcatgttattttttgttcttgacgaattccttaaattgacatgaggataacatgcacataaacaaattgtccttctttgaatcattctgaaacttctcccttacacttttctttgaatgtaaagagtgattcttacatgaaaacaaagagtaataataatactttacaactatatcaaatcaaagatttgaataagcattttataaatattggataaacataggagagttttatcaacatccctaattccaatcatacatcttccgcatacggtgtatcaaagtactgtgatagatcccatcttcttgagcaacataattatacgagccaccatgaggcattctcttgtcttgaacatatgcgtcaaacttcttttgtaccttgtaatcagctcctttatacattgtacaccagaaaagtgtttctcccataacgtcatcgtggaaactaaaaccccaatcttctccaggtttcatatatctttcacgaacatcattgtccccagatttacaacgtaccttgagccatttgttgtgagaaagactgttcctgaataacaacgacgtcttttttcctttaaatggattcgaatggccatatgcattgctaatcatgcatagggcaaagacaactagaaagattgaagtatttttcattttttctttctagatgcttagaggttttgtcatcggagtaattttttatttacggtattgtatatatagacatatatgtatgctatttttgaatttacgttcttattatatattgctctcttattattagtattttctattaatgatttgcggtatcaaatcgtttcaaacacaacaatagatatggatggttgagtggagaacaatatatggatttagatctttgagtaaatatttccaaagaacatttgttttcaacacggacagtaatttgacgtgatacatttaccaaatactacctattatattctgccaattcgttacaaacagataaataattcgattagtatatacatatctatcgtttaattgtgataactttattattatattaacactaaagttgattaaaatcgtcttgatttcgattagatgttttattttataacattaaacacacatatttaaaagatgagaaattaaattgtatgtatatggaattttaacattaaaaaaaaaatccaaatgaccaatccggtttatgtcggtccggtttgtattaaccaatcttaatttcaatttttaccatataaacctaaccagactattacaatgaagaagaagaagaaagaaagtgacacaaatcggactctccgttcatcgccggtaagtttctcctctttatctccggcggttttgggctgatttttttagattctgtctaaaactgctctaatgattcaattccttcacgagtttacggattctatgccgtgaatttgaaccctaggtttgcgaaagcaatcgcgagttttgcaatttcgttaaatttctgtctcaaagatgtaatctttttgatcatttagcttccattgctaccgtagcatcttattctttccctgaggttttgagttctctcattctatgtgtagcgttaacgagaacgaattaagattttttgaggtttttagggtttcttatttccagatacttttgctgggatcttacttgattccttttgcagttttttcttgtttaacttgaaatctcatgattgatacttggtttgagcagttatttgaaggggagggatcaaatg

SEQ ID NO: 18383 - DNA, 3003 bp, Unknown
  misc_feature (1)..( 3003): 2750-1469P.txt file - cDNA_ID_1817179; gDNA_ID_1621135; Annot_ID_56539
taatgtcaaaggacatttactaatcttggatccaagaacacaacatagccacagacattattaatgtcaaggggcataatttagtactcaatcatttcttaatttcaacaatcaacagaacaaaagttcaagatattttaatacaagtgtaataaactataacagaaatcagcaaagactttctgtaaaaaccatgcaaggacataatcattgtaattcttcacacaaaatctaggctatcagtaagaatctatcagccacattatctctgagcgtatataccccaacaaaggatcctacagatcaaaattcagctaaacaagatccaaaatttacaaatttcgaaagtgaaatgatcgtcagaacacaagaaccaatcagcatttccataaaccaacatgttcgatgaaatcgagaagggaaaggagatgactcactaggaagcatacttaagtctctgtgaaaagaaagagattgagtctcctgagtcaaacccaattcatcagaggactttttgagctcgcggctaaaaggaatctcgccttcaatggcagtgacagctctctgagaagctgaagaagagcactcccagagacagaaacgacggcgtttatcagcgtcgaattcagcgagacccatgagaggagaacgatgatgagtcgtttggggacaaacccaaatgggaaaacacctcagagccatagcaaagcagggagattttttcagaggactgaaatcgagcaatgtgaaggtgagattttggaggaattaggtcaacaaaagtctcaatggggaaatggggttggtgagaaagaatggagagtcatagagataacgtcaagtcacaacaaaaagtctggatttctggaaggtctttcaaagaagagcaaaactcagaatactcttactcagacggaaaggtccacactttgcaagacgttacttacatttcatacacacatatatcatttttttattaattaatttcaccgacaaaaaggtctgttgtttgttttttttctgtcaacaataaatagttttgatgacgcgtggatatttatttgggtgaattagctgtgtagccatatttcgacaaaaaattaagattataaccatataatttacgtaattcagcaagtaaccaaaaactctaactaattacaagtctattcctgtattatttccctattttccaatttgccatgactcatcatcttcttcgttttgttgatcagatattgatctaaaggtaatattccatatgttctaaaggtaatggattgtgaatcagatattgatctaaaggtaatgtttttttaacaaacctttttcattcatcatcttcttcgttgcttcttctcttctctccaatccaacagaaaatttccagaaaatttaactttttttatatcaattcattctaatttaaaacatctattgatttaagaaaactaaaccctaagatactatatatagaacccaaacaaaaataattaaactaaataaaatcatctcaagtttcagtttttagaaatctgacaaaatcatgtttatatacttttaatctcttttctcctttccttaagcgaattgaaatcgattcgattttgggtttaaatttgtgttaggaattttcaattttagatattgatcaaaccagaaaatattcaataagatcttgtgagtctttgttttcatttttcttcgttctaactagcaaatagaatggtacaaaattgaaagtaaaatagaaaactatagttcggttctgttttaattaagttaaagtagaaaaaaaaagatgagaggcgagagagatgaaacaagcaatggaagagaggaagaagtgattaaggtggtggtggtgtgtatggtgtgtatggtgtaggtcgtagtaatatttgtgttggtggttgcagtggtcgtgtgtcaattgcggccgcaataatggtgatggtggtagagatgacagcgtaatggttgtttctatggtggtgacgattgcagtggtgatggtgatgatggtatgacatttgtggaaataatggtggatgcgatgatgacgacggttgcaagggtaatggttgtaatagcatagaagagatggtgattgtgtagataagggtactttagtatatattatagtttatatacaaaatatcatctctgttttttttgttggttagtttcttaattatagttattttgttaatcaattttgcaaatttccctatttattttgttgtaaagtaaatggagtcctttcacaattgtttcaaaggatttgggccaaaagagttcctaaattttttaaaaccttcttgagaaaagttttgtggtaaatttggaaatttgttatagactatggtatatgtaattaatttcttgataaatggtgaatgaaaaaggttcaaaataattatctccaatattgttatcatctctatttatgaaaaaaaatattttgatgtccacatttgctatacatgaattggccaccaagatcaagggtaggtctaaagctgaccattaatcaagtgtaggtcttagataatgtaagcaatgaatttctcttacatatatgatatatttttacaaaaattagcaaattatttagatgactaagtttcacaaattaacaccattgatttaatagcttatgagagtgtttttgcatccttagaattaattaataccattgacatttaattttatcagtttttagatgaaagtgttacaccttagatttttcttttatttttttgtaaactttccaactctgattatgtccaatggccaaaaactagaaatgcagggttcaaatgttcaatttttcaaaataaattattggtctatttatacacaaaaaggtattataggtctaaaaaagaatttaggaaagactagtgatttttattgcaaataaaagaaaataaaaaaataaactcgggttggttgctcccccagccggagaataatcgtcgactggtgaagaagaagatg

SEQ ID NO: 18384 - DNA, 3003 bp, Unknown; identical to SEQ ID NO: 18383
  misc_feature (1)..( 3003): 2750-1469P.txt file - cDNA_ID_1817179; gDNA_ID_1621135; Annot_ID_172624

SEQ ID NO: 18385 - DNA, 2264 bp, Unknown; identical to SEQ ID NO: 7284
  misc_feature (1)..( 2264): 2750-1469P.txt file - cDNA_ID_1817193; gDNA_ID_1621137; Annot_ID_56577

SEQ ID NO: 18386 - DNA, 2264 bp, Unknown; identical to SEQ ID NO: 7284
  misc_feature (1)..( 2264): 2750-1469P.txt file - cDNA_ID_1817193; gDNA_ID_1621137; Annot_ID_172724

SEQ ID NO: 18387 - DNA, 3000 bp, Unknown; identical to SEQ ID NO: 5900
  misc_feature (1)..( 3000): 2750-1469P.txt file - cDNA_ID_1817193; gDNA_ID_1620824; Annot_ID_169620

SEQ ID NO: 18388 - DNA, 3003 bp, Unknown
  misc_feature (1)..( 3003): 2750-1469P.txt file - cDNA_ID_1817197; gDNA_ID_1621137; Annot_ID_56576
taatttttttttttttttttttaattatattcctgtataattatattttgattgtttattttaggatttcacccatgttatacatcttgtattaatatcgaccaacccgtgctaccatataatatgtcccgtcaaattgaacaccatattttttttttttttttttttgaagattagctgaagatataacatattaatttggttttttttttgaagattagctgaagatataacatattaatttgtcttatttaaatatagatatatatctatgtattatttagtgtatgattagtattgtttaggtttcaatatttaaaatttagatacgaaacatacagttcattaagtaacgatgtagcagattttaaaaattgattttttttggttttaggattttagtatgaaaatattaaaagtatataggaaatggtatgtacgtgaaataaagaattatttgttttttttttgttccatatatactaaatattattaaaaatctgtataatatcttgtatttaaaatttaaaatctaaataattagtgcattattctagctgagattgatccgcaatatacgacgggctgtttcttaaaaatttttgttatttataaacttatgattttgttgtatataaaattaaccaatttattgtgtatgatttttaattcgatgtaactcttatatttaaagtatagtattatttagctttattatggctgaatatttatatgaatatgtttttgacctgatccatcaaaatcaagaggttttaacccccatggcaaatatttagtttttgtactttagattttaaaaataaaatttaatatatgattattatttttagatcaaagtaaatatagtaattttaggttctattttatagtcaaagttctaaaccattcacgtttgtttaactattattttatttttttcaacgaaaaaactttattgaataaagattattaggtccgatcataatacaacatatcataaatctaaatcaaaggactcaaacaatccgagaaaaacatagaatctatctaacctttttctgccaacaaatgagctaactgattacacgatattttagtaaaagagaaaaagatatttctaaacttggttgcccaaaagtgaatatttttgcgtaaggcttcggtaatgaagtccaccgtaagaaccttgatgatgttgatgagcgcttcagagtctctatttttgataaattgatgtatagcagtcagaccacacttgatgcattgacattagtagagctttagcttcagcttccggtggggtacgtacggctccccatctttttgcttcaccttgacatgtatatttaattttttacttacataaacttctttacaaaataaaaaaaaacagaaccgcaaatacaacaaaattaaacacacgtatatatacacacaaacgttcatatatgaatatctaaatagtttggaacaataatacacaggtcgttaccaaaaagaaaaaagaaatacacaattctcaagtattgtgttctttaatacagaaatcaacatcaatacattgacatcacattcataaagaagggtaatacgtacaaaaaaataaaaaaaaaataaaaagaatgcccatgatgtgtgtgtttgataatgtgatgggagataaacatatgtagtatatataggcttggaatgattaggtcaatattttggtgagcaagcaaaattaatttgcgatcttaactaaaatggaatcaaatatacgtaattagaatattttaggtatatgctataaatgcgatttgtcataataattaaaattttctataaaatcttatgtataaatattttgtagtgtatagcaattagttatgtcgagatattttagaaagatttttccgagaatattggcaaagatttgggaaataatttgatgtggtaagattatgatattgtgaggcactaatattccttaaaatcaagtatatgcttattttaaataaatagaaatgtagatatgagtagttgataaaaaatcaaattgttgatattctcatatatttcgaaatgaatgtatattattgataatagtggaaagttttaatggcaattgtttagcgttaatcgttttgtattatacatttttggatttactaatcaaaccggaattattgttgtaattgataacaaaagaataaattttggtaagatttcattagcatttaaaactataatgatttccgaatctaagtaattatagatatggttagttaggatttagtatcaaatttagtaattaggaattaatgatttgcgaattacgtagagtttatagggattgatttgtgcaatttattagggtaataattaacaatatctatgtttaggcaagtagttagtgcaatatcataatagttaaacaaaagtttggtcattgtcctaaataaaatatcttgtttgattgattttatagggactaaacatacaatatcaaaattgaaaaagaatttttctacacaaatcgttccaaaaatgtatatgtagattcttaatataaacaacaattattcacttggccctaattaaaccatcagcccattaagcctcttattaccaaaacccttcaaacccaacttctttccttcttgttgactttccttcttactctgtcgttgactctctttgcgacttcttcttctcttttcttcatcttcttctccctgattcctttttcttttgttgcaggactaaaatcccaacacctccctcctgagttctttgattaaatccccaatttcaattttagggttttgattcccattgtttcttttgatttatcttcattccggaaattgctccggtgaaacagcagccaccgccacatctttctccttctccggcaagcaacttcattccggattttcgtctgagacttcattcttgtctccctcttcgaccaaactgacacttattccgacaaaaccctctgattagaccgtcggaatg

SEQ ID NO: 18389 - DNA, 3003 bp, Unknown; identical to SEQ ID NO: 18388
  misc_feature (1)..( 3003): 2750-1469P.txt file - cDNA_ID_1817197; gDNA_ID_1621137; Annot_ID_172723

SEQ ID NO: 18390 - DNA, 3003 bp, Unknown
  misc_feature (1)..( 3003): 2750-1469P.txt file - cDNA_ID_1817208; gDNA_ID_1621137; Annot_ID_56573
ggaatttaatatccttgtacgacttcgtcttgcagggttaatctctcaagcagcaaagctaggtgcacaaggtgtgccctcattccggtcattttcttttgaagagttaaaggaagccacagacgatttcgattcatcacgtttcttagctttggaattatgcaggaaaatggctaaaacagagggcgatgtgtacaactttggattcatacttctggaatctctgataggaccagtacctactacaaaaaggagaggcctatcttctcaacgaaatggtatcatatagggtaaagaaaagaagcaaatcttcatcattgttaatagctgttgctgcaatgttgtatttgcagacgtcatttgggagccaagactgtcgacagaaaataggaagtccaacggtcctaacaacaagctcgcaggagtctttacccaattgccatctcaatcgccaataaatgtgttttgcttgaaccttctgcaagacttcctttaaagatgttctctggaacttaccatatgcagctcaaatgcagtctgccgcagacgctgaacgcaaatctgataagtcgtcgtgaatccaaaggctaacctgatgattgatagttgttttcggatttataaatgttatgttttataagtttggtttttcagtagaaaaatgtaatactctagcggctaaaaaacatagtttcttgtctctcttgaaactttattcgtttaacaaatattgattgaagaagatgttgagttttgtagttggcgagaacttctcaatcttcaagaacaaggtactgaggcaggagacttgtcaaatgttcttggagaattttgtctttgaattgcagaatcgatcccaaatattttattattataaaagctacaagaatacagtttctaatacatgtattagcaaaaaagtaacagtaaaaccaagggctacacacttttcttaaacaggaactttggagtccactgatttgagaacctcctcacccatttccttgcatcccaccagtttctgcattttcaaaacacaaaaagacttctttaagtatattgtcattaacttatacaaaacaaaagacagaaatcatcatacacatacatttccgggggagtagatgtctccggttctgaaacctttgttcagagcatccacgaccgcgtcttcaatcatctttgcagccttttcttctccaagtccatacttgagaagcatcgccgcactgagaatggtggccaatgggtttgccttgtcttgtccagctatatctggtgctgaaccatgtataggttcaaagagtccaggtccctagttttcatcacaagtttaacaatcaatatatgataataataaacagaggaaccttgaaatattagatttagtcttacttaccgattcaccaagacttgcagatggaagcatcccaatgctaccagtgatcattgaagcttcatcagacaatatatcaccaaaaatgttattggtgacgattgtgtcaaactgcaataatgtttttaaaaatgccgtgagtactacaagttccacttctgtgttagcttaatcaacggctaagctttatatatgcgcgaagatcacctgtttcgggtcacggacaagctgcatcgcagcattatcgacatacatatgtgatagttcaacatctggatattcagaggctaaagctgttactcttttcctccacaatattgatgcctatacgaaacaaaacaaaaaaataattgtataacgaaaaacacacaagagtggagtggaaaaacaattcaaaacatacatccaagacattggctttgtcaacagaacacagcttgccacgccttttcctagcagtctcgaatgcaacacgagcaattctgtcaatctgaagaagataaagcaatgcattaatacacatacattgtcacagagcagcagattgtgaagagtaagtagtacctcgtgagcagcgtagatctctgtattaaaaccgacttcttcgccattttcgttgatcgtaatgcctcttggctctccaaagtaaatacctccagtgagctcccttacaatcatcatatcaacaccttgtgctacttctttcttcagtgtggaagcatcaactagctgaacaagcaaaaacagaaaaatttgagtatatttacaactagaaagcaaagtgataagcaaatcaatacctgtggtaaaactgtagcaggtctcaaattagcaaagacattgagatctcttcgaatgttaagcagacccatctcaggtctcagatgtttctcattcttgtcccatttgtacctgaacaaaaaatcatcataaagagaataaatttgctgaagaaacaacacacacacgcattacacataccctccgatagctccaagaagaatggcatcagactgtttagcagcagtggaagtttcctccggcaatggaactccgaccaaatccaaagctgctccgccgaaaggcatctcctggaaatcaaactctagtccttggagaaatccagctttctgaagcacattcttagcaacagatataacttctggaccgataccatcgccgggaagcagagtgatgttataccgttttttcaccggtgaagcggcggcgcacctaattcgatacggcgcacgaaacttatgatcggtgagagaactgtatcttcccggtatgatctccagacggatgttagtttgcaaaaacgccgccatctttttttcgagtttagggcaccaccatcggcaaaaactaaccatttgagtatactacagagaccggttatctctggttatttgttaacctgattttggttcaatgttctcattaatttcaattttaagttctatcagctttttggactctctcatgtccaccatccgttcacttggccgcgttcatataaaccaaaaaccgaacaacaacaaaaattcgaaaattctccggcgacaccaacaatgggaaggtctctaatattctctggaaacatg

SEQ ID NO: 18391 - DNA, 3000 bp, Unknown; identical to SEQ ID NO: 7281
  misc_feature (1)..( 3000): 2750-1469P.txt file - cDNA_ID_1817235; gDNA_ID_1621137; Annot_ID_56563

SEQ ID NO: 18392 - DNA, 3003 bp, Unknown
  misc_feature (1)..( 3003): 2750-1469P.txt file - cDNA_ID_1817265; gDNA_ID_1621138; Annot_ID_56590
caagcgtttgttactcacttcaagctccttagctttgttctcatgatgcaacttaatagcctcataagcttcctcagcatgcttaatcctctcctgaagactctcataatctttcaacagagtctcatgattctccttcagaatttcatgctccaaagtcatcgttttctctaaaccaaacatcatcttcttctctgatttgtcctaaacccaaacctgaaacaacatcaaccaatttctacagattattaccaaactcataagcttaatcaaaaattctgcaaaaaccctaaatatccaagctttatgttctctttatgactgaaatgcaacgaagatgagaattaaaccagatttatgagctcagattgtggaaatcgaaatgggtttcggaggattcagagagaaaatggtgagtaacagggaagagagagtgtggttaaaactcagattctttcaagcattcaacaatgtaaacagaatcagatagaaagaaatggaattttctcgagaaaatcttaccaggattgcgaacttgaagaacctaaagagagaagaagacgaagaagcaaagtcctcctaaacgttggttaatgataacgtaatcgaagatgacagataatgtttgtatgtatttaagtaatattattcaaattaattaattgtttattccatgtgaccaaaaaaataattaataaattgttcattcttaagctaatttaacccaaacctttttttaatttaatccaaaccttgtaactgatgcgatgttttttttactagaactttaattttctgtttttaccgttttatatatggcattcagtaggtctgggtacgaaacggatatccggaaaaattgtgatatttgttattcgattcgttttaaacgaatacttgattttgtgatttgctttgctttgcttcgaaaatttccggatatccggaatttcgaatatccagaattttttgtgatatttgcggatatccgctttgatatatttaaatattaaaaaaaatctatatactatataactatatcagatattcaaagtttttatttaacatgctttcaaaataaaaactaaatacttgttggtaccaccagtctacaaaatgttatcaaactaattccgaaaactaaaacccgatagtttttgatgtcgttgatcaaaacataacatgagaaaaatgatcaaacaaacattttaacataaaaacgtaaaatagcaacaatacacaaactattatgatatatatatagatataactatattttctaatatatatataaaaagatacggatcgaagcggatattcggttttttttttttaaaatttgttatttgattcggtttttacgaatactacattttcctatttgctttggtccaaaatcttacggatattcggatttttcgaatcaaaccaaatcatataccgaatcaaagcggatcgaacgaatattttgcccagccctaacattcaggttaacaacagaaattaaaggtattctaacattgtaacattaatgtatgttttcgtataaaaatgaaagtttaaatatcaaattgaagtttaggttaaatcaactgtggtataatacgtgtataaatgcagcatagttcaaactaaagatatgaaaaaaccaattttccgttttttacataacatttgtgcaaattcctatactattaaaagagaaatataaatttgtttcaatttgaattggatcgggttatgttaaaaaattaacataaattgacctgaaatttaagtaattggatttttggcaaaacaaaattcggaatataatatgaaaatcaatgtttttaaacccgatctggacagtgaaccggacaacagttttttttcttctacgcatcgtttgtttgtattatttatatatatatatatatatagtgatatgataacttccctaaaattagctgaataattaaatgaaaaaaatttcagttgatttaacattgaatttttttccttgttttttttaacccatttctccacatttttttgtagtagtttagtttcgtaatttctgcagtcacaacttttagtaatgagttataaacaattacaatcaaggtttttatagtaaacacatcttttactaaaaccacgtagaataattggaaatcaaacataatttttctaaagctcctaaatttttttagtttgtccttagaaatcaaatatatttttgaatcttttttatctaattaaccgcaatatctataatctgaaagtgttaggaccgattggtaacaagtgttatttctaactatatcaattttggttgtagaaaattttggtgtaaggaatttgaccgtagaaaatatagagacttttgcagttaaaattgcagatgtgaaaattttgaaacaattggtaaaaattatgagtttagaaattaaaactttaaataatataaacgattagattagttgtgacatatgcgatacaattttttttcatctctactgaagagatcgtttttattgatattgacacaattgatgacggtttcatatcattaaaaatgataatttagagaatgttttttccgattttaaatgatgctttcaactttcaatataaaagttaaatgtatttaatattttttgaccaataatattctatagtatattttttattggttgacttagatatagttacttatgcaaaaaaaggtaaattaaactaaacttttgtaatatgtgtaaaaaaccttaaacattacttaaaatcagagagagaataattacggttgtttagaatcctcattaatcattctctgtttcatttattaactttctgtatatcattaaccccacaagcattaaattactcactaatctttttggattctattattcattggtttatcgcttaggcaataagtacggaatcaaaaacattccactttctgaccaaaaaaaaaaaatcgtatatctctcagcgcgagggaagaagaagaagatg

SEQ ID NO: 18393 - DNA, 3000 bp, Unknown; identical to SEQ ID NO: 4539
  misc_feature (1)..( 3000): 2750-1469P.txt file - cDNA_ID_1817265; gDNA_ID_1620713; Annot_ID_49052

SEQ ID NO: 18394 - DNA, 3003 bp, Unknown; identical to SEQ ID NO: 18392
  misc_feature (1)..( 3003): 2750-1469P.txt file - cDNA_ID_1817265; gDNA_ID_1621138; Annot_ID_172749

SEQ ID NO: 18395 - DNA, 3000 bp, Unknown; identical to SEQ ID NO: 4539
  misc_feature (1)..( 3000): 2750-1469P.txt file - cDNA_ID_1817265; gDNA_ID_1620713; Annot_ID_165525

SEQ ID NO: 18396 - DNA, 3000 bp, Unknown; identical to SEQ ID NO: 4539
  misc_feature (1)..( 3000): 2750-1469P.txt file - cDNA_ID_1817265; gDNA_ID_2926152; Annot_ID_139340

SEQ ID NO: 18397 - DNA, 3000 bp, Unknown; identical to SEQ ID NO: 4539
  misc_feature (1)..( 3000): 2750-1469P.txt file - cDNA_ID_1817265; gDNA_ID_2926152; Annot_ID_198129

SEQ ID NO: 18398 - DNA, 3000 bp, Unknown; identical to SEQ ID NO: 7300
  misc_feature (1)..( 3000): 2750-1469P.txt file - cDNA_ID_1817277; gDNA_ID_1621138; Annot_ID_56585

SEQ ID NO: 18399 - DNA, 3003 bp, Unknown
  misc_feature (1)..( 3003): 2750-1469P.txt file - cDNA_ID_1817277; gDNA_ID_1620713; Annot_ID_49056
gttggaaaaagaaaagaacaaaccttagatagaacacattctcagagagattgcagtagaattagacatttctcttgatcgaatttcgattccgaaacacaattgagaagattcacagcttcttgtcgtcaaattggtaggggaagctttttctccattatcataaaccctaaactaaaagtttctgcaaaaacaactattttatcgaactcttaatgggccatcaatgggcccatacttataaacttaaacccttttccaatttcagtcgtattttacaaaaaccatcaccgtcgttatcacagtaaccaaacaactttcatcgccgggtaagctccattcccaagctatttcgatctcgtttcacgtcgatctatttctagtcaagttaatctcttcttttagggtttaattagttaagacttgcgtttgattatctcaagttcagaatttgtttcttgatgatctaaaggaaggaattttatacttatcaaattgaggatttttgtttttggatgcagagaactgattaacatataagaaaatggcgtttgctagagcagtgagaagaccaattggagtcttttattatagtgttagtagtagatttagttctggaaatgagtattctactgtggcaagcaaattcgaaactttgtctcagtacaaaagctctgtaccgtctggttacacaagccttgttcgtggttttgggaatttcatacggagttttagttcggaagctcctcctgctgtatctgaccaaatgagtcttattaagcaacttagggaaagaactagtgctcctattaaagatgttaaggcttctttagttgaatgcaattgggatcttggtaagaatttggtttaggttttttgttttggtgaaggttgtgtatgttttgttgtgttttgaagtgggtttttttggatttgacacagaggctgctcagaaggatttgagaaagagagggaaagttttggcttcgaaaaagtcgtcacggactgctgcagaaggaatgcttgccgttgctcaaaatgaagggaaagttgctgttattgaacttaactgtgagactgattttgttgctaggaatgagattttccagtacttggttagtcccatagcaatttcacattggttgttgctgaatgatgggctttttgtttattttactgttccttgtcttctaaaattgacatgtcttgcaggctttagctatggcaaaacatgctttgctggttgagagtagttcgcagcaagtttctggtgtcttcccctttgggccggagctttttgaggtcagttttttatgtactcgcttgtttccttttttgttatttaaatttatggatttatgttgtttcctttgcactgtctgagatattgatatcaacttttcatttctaatcactctaatggatgctatcaggagttcaagcttaacctcgatcatccaaaagttaatggtgaaacaacggtttcaaacgctgttacagaagtagctgcaatcatgggagagaatgtaaaatttaggagaggtttcttgatgtcaaaatcttcagcaggcgtcctttctgcatatcttcacacaagtcctcaaccaggtacaatttgttcaatatacttcccattgtttctaatctctttttttatgatatttctgtgcatttctaactttaaaaaaaaaaatgagaatagggttgggtcgtatagctgggattgtatctctcgaagtagaaggtgaaaatactcaactagaggctattcagcgtgtaggctcagaactggctatgcatgttgtagcagcaaagcctttgtttttaagcaaagaccttgtttcttctgaagcaatggcaaatgaacgcgagattctaaagtctcaggttagtgtcactttatgttatgaaattgaactgtaatttgtaaaaagtacacaacctgcgttagaaaagtttgcttatcaaatgttgtatatgacaggcagaaagtacaggcaagaatcagatggcgatagagaagattgtggaagggcgtctccgtaagtattttgaagaagttgctctaatggagcaaaagtttattgtgaacgatgctataaacattaaggtatgtgggtcttagcttaaaacacctagtttaccgttttattacctctgcatcgcttgttgaattcaactcttgggctcctattccacagacactggtggataatttgtccaaggaggtaggttctccagtgaaggttaccgattttcttagagtcgaggttggggaaggaatcgaaaggtaaactaaccgtcacccgtatgtccagtacggcttatcattgttgtaagattagtcgcttatgaattttgttttttttgaaggcttgaagcatctgatgaaccagttgctcaaactgcttgaagacaaagaatcaacgacatggttttagatttacagaactctttccttctttggttcctttagagttcatggcttcaacgccttcttgagattatagaatctttctcatgattttgtttctcacacaatatggcaataagagtgattgtgcctaggaagctatgaccagaaaaaaaaaacatgtttgtgttctcctactcctactaagatcattatacaaaaaccttcacttatgtgtttgattttaaggtactcaagtatttgaataagcagatagtgagttcttggctcctccggttaccaacggtcgaaattgacggtttaatataattcatagacaaaaccggtcaactttatattatccacaatcaacgatcaagatcaacgagaactaatcttacggttgatatcatacatctgtattgagttacagtacaccacaaaacactcaataaacactaagcactcttcttctaccttttgattttcgaaaaacgcaaactttctgaaaaagcaaaaacttctgattctctcgagaatcatttactcttcacactgtccccgtctctctttctcttgggttaatcatg

SEQ ID NO: 18400 - DNA, 3000 bp, Unknown; identical to SEQ ID NO: 7300
  misc_feature (1)..( 3000): 2750-1469P.txt file - cDNA_ID_1817277; gDNA_ID_1621138; Annot_ID_172743

SEQ ID NO: 18401 - DNA, 3003 bp, Unknown; identical to SEQ ID NO: 18399
  misc_feature (1)..( 3003): 2750-1469P.txt file - cDNA_ID_1817277; gDNA_ID_1620713; Annot_ID_165531

SEQ ID NO: 18402 - DNA, 3003 bp, Unknown; identical to SEQ ID NO: 18399
  misc_feature (1)..( 3003): 2750-1469P.txt file - cDNA_ID_1817277; gDNA_ID_2926152; Annot_ID_139344

SEQ ID NO: 18403 - DNA, 3003 bp, Unknown; identical to SEQ ID NO: 18399
  misc_feature (1)..( 3003): 2750-1469P.txt file - cDNA_ID_1817277; gDNA_ID_2926152; Annot_ID_198134

SEQ ID NO: 18404 - DNA, 3000 bp, Unknown; identical to SEQ ID NO: 7297
  misc_feature (1)..( 3000): 2750-1469P.txt file - cDNA_ID_1817285; gDNA_ID_1621138; Annot_ID_56582

SEQ ID NO: 18405 - DNA, 3003 bp, Unknown
  misc_feature (1)..( 3003): 2750-1469P.txt file - cDNA_ID_1817285; gDNA_ID_1620713; Annot_ID_49059
acttgttatgatccatcactcactgtctaggtttacttttttactttggttctctgattcactcattgttgttaacagatccgtaagtcgttgttcggccaagttactgcctgatgaaagaaaggaaaagagaaaagagattattcaaaccggtttgcgtttggttatttacctattttgggagagatttctctttgttgtgattctttgtattttgcaaaatcttactttggtgccaaacccatcgaacgcttctttttttcgaattcctttttttcattcctcctcgaatgtgtgttatcatggctatacaaataaataaaatgaaagacttcttttctttttcttcactttttctattcaatgtctatgctttatactagtggtttttcgtcatcatagataaacacttaattcataaaaagacccttgaatttttattataaggttagcaatttatccaacacgatcctgaaaatcgtccatcctagtatttttttcgtctaaacacctttaattgcggagttttgataagtttttaacagaaaaaaactcgaataagatatttttttggtttgggctaaaattgttatagacttggcccttgggttttatcccaaatacattttaggtatcacaaacaagaaaaacatagaagtaaaaaactagaagttttttgcgcttttgatctttgtccttttttctacaagttttttctccagactaatctcctcacgattgtctgaagacaagagtctacaagaccggagattcaccgttcgacaataatttccgtacctttcaaggttagatgttcttgcgcttaatttgacttgtgttctttttgtgaattttggatgcgcgcacaaggtgtttgttcatttgcctagacaaagtaaaattgatttagttattcttctcattcatcttctatagtatttgtacttgagccaatcattattcatctttggtgcaatctgaatctgacccatttgagctgttttgtctccttgttcaaattttgtgtgaatgtgtgtaaagaacgcagaatctaatagaagcttctctttagggtttgggttgttaggacatgcgtttcatcctctcaaattttgattttgtttcttttaatgaactcaagggttagtttgatgcttatcaaattgagggtttttgttttggatgcagagactgatttgacatatgaatgacgtcgaggcacttaggcaagaaggtgctctttttatactctttaccttttttttttagtgaatttcgtcgagtgtttctgaagaatttcagcgaaaagtttgtagctttagcttccatttcgttactattttctggtatttttcccaagatatgcatagctttaatgcaaattcttggtgtatttatgtttgctggtttgattagaagttatggatgatggatgattattaaatgttgtattcttagttctcatgctgtttatttattggggtttaggcctttagcttggatttaaaagtctatctgacattttatagtgaagcaaatttgcatatgtatgaatgtgactagacatacgagtatgcgtttatcattgtctaagctattggtattttaaattcttgatgtgaaatattactatttcggctgtctttcgaattgttgattctaaaaatcgttagacgctactctgccggtgaagtagcgcttagcgcctagacggtcgaaacggggattaatcggggcctaggcgttaaagtaaactataatgaatttatattgttttataagaaattttatgaaatttattatattataagtgaagttgtgatgtgaagttatgttggtcctgtggctttctgctcaaattttattgctacagcccttggttcgatacttttcacgctaaaaaaatcgaatttcccccacttaaatgataggggcaaaattgtaatttaaaaatgttggggtcatcttcttcctcaaaaccctattcgcttgtttgatcgttttttcgcttatactcaatttttttcgtttttatccgcttgtttgatcgttttctcacgtaatcaaaccaaaataacacagatctaccactaaaatacatattcatgatcaaaaagaagataattaagtagattctcatgaacgccgatttgttcaccgattgagccaaaatcgcggcggtccacgcagaaatagcgcttttttcgacgcctagtcgaccgattagtccgatgtttagaagcgtttgttttagagaataattatgccttcatttttgtcaagtttgtttggtttggtgagtagtagttacacaatgttcttattgctttgcatatgtttatggatgtctcaagaaactttatgaaatttgcagggcattcaagcctcttttagaataggtttggttcttcctcgagtagtagcatctacagagagacagatttcctctacggttttaaaaagagcttctgaaagtgtctctttttcattcgctccgtacataaatggtaagtgtcactcacaggcgattacaatttttcttagattgttagaaaatgaattagaataacgagtaatctcacccttttgttcatgtttagggtttggttttagttcgttatcaaattggtctcgtagttatgaatctttccctactgaaacatccataaggtaaaccattcgcctagacttttctgtcatttctctcttaaatttcatcctcagagcactcactatgtgaatgtttgctggcttgggttgtgtttcttcttgaacaggtattttcatgcgagtcgagaaacattggcgaaaagaaaagaggatgctgatcgactgctgagtcatcgtgaacgcaagaaacagactgtgaaaacgaaaggaaagttctcaaaacgggagaaaaaaacagataagccacctgttgaagctccttatgtgcctcctaggctgaaaagattggcaaagggattgcctgggaagactgtcgacatatttgaagggatg

SEQ ID NO: 18406 - DNA, 3003 bp, Unknown; identical to SEQ ID NO: 18405
  misc_feature (1)..( 3003): 2750-1469P.txt file - cDNA_ID_1817285; gDNA_ID_2926152; Annot_ID_139347

SEQ ID NO: 18407 - DNA, 3000 bp, Unknown; identical to SEQ ID NO: 7296
  misc_feature (1)..( 3000): 2750-1469P.txt file - cDNA_ID_1817289; gDNA_ID_1621138; Annot_ID_56581

SEQ ID NO: 18408 - DNA, 3000 bp, Unknown; identical to SEQ ID NO: 7296
  misc_feature (1)..( 3000): 2750-1469P.txt file - cDNA_ID_1817289; gDNA_ID_1621138; Annot_ID_172736

SEQ ID NO: 18409 - DNA, 3003 bp, Unknown
  misc_feature (1)..( 3003): 2750-1469P.txt file - cDNA_ID_1817289; gDNA_ID_1620713; Annot_ID_165538
ctttttgctatttagtcatttaattagaaagtttttgatgttttacaataacttaagttcaaaattttaataaaaatcataaattttgtcttaaatctatagttttatgtatctatattattaattgggaagcattgtgtgaactataaaattgtaagggtagtttaaaattaactaaatgaatttttgcatgggtaatttagtaaattaacaactagtacaactaaataaatatcttggattttgttcttttaaaaaattaaatttaaaatcaataaatttgtaactacccaatattttcagaaatcatttaaaaacgtttccataacatatcagactattttaattcgaattgtatatatgtaaatttatttattttggtaatatgttattagataattcaaaaatttcaatctaatttaataacaaataatcatttagtttagattttaaacaatttccttaacaaaactatgttaattgtttctcattagtacacttaaaaagaagattttaaattatgatttagcatattcaaaagataatttttggattttagatttgtaaatatctagaagatattatgagtatagattaaaatatttaacattttaattagaatttaaatcatataaacttttcaagtatttttttaaacatgtaattttcattatttttaaacaagtaattttcattatttttaatgctatgcatatattcacattgcctcacaatcaatctagaatatcgattctttaaaacaatagatagagattcataagtaaattacttcatgttctaatgagtttatctcctaatattactatctatttatgcgtattcttatggatttttctttcaggctaaacactagattacaagaaactagattatagttatacaatcttaaacaataaacaaaacaaatataacttaatttaattttttatttttaactaaaatcaacaaatttattagtttataaaaaaccaaaaactattactcaaccatataaaaaccaaatactattatactttaattataagaactacatcttatggaaaggtatacactaaaaatcggttttatatactagaatatcataaatatataaatcacaaattatttttaaatatattaatctaacatgtaccacatgtcaacccctcgatttttttatatattacaataacaatatttaaaaataacaaaatagtttttcattttacggaataaagttatatggtggaactagtttgggttgatattaatacgggacaataatctacaagtgaaatcttagaattaataattataacataattatacaatcttaaacactaaacaaaataaacaatatttacaaaacaactatatcttaaaatttgagtttttagttacaaacaaatcgaccaacggtgtaccgcggagtaaattttacattatatcatctaattgatcaaaaatttcaaacaaaaataatcaatttatatatacatcaaactaacaaaaatacacaaattttccaaatatctctatattattccgcaactcgaaacaaatataacaatctatttactatgctaaatacaaataaaatataaataatataaattaattaaaaaaattagctattttatcataaataacactatacactttctatgcatattataatttgtacactataatatctttcactaaaaatgtattccaatacatttcttaaaatatgaaaccccgcacgtatgtgcgggtcagaatctagtttactataattttgaaaacaatactagattaatatgtttttaaaacattaatataatcctaaaactaatctcgtttaatctccgattttaatctccgattttaatccgatttatcgattaatagctagtcccataccgagcgcccgattaacgcctaacgcgattttttaacaataatgatatatatatatatataaatgtatatatgatttatatattctagtgaattttacttgtaaactaaatctacaatttaaaagttaattaataaagtagtttagaagaagaagaagaaattgggttgtcttccctaaagattttttctacatatgttcgtagagaactattttttctaatgacaaaaaaatatttatatttaatatttttaatataggtttcaaaatgtatcattcataaactgcaatactaaatttaactaaaatgaatgaatttttaatttcatgctcaagtctaccgaaaaagataaacaaaccacaaaaaataaaagaatattatgggggtgattggggaggaggactttgaaaactgtaaattctattaacaatttttacagttttaatttatccgatcacacttttttgcttttaataatttaaaaattctcacaaccttttttctcattttgttctttgatttcatgtttttgtttaaatcgcataaatctggctttaaaatgataataaacaaaagtcaatagtttttccttttcgttcttctccatatttatgaaaactcccatagatgaattattcctttttaatttttttttacgtttatttacaattgaagtctttttcttgttttattaagttccatattttcaataattatttaaaatcataatttatgttgtcacaacctatagtatatagttatagtttttaaaatattaaaaattttatagcaaaaatttatgcagcaaaagtctttacagccaaaagtaactttcgagatgcatgttttaatttgtcttatttacttgatgatatacaaaagtcagcctaggcgacctttaatgagatgcatgttttgttgtctacaagggtctagttgcaatataataataaaaatgaaattaccatgtcatttcctagaaaatctcatattacaactttgacacgcaaaggcattccatagattctataaattgctctcccaaaacactccaaacaagtcaatataacaaatttttatcttcaatcctctccccatg

SEQ ID NO: 18410 - DNA, 3003 bp, Unknown; identical to SEQ ID NO: 18409
  misc_feature (1)..( 3003): 2750-1469P.txt file - cDNA_ID_1817289; gDNA_ID_2926152; Annot_ID_198139

SEQ ID NO: 18411 - DNA, 3000 bp, Unknown; identical to SEQ ID NO: 7311
  misc_feature (1)..( 3000): 2750-1469P.txt file - cDNA_ID_1817301; gDNA_ID_1621139; Annot_ID_56596

SEQ ID NO: 18412 - DNA, 3000 bp, Unknown; identical to SEQ ID NO: 7311
  misc_feature (1)..( 3000): 2750-1469P.txt file - cDNA_ID_1817301; gDNA_ID_1621139; Annot_ID_172768

SEQ ID NO: 18413 - DNA, 3000 bp, Unknown; identical to SEQ ID NO: 7308
  misc_feature (1)..( 3000): 2750-1469P.txt file - cDNA_ID_1817305; gDNA_ID_1621139; Annot_ID_56595

SEQ ID NO: 18414 - DNA, 3000 bp, Unknown; identical to SEQ ID NO: 7334
  misc_feature (1)..( 3000): 2750-1469P.txt file - cDNA_ID_1817317; gDNA_ID_1621140; Annot_ID_56623

SEQ ID NO: 18415 - DNA, 3003 bp, Unknown
  misc_feature (1)..( 3003): 2750-1469P.txt file - cDNA_ID_1817329; gDNA_ID_1621140; Annot_ID_56619
ccggtgaaggagatcgaagaaatgttgagtttgaactagaaaaaaaaagagaagcagagagagcagcaatggagggctcacagatccaatttaaggcagttgtcagtaaaatttttttgtgtttgtgcagtgtgcagagactctgcatagagaagagagagagatagagagagagggagcatctctctgaaatcgtttaaaattaaatcatgaaaatagaaataaaaaaggtaattatttttactaataatgctctgagtcaacataattggtgttttctatggaccaatcctactagagcatagattatatgtatcgaatttccatatttgttttgaaacataaaaatatttaccaaattgttactgtcttttttattttttgttggtctcaataaccaaaatattcggtaccaatactcaattccatattcaaaatatgttgtgtgtttttttgttttatggattaaaataaaaggaaccaagtgttttacaagagatgtttagttgtaaagcccatataagcccaataaggatcaaataagaagttccccaatgtcgagcccagtagatgaaatgatagtccacataatgggatgaaggcgaatgagttgatccaaactctcaccaaatcgagaaccaagtttgcatgcactcaccataggagtttattttgtgttttatgtttgacgttctcgggggttttggctatatagaaaataagaagatcaaactaattaactatattaagaattgaatcgctttcaaattgattttttttaattccgtgtttgatcagtttaatttatcctaatcaaatactcataacccatatatgtgatattagaacatgaggtgatggtatactcaactgcttacacctactaactcctaattcttaaaatttgattatcaattacaattaacggttttaattataatgttaaagtccatttcaaattccagtcacaatttttattccatctaaagtaatttgatacaaatttgattttgcttcgaatatggttgttttgtcaacggttttttatatcaaatatagttttttttctcttttcaatgcaatcggttaggtggtatttgatttttccttcaaattgaattttaaaaaattcattttgttcttgatgatacagttcaatttatctgaattaaacaatcttaaccatattgaatattaaaacatgagtattgtatatttcattatgattacacctcatttacccccaaatctctttaatcaataaacttgacatgatcatgaaaaaaaatcattgtttaaaaaaaaaaactaaaacaataaacaaatatttgttttgatagttcgaatataatactgctaatacattgatgagtatttataagtaaaaaaacttgtagaatcttaaaaatatatttagatcgtcctttatcaataaaatttgtacaaaatgcgctttgtaatattttttctttacggttacatctttatattttatttttattttttgctaaagtgaaaaaaatagtgcattctttagagctttgaagaacgttggtagatcaacaatgagtcgtctggaaaacatgtcggcaagagatgcttacagcaatgtgactgatctaaaaacgatagccaacaaattcgtaaacggcgaatattaaattgaaaaaactagtgaattgagtatcacatatctgcgttaacgaatttagtaatttgttggacgaatgtagtaattcgttagatgaatgagatcaatcaagccatttaaaaaaatatatattcattcgcattgtagttttacacataccacctaacattgactataaaaaatatatatgaaaaagaaatctgttgcaagggagactaacctagcccaacaatttttaaagctctagggcaaaataaaaattcaggaccttatattcatgttaaaaaaaaaaatttatatatttgggcatatttatactaaaaattattttgtttgggtcttttgaaattttattaccttgaaaacaggtcatactttacacttaaatgctaaaacattgggctacattttcattttgttatttaaacggaccggtatgagtgagacatgcatgatgatttaagcttatctactcaataggattaggctgagactgatatgattccatttttcgagaccgtgtgaacatagttcatgataactactgtgtagtaaagtagtaacaagacttcaatctcaagttttaatgggttttgttcggtggttcaagcgtccttatcataagtttgtttttctgtcttcactacacacatcttaatattgagttaatccaattaacagtaggcatatatcatatatcatatatcagaacattatttgtgttatgattaccttttatattatcaaagtccctagttaatttggtttgtttacaaagacgattacagtatattatatatccaaacaaaatttgtaatgatgataatcagcccagtatggttcaattcaatgttattgaaatttgtttggtttttaaatcagacttggttattgagtcgggttggaaaaccaaattaaccacagcgcataaggacgaagccaaaatttaaaacagtagttgtacataacttcatttgttttttatcggaaaaatctcacacgataaagtaccagtcgacgacggcgactttctctatgatctgaccgtttcgctgaatctcacgtgaatctctgattttccgggaaaatcaattttctctcattgtctctctccctacattgtttctcatagcctacgagaaattacgtggtagcttgtcggaaactcaacttccgttgacggaaggcgcgagaaagaagcaagcttaggttcgatcggaaaattctagggttctctagtgtttaaacggtagagataatcgatctctaatcggatactgttttggatctccattcacaccctctggtgagctgattttgctttagagatcgccggcttagtttctctaatg

SEQ ID NO: 18416 - DNA, 3000 bp, Unknown; identical to SEQ ID NO: 7318
  misc_feature (1)..( 3000): 2750-1469P.txt file - cDNA_ID_1817333; gDNA_ID_1621140; Annot_ID_56618

SEQ ID NO: 18417 - DNA, 3003 bp, Unknown
  misc_feature (1)..( 3003): 2750-1469P.txt file - cDNA_ID_1817337; gDNA_ID_1621140; Annot_ID_56617
tttgcagaagattacacagtgaaggattgctgaacaaccttagaactgattgatgttctaggcttgttattttcatcttacagattggcttttcttcagctctcatcacactcacaagccatggagtatctgtttgtgctgcaactgcgtatattggatgaaaacatttcttcagtcttgaaaacatatcaaagaagttacctgctcacacattgtacatgtattgagatgattactaattgctccaaaacaggtatatactttttcattgagatagttaaaggtcaaaaatgtttaattgtggttttagtattcaacagtaaaattgagttcctctaaggtattatagtttacaaatcttctacatggaacatgactcaagtttcttctcttccagcgaccttggtgtgatggttactttgaggccgtacttcatgtacaagttagttgtgactctcggggctatgacatgatcttggacaaccttgattgagtacctcaacaaaactgaagcagctatcatcttcatctgcaggtaagcaaatgtttttcctatgcacagccttggtccagcattgaatacaacgtatttgaactggtcgtcactgacaaacttccctgcttggatccatctctctggtctgaaaatttcacaatcttttccccagattgattccatccttcccatggcatagattgagaagtaaacccgtgaaccttttcttacgaatgtcccatctggtaacacatcatcttcaatggcttgtttcatttccattggaattggagggaacagtctcagagtttctgatagtgctgcttgtaggtataccatgttgtttagttctttgactgtgaagaggctctcgtttttgctggttggagaatcccctcgctgtctcaagatttctcttatctcgcagatgattttgttttcaacctctgggtgtttctgtatcacccagcagaaccatgaaagtgcaacagaacttgtatctcgtccagctaatataaaacttgtgcaaaattgtctgaaaaatctaatggtggaaggatcaatctcattttcccttttatgactctctatctgaataatccttgagagaacatcagatctattgtctaacgtttcttcttccttgagctcgcagatacgatccacaatcatcttgtcgacgaacccgtgcacgaccccaacagctatcctgagacctttttcatatcctgtgtcgaggaacctcatgggcttccatataaatggagggatcatgaatctaaacagtgtagactctgttgcttcttcaaaagctttagcaaatggaacttggggaagatcaacagctagagtttccgggtcagcacctagacccgcaaggcagatgatgtcaaacgtcaagcgcaggaacacgtcttggagatcgaaagcttcttgtgactttgcgaaactctccatcaccttcaacagcttcttccttaccaaatgttgtgttgtctgaaaggaatgctctacaaacccggttgaatgcatttcggttatgatgatccgtcgttgctccttccaagaatcatcatcagcattaaagataccttcctcgagcagatcattgaaccggcttttaaagaaggtaccttttgggaagttcttgaagttagtcttgagcatgtactcgacatttgcaggaacacaagtcacagctccataagacccatcaagccaaactccccgataaagaaaggtacctcgacattttttcaaactccttgtgacccatccatagacatcatttatatgaaagaaaaactctaaagtaattccgaaaactggccatagcattggtccacgcttgttggttaacttctcacgcaaacagcagaaaacaaagagccccaacaaggaaagaagtagatcgaagagagaaagatgattataaagtcgctctgttaaagacattgtagtctcttctcagtaaactctctgcagttttgtttgtggtgatgtcattgtttcaagagtatttgaagaaagatttgcgatgcatttcatattttggttttggaattacatttgttgtcttcgtgtagaattggtctatatgaagaagatgagggtttcttgttggcgacgaaacgtaattaggctattacaaattgtgtgtttattgagaaaaacccgtgaaagaaaaattccagaaaaaatgcaaatttgcctgtcatgtcttatgtgaatctatctgacataagctgatgacaaactgaaactcttagaatcaattaacaaacaaaagaaagagcaatcgttgttactagcaagtagattacaaggaataaatctgaaaaaagattatagaattttgactttagggggaagaggtccaaaacacagaggacgagatattttagttttagatatgttcagcctagttaagtattaatcaaagaatcctaatctatgatgcttcaatggcgatcccactgattcacactttcacagtctaaagactcgagaacaatcgaaagactcaagtaacaaacatcaagattgtaaaaaaactatcttgtagtgagtagtggtgacaaattcatgatttttgaggtttgatacgttatataatataaccaaaacttgtagcactctgcaaacacaattattattgatttacataacctgaccctttgtttcaagagtctttcactactgtgagtctctacttctctcctacatgaagcctaaaaacaaagctgttaataaattcgctgttgcattgagacagtaagtatgcaccaagtaaataaactcttcagtattcaacaatcaacacccatctttaagaaaaacataaattacttggtcttaataaccggacagaaccaaagactaatcaaatcctgaaccggtctggttcaatagatctaaacctaaagtataaatcaaacgtctcaattgttttttcctagggtttcaatctctctcccaaaaaccaaaacgcaaaacctccgataatg

SEQ ID NO: 18418 - DNA, 3003 bp, Unknown; identical to SEQ ID NO: 18417
  misc_feature (1)..( 3003): 2750-1469P.txt file - cDNA_ID_1817337; gDNA_ID_1621140; Annot_ID_172799

SEQ ID NO: 18419 - DNA, 3000 bp, Unknown; identical to SEQ ID NO: 7320
  misc_feature (1)..( 3000): 2750-1469P.txt file - cDNA_ID_1817345; gDNA_ID_1621140; Annot_ID_56615

SEQ ID NO: 18420 - DNA, 3003 bp, Unknown
  misc_feature (1)..( 3003): 2750-1469P.txt file - cDNA_ID_1817357; gDNA_ID_1621140; Annot_ID_56612
ggactagaaagatctcttacaactttaaagacatcggattcgcgccttacggtgaggaatggaaggccatgcgaaagctctcggtggtcgaactcttcaccgccaaaaaacatcagtattttaggtctatcagagaggaagagaatgacttgttggtcaagaaactaacagaattggctctgacacgatccccggtgaatttgaagaagacccttttcactttagtcgggagtattgtgtgtcggatcggattcgggtttaatcttcatgagtgtgagttcatcgatgaaaatagcatctccgaccttgttgacaagtctgagatacttgagatgacttctatgttctctgatttctttccaggaggaatcggtagattcatcgattggatctccggtcaaaacaagcgattcgataatgttttctcggacctcgacactttctttcaaaacattcttgattatcatcttaagcctggaagaaaagtagcagatagctctgatataatcgacgtggtgatcaacatgataaagaagcaagagaaagatggagactctttcaagctcacaacggatcatcttaaagggatgatctcggtaatgtttttggacctttattagttgtgtagactaatcttcccttttttaattaaatattcacacaatttttgttctgtcaggacatatttctagctggagttagcacaagtgcctccacactgatatgggcgataacagagttagttaggaaccgtaaagtgatgaagaaagtgcaagaagagattaggacaacactcggagacaagaaggagagaatcacagagcaagatctcaccaatctccattacttcaagcttgtggtcaaagagatattcagattacacccagcagttccatttttgctaccaagagagacattatctcatgtcaagattcaaggctacgacattcccgccaaaacccagatcatgatcaacgtctatgcgattgctcgcgatccaaaactttggacaaacccagatgagtttaaccctgacaggttcctagacagttccatagattacaaaggactaaattttgaactgttaccgtttgggtctggtaggagaatctgtccaggaatgacgatgggaatcacacttgttgaatttgctttattgaatttgctttacttctttgattggggtttgccggagaaggaagaggcggacaagatcatcaccggcaatggagttgctgttggcctagttcaagttcttctccactgaaaatctgatagatgtttctttttttggtttgcaacatttttttagtattggttatattgaatgcttgtgttttaaccttgcttttttctttagagacattctattaattagtaaccctaattgacatgagtaaaggaccaaaaatgttgtcatagcttagaaactctataatccaaaccaaccgaaaattttgaaatataccctaattgacatgagtaaaggataatttgacaaatttaaaatagtaaacttgcagtttgcactattgaaattaaagataatgttgacaaattctttatgaagccaaatcacattattgtataaccacaagtataatgtatatatttatatatagttggtaaaaacattcaagttcacaaccacatggtcattaattacacttgataggtagagagtgaagactaattcattgtgtatgtatccactacaccaattattcattgacttttggattcttatcagaaaagcatccgtgagtttatatgaaaggtcaatcgatcattaatgcataattccataattgtcgatataactcgattttgcaaactatattcttcaatcttgttgcaaaaaatgtcaatcttgttacgtgaataatggcatatgcattattatcgggtatcatcatttacaatcagagccaaaccaaacaaagagaactaaactgaaataatgttctttctttttttgtcgacatctatattagattgattcaaataactttcgatgatacgtacttaataaagacaagtctacgtaaacagacaaagaccaaaaattcaaaatatataacgcaaccaaaccggtccgcaaaaacgaatacttaatgcggtaatatgcctagttaaaatcgacgtaataaaagcaaaaatacaaccattgacagccctatagtcaactatagaaaaagataaaagtcaactttaaaaattgtcaaacgtttgtgagaaaacttgtacgtttagcaaaaagagattttgatattagttgcgttgccaaaagaagagagtaaactgcctaataatggacgtaaacgaatcaatatataactattgacaacctaaattacgtagtcaactgtataaaaaacgatcaactctgtcaattcaaaccttgacattatttgccaaaagaagagaagaaactgcctattaatttcaatataactaaaattattggactaggtctaaatagggtaaccaataaatttgaaaggtacatcttataaattacaaaattttggaaatttcatggaggcaattaagatttatgggcccgtggcaccccatgtgtttggatactttgacgatatttcagtttcaataatacatcattactcatggatgaagatgaaaaatagttttgtgctttaaagacagaggttgatggcttttgtggcatatctctctatagatcaccagtgttgacaattcttgtgttctgtcatctacagaattattcataattgttcatgtagcacaagtttttaaaacgatgaattctttaaaataattgacaatgactgaatgaataaatttattaaaaatgattatcttaacaaaaatacaagttgcaaccaaagaaatatatgattcatccaagtagtatataaaaataaaatctcactgtctatatatgtctctcattaaacacccaaatcaaatcgaaccaactaacacaaaagaaaagaaaaaaaaaacagagtatcaaacatg

SEQ ID NO: 18421 - DNA, 3003 bp, Unknown; identical to SEQ ID NO: 18420
  misc_feature (1)..( 3003): 2750-1469P.txt file - cDNA_ID_1817357; gDNA_ID_1621140; Annot_ID_172793

SEQ ID NO: 18422 - DNA, 3003 bp, Unknown
  misc_feature (1)..( 3003): 2750-1469P.txt file - cDNA_ID_1817361; gDNA_ID_1621140; Annot_ID_56611
tcattcaacaaaattctaaattttgtttttttaagtaaaaaatgttatagcataaatgttcagatttttatgtcgtattatattgaattaaatatagaacaaagaaaaataagatacagaacaaagagaaattttgatccaaaaaaaaaaagaaagagaaataagatctagaacaaaaacgatacattcagattgattattgaaatcaaataatcgaatttataattgaatttgatggaatttataatgtattttttgtcatggaaataataaagtttgttaatatagtaggcacgatcgaatctggagcttcaatttttttttaactaattgttatggaagatgctggaatgatctctttttacaagaaagctcctctcattcttgttccggttaaacaccattaatgacatcggcacacaaaaattcaaacaccgttgaagattgtttgctatactttatttttatcaataataagttgcggtacttggttaactgtatacgtacttctatttcttatagttgtgcgataattaccacaagtccaaaaaagtaaaatatgaatttgataaagcagtgtaaacctgagattttcaagatttgggcctaaacccattagagaatgctacgtagagaaccattgggcccataaacttattttattcccgcaaagcctgagtggattcgaaccactaccacaaaaagtaagagtttgggttatttgattttaatcattcactttgaattattatagacaccggacagtgacttatgataaagagatttttaacctttaaaactaaaacactaaaatacataatccaaagaagacggaacaaaaaacaaaaacagagccaggaataatgtcagtcttcctctgtttcctctgcctcttaccccttatcttaatcttcttgaaaaatctcaaaccatcgaaatggaagcttcctccaggcccaaagaagcttccgatcatcgggaacttacaccaacgccgggaattacatcccaggaacagtcggaatctttccgaaaagtacggaccaatcgtgtttctccgatacggattcgtccccgtggtcgtgatctcgtcaaaagaagcagcagaggaagttctcaagacccacgatcttgagtgttgtagccgaccagagacggttgggaccagagcaatctcttacaactttaaagacatcggattcgcaccgtacggtgaagattggagaacgatgcggaagctctcggtggtcgagctcttcagctcgaaaaagcttcaatctttcaggtatatcagagaggaagagaacgacttgtgtgtcaagaaactctctgatttagcttcgagacgatctttggtgaatcttgagaaaaccctttttactttagtcggaagtatagtgtgtaggatagggtttgggataaatctccgtgagtgtgagttcgttgatgaagatagcatcgatgatcttgtgcacaagtctgaagatgtcataaggaattctatcttctctgatttctttcccggattaatgggtaggctcatcgagtggatcttcagtgagaggaagagattgaatagactttactcggaagtagacactttctttcagaatattcttgatgatcatctcaagcctggaagagagagctctgatatcatcgatgtgatgattgatatgatgaagaagcaagagaaagagggagactctttcaagttcaccactgatcatctcaaagggatgatctcggtaaatctataatctttcaagataagtggttaaaaatcttgcatgcaacacagtttgtgacttttgttttgttttacgtcaggacatatttctagcaggagttggaacaagctccactacattgatatgggcgatgaccgagctgatcagaaacccgagagtgatgaagaaagttcaagacgagattcggacaacacttggggacaagaaggagagaatcacagaagaagatttaaaccagcttcactacttcaagctcatggtcaaagagatattcaggttacatccagcagctccacttttgctcccaagagagacattgtctcatgtcaagatccaaggctacgatattcctgctaaaacacagatcatgatcaacgcttacgcgattgcacgtgatccaaaactatggacaaaccctgatgagtttaaccctgataggttccttgacagctccatagattacagaggactgaactttgagctattaccgtttggatctggtaggaggatatgtccagggatgacaatggggatcgccattgttgaattgggactattgaatttgctttacttcttcgactgggggctaccagagaaggaagaagccaaggagatcatcaccgggaatgaagttgctcttgaccttgttcaagtttttctccactgaatgtgttttggttatggaatgtttgtactacactaagcttgattctaaattaataacatcttacaagtactgaaaatagtagacagtagacactatggtttatcttccattagaaacaattaaattataaaatcatttttgttaaaacagattaaattctctctttacacaagccataatactaattaattaagaatagggttacgctacgttgggagttgtttaaaagtacatattttcgtcctttttgcttctcccactaccatcaattagtggttgaaacagaaagcttatcagacagaaattggcattttcggatatgttggatgcacaaagtggtatataatacgtaagacttattcgtgtcaatcatgattcatgaagctatctaacctctacaagactacaaacacgtagaagtttggactactcatttaataatcgacaacaacccatgagctgaccataatgaatattattaaacaacccaagttgtttattttctcttaatcgttaagcacttcatctgaaatacaaaacccaaagaagaaagagattaaaaaaaactagagggcaacaaaaatg

SEQ ID NO: 18423 - DNA, 3003 bp, Unknown; identical to SEQ ID NO: 18422
  misc_feature (1)..( 3003): 2750-1469P.txt file - cDNA_ID_1817361; gDNA_ID_1621140; Annot_ID_172792

SEQ ID NO: 18424 - DNA, 3003 bp, Unknown
  misc_feature (1)..( 3003): 2750-1469P.txt file - cDNA_ID_1817365; gDNA_ID_1621140; Annot_ID_56609
ttgatgctttttaccagcatgtgattgatgatcacttgaagccatcaactttggattcctccggagatattgttgccttgatgttagatatgataaagaaaaaaggacataaagatgatttcaagctcaatgtggataacatcaaagcagtcctcatggtaaagttcaaattttggttcatatatctttttatttttcaaaccattgaataaacacttagtttaaactactaagcttattatgtatatatgtctgtttatgtgatgctcagaatatatttctcgcggggatagacacaggcgccataacaatgatttgggcgatgaccgagctcgttaaaaaacccttagtgatgaagagagctcaagaaaatatccgaggcgtcctcgggctcaaaagagatagaatcactgaagaagacctatgcaaatttgattgcttgaaacatattgtcaaggaaacattaagattacacccaccagttccatttttggtcccaagggaaacaatatctcacatcaagattcaaggctacgatattccaccaaaaacgcaaatccaagttaacgtattacgtatggacgatcggacgtgaccccaagcgttggaccgaccctgaagaattccgccctgaacggtttgcaaatacttgtgtagattttagaggacaacactttgactttctaccgtttggttctggtcgaaggatctgtcccgcgatatcaatggcgattgctaccgtggagctaggactgatgaatttgcttgactttttcgattggagattgcctgatgggatgaaagttgaagacattgatatagaagaagctggtaatgtcacggtagtcaagaaactacttatttaccttgtgccccttcaacgtcattgatgagaagttaaagaaagctccatgacatggaaagaatacgagaagataacctataattctctagatattattgcgagatatataagaattaattcatgtttgatgatcaacattccaaaaacaataatttatataataataacaaatcttctatttaaaccattttgcaatgattggattgagattcggtggctggctgtcactttatcgcagttatcgatctttttgtctaccaaatgatatttcaaagagtcaattagtagtatggacaaatatagtaataaaaatcaattatgattctgtggctactatatatggagtttatcaggccacagactgagacggaagaatgaggattatgatgttccaagagtagtggaaattttttagtaccaccaaccaacatttcgtcttaggacgagaattaaacacttgtagactttataataacatttcgtccaaaatagtgggcactaaaacaaatttattattttctttaaaaaaaacacgcttttcattataatcgagttcaaattttcaaaaactctagaagtactctatttacgatataaacccatttgaagtcaaggctaagttcacattcataaaatcatgactcatgagcgacgagatcaataataaacaaattttcagcctacatttctgatttcttgcacgttatatatagcttgaattgttgtgccagttaggtgattttaattaggttaacttctctacttaatttggatatttgcatgtggtgtctaccacgttacgtggttttagggttattatttatattttactaaagtttatatataaagttcgggctttaggaatcaagcgatcaagtcaaaaaaattgttggataaattttttaacgtatgttttgttttaaccaacttagaaactttgtatttctcgtggcagtttttttcccttttcagttctcgtgccaagcttaagaatatgaaaatatactaattgtgatggtgattcaaacccttaacaaaaaaaaaaaaaggtgatggtgattcatcacaaccatatcatcgggatgtcacattcaatactaaaggacgagacctccaccgaaacaaacatctataaatccaattttagttaatgtttttttttgtttgtttctgaacagttcaatagcctataagtagttatatacaaaagtaataatgcaaggaaacttggatctatcttaactttgattgatacaacagaattgacatattcaaaaaaatatggatgtcatattcaatttttattatttttgggaaataaaatacaatatggatgtcacagtgataatatattaatatgccagcaaacatgtaaaccatcatctattcatctacgtttcctctaagaagaaataaattggattcgaacagatttagaactctcaacgtcatcagaaattagtatatcaaagagagtggatttccaacgacatcattattttccaccatataatttaaacctcattaataaggtttcatttgccgtttaaaggcataatcatttgccgttttcctctataattctcttaaagttataatttaaaaccccaataaattagtaaatttgacaatgacataaccaaaatcctaattaattataaattttgatcaaaaatctattaaattttcaaattcgaagtctactcacctatttttaatcttactctaataaataaacttatctatctctatatatccatactatgtaatcgttgacttaaaaaggtataatattatacaatcgttgacattaaaaaccatataatatacaatgattgagaaactgcttatccactcaaccaatcaaaacaaagtgtaatcggaacacgtggattttgaaccacaagacttggtttatgcttgtgtcacatttatgatttcaacgaagataatatccacaaatctagtaacttctgtatgcgactctacaaccacttgatttgaagagttaacgtctcaatcacgtcgtcaatccctgtcactctatctctatcttataaagaagaagactcttcgaagttctaaactcatagaaacagagccaacaaaacaaaaacagaggaagaaaaacaaaaatg

SEQ ID NO: 18425 - DNA, 3003 bp, Unknown; identical to SEQ ID NO: 18424
  misc_feature (1)..( 3003): 2750-1469P.txt file - cDNA_ID_1817365; gDNA_ID_1621140; Annot_ID_172790

SEQ ID NO: 18426 - DNA, 3003 bp, Unknown
  misc_feature (1)..( 3003): 2750-1469P.txt file - cDNA_ID_1817367; gDNA_ID_1621140; Annot_ID_56608
tctgatttgaagttatgagagaaaaactctttgattgacatctgattttggtttatctccttctggatcagcttatttttattgtagcttctctgattttcgatgggtacttatattttttttttcaatttgggatttttcatgattctgtagggtttgcaaagatgaagcttgatactagtgggttcgagacttccatgcctatgattggatttggctcgagcagtgatatgcttgatgagctttcttctgtaccctcgtttgatctaccccgtactaaagaggtgactttttttgtttttgtttgtgattcgaagcagtgtgagtgaattttcaatgttgtttgattacgaaactggttttatttgttggtttcagtttgatggatttcagaaaaaagctaaagacatgttgaagcatgcaaaaggaacaaccactctcgcttttatcttcaaaggtggtgttatggtcgctgctgattctcgggctagcatgggaggatatatctgtatgttctcttttatcactttacttttagttttgtttgcagactttgacgatgtttagctgtgagctctcttaagaattcctccaaaaatatgcatcctttcgatatagttgactttggtagaaacactagtacaatgaagattaagttagcttgttgttggttttggttttgtgctggagtgtcaaacaaatttctagttttcattctgttggccattaattgtgaaccagtagaggaaagaaaacgttgtgtgatttttgttaatgttttaaatctgtttaccacattcagcctcacaatctgtgaagaagattattgaaatcaatccttatatgctcggtacaatggctggaggagctgctgattgccaattctggcacagaaatcttggaattaaggtacctaactagaaatctttttggccgtgtctgaactgataacttggatctttgattaatctttctctctgtggttatcgggaatcttgctgccttgttatatagtgatttttttatatatttctaaaagcagcagattcatttaccttatcaaatgctttaagttttagttctgtctatattaaagaatgacaaagattttgcttgtttgatgttgaccctaagatcatacaagcctctttgaatgctaagcatgcaatttcagttgagcatgtggtggctttagatcccctttttttctaatcaaacattctgtagcaagaaagttcagctttttttcctctgtacttagatagcaaataaataaagaacttagtttgttgaatgcgatgtgaaattttggcatgttaataccattgtagacttcttcattttatcaccaacatcttgtttgttgattttatggctgatctcttaatttatttgtctatccaagtgccgtctacatgagctggcaaacaagaggagaatctctgtttccggagcttcgaaacttcttgccaacatgctctattcataccgtggaatgggactttctgttggtacaatgattgctggatgggacgaaactgtcagtaaaaccaacttcatatcttcaacactgttattttcttcccacgcaaaaggaaattttgaaatgctaaatccgtttacttcttgtataatagggtcccggactatactatgtcgacaacgaaggaggacggctcaagggagacaggttttcagtcggttctggttcaccatatgcttacggtgtgctggacagcgggtaagtcatttcccaaacaacatcttcatcgcttttgtcccaatctcaaaggctaaaaaccaaaatctaatgatgttagttaagcaaccgtttcatatttatgattttacttgcatcatcaggtacaaatatgatatgtcagttgaagaagcttccgagttagcaaggagatcaatctaccatgcgacattccgtgatggagccagtggtggagttgctagcggttagtaatctgaatgcatctgtggttcaaatgtaatatttaactttcaagattctgatttagctcataagtttgttctcttctcatatgaccagtgtaccacgttggtcccgaaggatggacgaaactatcaggagatgatgttggggagctacactaccattactaccccgtggcaccagctaccgcagaacaagtcatggaggaagcaacagccgaataaaaatcctgtttagttttctaatcgttcactccctttcttgttgttgcattttgtggtagtatatactgagttgtctctagctgaagctttggtattctattttactgatctgaaatgttgctcgcggattattctctataagattctctttttctgcaatcacattcttctcttactcggtgttttaaattccaatatagggaattgtgattgttttgcaccattttgttagttaaccagtctctccctatccaactctatcggcaatcctcacagatttgctcgtgatagctggtggctggcgttgtagagactagagagcaaagcttagtttggaccacatgaattgcttcggctctgtcccatcttttttatcaacctaaattcccaatgatgataacatccaccaactagaagagaagagttcatggttttgctttcgtctctcgtttcatcaatcttttttaaacacccctcaggaaacttgcacatcagtcaacatggaagtgtctcagtggtcgacaagggcatagttctgtcttaaatgatgcgatttttaccaaacggcgttcctattagcaacataaaaagccatgaggtccataactcgtcttcgttcaatgatccaatcaatcaatcaatgatttttgaaccacacgacatgattatgttttttttttgtcgcattcatgacttgaaaatttaacgtatcgatcacatcatcaaccccttataaacaagactctttgagattctaagctcatctatccaagaaacagaaaccaaggaaaccaaaaacagaggaaggcaaaaatg

SEQ ID NO: 18427 - DNA, 3003 bp, Unknown; identical to SEQ ID NO: 18426
  misc_feature (1)..( 3003): 2750-1469P.txt file - cDNA_ID_1817367; gDNA_ID_1621140; Annot_ID_172789

SEQ ID NO: 18428 - DNA, 3003 bp, Unknown
  misc_feature (1)..( 3003): 2750-1469P.txt file - cDNA_ID_1817398; gDNA_ID_2926149; Annot_ID_197938
ttttcatactccacgtaaaagagatatgttcgaggcatacatcaaatattataatcaatcatcgtgctaacttatactacaacaaaatattaatataaatttactatccaatcttacgaattcgtgcaaaaatcatctaatttttttgccacaatggcaagaaactattaaattttgatgacgtggacacgcacatgtaaaaaacgtggatgtcaagtcataatgttaacaaactgttttttttttcatttccttcaattctggtttttgttttttaaaagttgtgtataaacataaataaatatatatatttatttatatatttccaatggattctccaaaactcttatactcactttcagcatattcttccatcgtgaaaccttaccaaaaaactaatattaaatttctatggtcgtgagtatgcttaaaatgtacctactatttatgtgtagtggtttataaaatctaatattattggaaacattttaaccattgaatttttgatgacttaaatttttttttagataatttaattcgttaaaaatgtaaagatccaaataacatggtgttaagtgtccctactaaaaaattaaaagtggtgttaagtgagacttaacaacaaatcatacaaatttcagaattcacctaaaatcattaaagtcatccaaaaactcattaaaactcaaactgatttaaaatataagattaaatgttttattctatatcacttagaaaactgaaaataaaataaaattgtttgttaacactatgatgtatcattcacgtcgtttcacacatggtctacattatctattatagtttcttgccaccatgacaagaaatgtataattttgcacaaaatcataaatttagatggtaaattttaattaacgatttgttcacgtatgaattagtattcatacttatattttaattgaacttgtcgctttagttgaggtaagaaaatactataatagtaatgaaatctcaccaaataacaatcaaaaatttatttcaatcacataagatcttgtcaaaatccaccaaatcatcatgcgtgtttttcaacatctctccaaatcttctaaaaattactaatccaatacaccgcctaactaatgtatttggtaataactcttgatatgtacaactaatttacgtgttctccaccataggttatatctgttaactagttacgtacgtcgaccaaaaacatattactttatcgtggttttatcgttgaattattcactttcatgttgggatatcaagatttgaatctttcaatcatgattttaattatagttgtcaaatgtcatatcaaaaatatctattttcttatagtttttaactgattagtatgagtttcgatttggaatatttcagatatgaacatacaactaaggaacaaaatattgatattagtttcctatatctttttatttattttaaatacaatagcagatcacatgtatatattttaactcaatagttacgtcgaccaaaaacatataactttaaatatcgtggtttcattgttgatttattcactttcaggttgggacatcggaatttgaatttttcaatacgaattttaaacatagttaaatattttcttatagttcttacttcttaacgattagtatgagtttagatttggaatattttaaatatgaacatatagttaaggaacgaaaggcgatcacatgtttgtagttcacctaagtattgtagttataatctcatccagtacctggagcagttgagctaatctttagattaagcttgggcaaaaaatccggactaaaatacttgaaccgaaaccgatccaaaaaatcggtttgggacgagtacggatattacctatttactttattgagtcttgaattgtcgtacccgtgagtatagggtaaaatccaacccgaacctgatactcgaacatgtatccgcttacccgaaattacatatacttattcatagatttatatatataaaatcttattttatatttaatatttgaactaaatacatttatatccaaatatctaaaaataattaccaaaaactaaatacatttgtaaatacttaagactaaatatttttatacgcaagatacttataagttttttggatattgggacaaaatttcggttatgtgggtaaaattcagatatttgggtaaaatattcaggtatttagataaaattttagatatttggctataaaatacctgaatctcaaagatacccatttttttggtatttagcggttctaaaattatatatccgaaccgacccgaaccccattggatccaaaccgaaacaaaacagaaattttagatttatcttattgggtcctaaacttttctacccaaaaaattcttatccgatcgaattttacccgaatattccgacccacatacctgaatgcccaaccgtactttagggaattacatccgatgcacaaaagaactaacaattttgtactatcattaacaccacccatttgcaactccgaaagacgatcacatattgtagatttaaaatgcaatcttaatcacattttcactaaaagttttccttaacgtatttggtgggcatgatttaacagctcaatttggcaggtcaacgaatcaaccgtgctttaaacgttgtaatgtttttcaacttaagataagactcgaaatcaattaaaaaaacaaacaaaaatcatagtcattgtttttctttgttaattcatatacactcatacaaaacattgacaacttatctattgtttaatctaaataatacaattatgtacaagtgttactttagtaatactgccgtccatataacggcacaaaacggagaatgacgtcaccattgttgatgtcacacctccatgtaacttctgttataaacgcattaaacgttacacttgtgtatattatatagatctctgtccctttatatttcatcttttgacattacaaaattacattaccaaacacattaaatg

SEQ ID NO: 18429 - DNA, 3000 bp, Unknown; identical to SEQ ID NO: 7342
  misc_feature (1)..( 3000): 2750-1469P.txt file - cDNA_ID_1817398; gDNA_ID_1621141; Annot_ID_56640

SEQ ID NO: 18430 - DNA, 3003 bp, Unknown; identical to SEQ ID NO: 18428
  misc_feature (1)..( 3003): 2750-1469P.txt file - cDNA_ID_1817398; gDNA_ID_2926149; Annot_ID_139231

SEQ ID NO: 18431 - DNA, 3003 bp, Unknown; identical to SEQ ID NO: 18428
  misc_feature (1)..( 3003): 2750-1469P.txt file - cDNA_ID_1817398; gDNA_ID_1620685; Annot_ID_48440

SEQ ID NO: 18432 - DNA, 3000 bp, Unknown; identical to SEQ ID NO: 7342
  misc_feature (1)..( 3000): 2750-1469P.txt file - cDNA_ID_1817398; gDNA_ID_1621141; Annot_ID_172843

SEQ ID NO: 18433 - DNA, 3003 bp, Unknown; identical to SEQ ID NO: 18428
  misc_feature (1)..( 3003): 2750-1469P.txt file - cDNA_ID_1817398; gDNA_ID_1620685; Annot_ID_164585

SEQ ID NO: 18434 - DNA, 3003 bp, Unknown
  misc_feature (1)..( 3003): 2750-1469P.txt file - cDNA_ID_1817421; gDNA_ID_1621141; Annot_ID_56633
atggtgaggcatagaggtgtcttacgcgaatccatgagagagtctggagatatgctcggaagcgtttagtattgttgctcgaaggaaatgagggtcccaacgactcgtgaggagcggggtatgctcctaaggtaccggtaactcgagggacatggtgtctttagagtacgaggggtacggtggcttcgggtgacgatccgagagcacgctttagggtgacgatccgagagcgagttttgtggtattattttctccaagtgtcgtaactcgatgactttgtggctgagagtgagccgacacaactcagggtttgactttgagtggggaagataatatgtgtgatatccgagataccgtaggccgaggcctgagagtgacggtttatgctcgaagattgcggtctgagagtggagagtaagttgtgagcaacaatgactagtaaatcgtgagtatatcgactggatagagagacctagagggggtctggttggagggaatgcagactgtagtgatggttgcacggagttcctcggagtggaagggtgaagctagattcgaagacgaatctatgttagtgggggagaattgtaacgcccgtgaaccagaaaatcggttaggatttgtttttaaatcatccggtttaattggttgggttaattggaaaccctagagtgtgcctataaaagaaggaaactcgaaattagggctttagttagccacttttcgttttataaaggagaaaaagagagaaaaggagaatgagcagaatcgttagggtttgggagaaatcagtttcgtcatatcaaatcgtggtaaaaggtaacaaaatttggtagagttattcccaaatcctttatcgttattctccagtttacagaattgaatttggattaaaattggttgagttattcgcagtttcgtgagacacgttttctcagacgcgaattaggaccagcggagattgaaactgagatcgtggtctcgtctgttttccgatcggcacgagattttgtgggcagctttgtgacgtctgcagctaggattttaccggagcgattgaatagttaacggttagcttgtattttagggtttcgtctttgagactgtttgtttctggtgttttcctgtccagtttgcttcaaggttgcttttggttgtggacttgttgtaggacgtttctggactgtttccgacgcaaggagagtctctcctgggtttaattgctattagaatcaatttgttaaggtgagtgcgtgaccatgagcttatctaagcgattgggttgtgtgatttgttttgtgtgatgatatgtaagtgttgtgaatgtgttttgggtgaattgttcaatgactggtttgtttgtattgtattcgtgattatacctttgtatttgcttgtgtgtatagttcgtagatgggagtatcgcctcactaagtatttatgataatacttacgcatctcattgtgttgttgatgcatgtaaagataaagtgtgatcgtggaatcataacaaggaagagaggatgatctaggaactcgtttgttttatttttggtgtttttggttattggaacccggttaggattgtcagttattcttggttttgttggtcgatttatttatttattcataaaatagtatttttgacttgcagtttaattattatgttattagttggtttaattaaatatttatgagaatatttaattatatttaaaaaaaaaaaatgggtcaagttgtttcacaaacatttaaatatttctagatgtacctttgctctttttctcttttcattcattttagaaaatgatgaaattattataaaaaattcaaaaactgtattaattatttcaagttacaattctacgtattagtatacaaaaaagatcattataaaaaagttgtcagccaaaatttaatattaaacatcccgtaagtttaacgaatccaatgtatttcaagcagaagtccacatcagttgtctccgtgtaaaatggtatatgtctttgaaaagcatcacgtttgtaaatggaaacacaatgaacacgattacacgaataataagttaataacaacaaaggaaacatgatgtgtttgatgaactttgtggttgtggccatatttttgagaagaaacaaatctatttggtattttctatttaatatgtttgaaacattttatttatactgatatccgaaagcttaatataacaataataagtaatgtaattgtaaaataaaattttaattcatcactttaataaagaatatatttaattaatcatttttaatttatctatttttacattatattaactaataattaattataaaatagtaatatttatcaaaatgatcaaataaaataaaaatattaaataaatagtttagtaatagaaaattgtatttttattatgcttctgttcctttttgtttgatcttttaggaaaaatacaaatattaagaaaacgtattaaatgttgttttaaatgtattattttttgtgatttacaatttttaagaactctaaaccaataatatttaataatttgtattgaagtttacaagttatcaattataactaataattattgcattgaaaacctaaaaactcaatttttttgaaataatttgtttttcttaaaaaaaaaaaaggacaaagggagtattaggtaaaagtttgatgctaaaactatactcaaatggtgtatactgtattggcaatggttcatggttgcctggttggtagcaaaaaaacacagatataattacgttaaggctatcattaaacaaagagggtctcgcaattaaaactacactaattcattgtttacaagaaaagaaattgttacttctttggaaattggccattgttaattggaaatcgtgaatccaaccaacaagacatttctctgactctcttcttccttcttctcctccaatttagggttccttcaaattctctctgatttcgtttgaaattgggggctcctcttcgaagatg

SEQ ID NO: 18435 - DNA, 3000 bp, Unknown; identical to SEQ ID NO: 7347
  misc_feature (1)..( 3000): 2750-1469P.txt file - cDNA_ID_1817437; gDNA_ID_1621141; Annot_ID_56627

SEQ ID NO: 18436 - DNA, 3000 bp, Unknown; identical to SEQ ID NO: 7368
  misc_feature (1)..( 3000): 2750-1469P.txt file - cDNA_ID_1817448; gDNA_ID_1621142; Annot_ID_56659

SEQ ID NO: 18437 - DNA, 3003 bp, Unknown
  misc_feature (1)..( 3003): 2750-1469P.txt file - cDNA_ID_1817451; gDNA_ID_1621142; Annot_ID_56658
taatgcttattgctccgacaagattgaaatattatcaagaagatgtagttgcacccaaagtgacgtacggacctgcaaaatgcagaaaagaatcagcaaatgatgagaaaacaaacaaagagagttcaacatttctatcttgatttatcggtcactaacacaccctttgattctaatcacgataaggcgtgagatcgatttggaactgttgtttcccctttgtgacactctgcaaagatgttataagagccaatgttacaacaaaaggaaacagattaaatttttatgggataatgtaaagggcttaccgcgattgcaatgagctcttctagcagttcttctagatgacgcagaggctgaacgggaagaaaaacgatgatcaagaatgcattgtgttagactaatggatatggtctgaaaaaaagtaaaactcacccattgtgttggaccatcgaccggtgcatttaaaggatcatcatgcacctaattcaccggaaaatgaaccaagtttcataaccaaattggaacaaagattcagcgagatgacaaaacttgcgataaagttggatacctccatgaaaattccatcgacaccaacagctacggcggttcttgctatgcatggtattaattcgcgaaggccaccactagcaacacccccaccatctaactatataaacaaggtatgtttgagtttagaccaattctgatttagctttaaaacaccaagcattttcttaaattactcagagcatcgttctaatgaccataccttcttgcctgcaggttgttgtaatgaatgagttatatcagcaacctgaagccaataactaaattatattatacgagtgtcaaaacatcaaagtataaagccaaagccaagatataaactcccacaacaagaaaagaacaagaagcaatattaactcacaacgggacaatcagcttccctcatccattccaaatttcgtggatctactattaaatcatctgaggaacaaaattaaaatgtaaggacactcaggagttatatccagtgtcttttagtctattttagtctctatttgcaaaaaaattggtgaattctattgacacaaagaacagttaacttactgtatccaaacatggttcctctttcacaaaccatcacatttggattccctgcgagtctaaccttctcagccgagtttctcatgaccttaaaatggatatacatgaaatcagtcactacaatataccagggaacaaaagtttgtacagatcaaaaagataactcacagagtgaccacaaaattgtcctttctttatgttgataattttcccactttgggctgccgcgaccagaagatctgtctggagatataggcaatagttaaaaccctgaactctgtatataaatgataaattcaaacagtaaatgaaaatttgatagctaaaaaagagttgaagaaaagcatatgttagaatcttgcctgtcgacataagaacgccggtatctgaattatatctgcaaccttgccaactgcttcacactaataaaaacaaacgaagcattagaaaggaacaaagatttttcgaatcttgaatctctgatgtgactaaaactcaaaatacctgactcgactcatgaacgtcagtaacgattggtagatcaaatgctactttcaccttctcaagaatctgtcgagagaaacagaaaagttactacctgtagtatacttgtgcaggaactacacacaaaaaaatgaagccacatcaatactagtttccgtaaatgtaaatggttgcattatagccaggagctaaatgcaattgctggtgtcagctcatactgaaggttctaaaagacgtaagaatttatagatataagatcgctttgacatcaatatactcctgaaggttttcaaatgcgcagttctaagagcaccagataaagagtcatccatgcttgcaactcaaagaagagggaatgatttaccttgagcccctcagccatgccaggacctcggaaggactttgatgaagttctgttagctttatcgaaacttgacttgaaaaccagaggcaacccaagcctacaacattcacaatcaacatgaacatgcataactataactatataagtaaacaccttgctcaataagctaaaatgctcatgtgatgagaggatcaaggtctccactgtgttaaacatttttcccccttgtcaattattttaatagttccaacacagttgaacacaagatgtcacaacaagaaaaagagcttcaatggtgatggttacacatactttgtcgaaatatctttgatgcttttagccatacgaagaacatgctcttcggattcgatcacatttggaccagccaataagaaaaacggctcagcaacctgcaatgagtcattgtccgtacgataagataactcaattcaccggaagaaaataaaaaaaataacactgaacctagtaaaaaaaactcaaccttgagctgatcatacagtagtgacgctgaattcgccatttctatagtagagcttaagatcagataacaaaacctcaacttccaaaatcagaatctaaaattcacgaaagaacttatgataatttctctacattgatctgcatcgaagaaaatcacaaatcaaggatttaggattctgacctttaactggaagttgtagtgtgagtgaaggcagtgagatgccaaaatagaaattgccaatggccgagaggtgatgttcggatacgccaacagtactgtccctggcgtggataatcattatccggttttaattcaattcatagatcgttaaaccaatcggttaataaataaaattctatttgatttggtttaatttcttcggttccggttttatcttttcaccaacattttcgtttgtcatctttcgcacctaaaccttcacctactcctccactgaaccctagcttacactcactgttcatttctctctattggcatcgacgccattgttggactgaagatg

SEQ ID NO: 18438 - DNA, 3003 bp, Unknown; identical to SEQ ID NO: 18437
  misc_feature (1)..( 3003): 2750-1469P.txt file - cDNA_ID_1817451; gDNA_ID_1621142; Annot_ID_172870

SEQ ID NO: 18439 - DNA, 3000 bp, Unknown; identical to SEQ ID NO: 7366
  misc_feature (1)..( 3000): 2750-1469P.txt file - cDNA_ID_1817455; gDNA_ID_1621142; Annot_ID_56657

SEQ ID NO: 18440 - DNA, 3000 bp, Unknown; identical to SEQ ID NO: 7365
  misc_feature (1)..( 3000): 2750-1469P.txt file - cDNA_ID_1817459; gDNA_ID_1621142; Annot_ID_56656

SEQ ID NO: 18441 - DNA, 3003 bp, Unknown
  misc_feature (1)..( 3003): 2750-1469P.txt file - cDNA_ID_1817462; gDNA_ID_1621142; Annot_ID_56655
tgcaatcgtgggaaaccactttgatctaaaaaactgtggacgtagtatttaatcattccttatcataatccaaaatgtataataaaaagatatctctacttaacgtggccatatagaaaaccttttaagatgaaggaaagagtaatgtaaaagaattggtaatggtatacatacatactcgtgattttatgaccatggctttttgcatcactagtgagtaatgcccacctacttcgtcaactcaacaacttatgaataactattcaattttttttttgccgattatgtgcacaattttaaaacagaagacaaatgtaaagtatatgactataaaatattgactaaataactttccggcgattttgttagtaaatgttaagaaaatttgttctttttccttgtagaaaaggaatgattctaaattactatcccaaaaaaaaaaaaagtaataacttgtttcgaagagtttgtgtgtgagtcgtatatgccgcttaactcctatattttctttctctttctcacaacttcccctagaaacacttttttcggaattcgaacgcacagcgatcggataatggcgacggagcatataactcgtacgggagatgaatacaatgtcgagcttttacctagtgacgacgatgcgccgccgcttgaatcgtcttggcgtctcaacctcgacgcttttcaactcccttcttccaccggtggccgtcacgacggacgtactcgcttttctcgctattttcgtactccaagtaatttttttattcttcttcatgtttttgttatctgctctcaatccgtaaagtgtgcatagagacgtgtacgtaaaatgatcagcgaccatgacttgtgaattgtggatatgaactttgatcatgtgtatgaaaaaaaaaaaagtagttatacaaatgtgtagttgttgaaatttttttgggaaaataaatttagaaattcagtctagaaggaaaaaaattagagtgaatgattctctctgtttaaaaccccttgctattgatttgattcagtataaaactttttctttttgttgattcaaagtttttgatgggatctttagcttctcttttggagtttgtatatacccatattctttgttttaaagttatgtggatgctgaatcagattaatctctacagaggttataaggcgttttagagtgatttgagaaactgttatacccatcaaaggtcgactatcaaattgttaaatcttgaaaatggactttaactttgaacccttttctctgttgtctcaatgcaggaaaggaacgtagagtctctgaatactacaagaagcaagagaggctcctcgagggtttcaatgagatggagactatccacgaaaatggttttgcatctggtgttccaactgaggtctggcctctactgttctttctttagtttttttttcttatggtatagatattagatgaatcctcaagcttgtttggtttgaacaggaagaaatgaagaagcttgcaaagagtgagagacttgcggttcacatatcgaacgcaacaaatttggtgctttttgtagcaaaagtttatgcctctatggagagtagatccatggctgtgattgcttcaactttggactctcttttggatctcttgtctggttttatcctctggtttacagctaatgccatgagaaaaccaaaccagtttcactatcctatcggaaagcgccggatgcaacctgtggtatgcttcttctgttttgatctcttaacccctttgtttggaacttacttgtctcacaagaaaatagaactgataatgtaaatttacagggtatcattgtgtttgcttccgtgatggcaactcttggactgcaagttttgctagagtcaggaaggcaactagttgccaaggtactttacatattttcaggtaactgctttcatcggttaattaatgtatttaaccaattctgttttttgttacagagtggtattcatatgaatagcacagaggagaaatggatgattggtatcatggtctctgtcaccatcgtgaagtttcttctaatgctttattgcagaggatttcagaacgaaatcgttagggcctatgctcaagatcacctctttgacgtcgtcactaattcaatcggcttagcaacagctgtcttggccgtcaaattctactggtggattgatcctaccggtgctatacttgtaagtaactaacttaggaatctaaaatgatcaagaaatgtctcgtcggattactaaaacgttttttttttcctttttatggttgcagattgctttgtacaccatagcaacatgggcaagaaccgtactagagaacgtccattcactgatcggccgctctgcgccaccagatttcttggcgaaactgacattcttgatatggaaccatcacgaacaaattaagcatattgacacagtaagggcttacacttttgggtcacactactttgtggaagtggacattgttttgccagaggacatgagactacaagaggctcacaacatcggagagactcttcaggaaaagctcgagcagctcgctgaagtagaacgagcttttgtccacatagactttgagttcactcatcgtcctgaacacaagtgtaactagattttaagtagtaatttgtagtactataattagttctttagtttatgtactcttcgtgtcgtttttgtctatatagatacttgaacgttgtgccgtctctgtttatcgaatgcgcattgtgtgtcgtttgaagctaatcgtcgacattaatagcgtttcaaacactaaactcaaaataaagataaaatcatatataataaaataatgaattttaaatgaaaaccactcaaaatggtttttatctatcttccgacaaaattccgtgcttcattgctcttctccacaagacaacatttctctggctcagaatcgacgccatggaaatgtaaagaagaaacaaagacgagctctcaaatccagcagcaatg

SEQ ID NO: 18442 - DNA, 3003 bp, Unknown; identical to SEQ ID NO: 18441
  misc_feature (1)..( 3003): 2750-1469P.txt file - cDNA_ID_1817462; gDNA_ID_1621142; Annot_ID_172867

SEQ ID NO: 18443 - DNA, 3003 bp, Unknown
  misc_feature (1)..( 3003): 2750-1469P.txt file - cDNA_ID_1817466; gDNA_ID_1621142; Annot_ID_56654
catactcttttcccatttagttttccttactcatagtaactgatccacgtgcttgaacacgtaatattaatcatacttaaaggcatgggataatatatcaaacttaaaccaaatcttctctcctcctcttatgcaggcttacatgttcaagtatgattctactcatggaaattacaaaggaactatcaatgtaattgatgattcaactttggagatcaatggaaaacaagtcaaagttgtcagcaagaggtattgcctcaaaatgttgactcatgtgtatctgtctagtatggtcaaattatgaatcaatttccactaatatcctattggtagggttttatgcttatccttttttagagtctaacatcttaattgttcttcctcagagacccagctgaaatcccgtgggctgatcttggagctgagtatgttgttgagtcttcaggggtattcaccaccgttggacaagcttcatcacatttgaaggtatgcactttcatttgaacacgcttgttgatctactagtttcattgatgctaacatttaataccaagccttatattattaataattccaaacattcaactcctaaaatggtctatgattttcttgacctttcattgtctgtgcagggtggtgctaagaaggtcatcatttctgcaccttcagcggacgcgcccatgtttgttgttggagtaaatgaaaagacatacctgcctaacatggatatagtctccaatgcaagttgtaccaccaattgtcttgcacctcttgccaaggtttgtagcattgcatttttgtcctgtatatagctcattatgaagagcttcattaaagtcaaataaagttgtctatggcccttaagcacttgtatctggcaggtggtgcatgaggaatttggtattcttgaaggcttgatgacaacagtccacgcgaccacaggtatttgatccttgtgccctcttgttatatgtcactgtatattactgaattttcgagactcaactatgtgttttttttaatcttattctttgcttttgaatattcagctactcagaaaactgtggacggcccatcaatgaaggactggagaggaggccgaggcgcaagtcaaaacatcattcctagctcaacaggcgctgcaaaggtacccaaatttgtacagttatatataaacatagcatctggaatcatatttaagccatgacttttttacttgtctcaataggctgttggtaaggtccttccggaactcaatggaaaactaacaggaatggccttccgtgtcccaacaccaaatgtctctgttgtggatttaacttgtcgacttgagaaggatgcatcgtatgaagacgtcaaggcagccataaagtattactctcaaaacctgttcaactaatttgcgtaccattctctatacatgaataaaacatggaacttgtaataacatctcatgattttgatttgaaatctctaacaggtttgcatcagaaggaccacttaggggcattcttggatatacagaagaagatgtcgtctctaatgattttcttggagattcaaggtatgtcactcttaaatattgtagcggatcatttaaaatcttggtactcaaaggttgtggccattgtcaaaaaaattcaggtcaagtatctttgatgctaatgctgggattggattaagcaagtccttcatgaaacttgtctcctggtatgacaacgaatggggttacaggtaacagttagtctctctcatttctttaccatcacatttaccatttgacaatacccaaagactaaaatatgcgtgggtcttgtaatgttacagcaaccgagtccttgacctgatagaacacatggcgttagttgcagccagccgctaaaaccatatcccgccaacgttcgttaggtagtttttgttacattgggggttcgattactgaaccttccggttttggctccaagttttatgtaaaaccatacgatatctaataatatggggaagattttttttgttgtacgaagaaatattgttagcagctagtcgaaaccttttctatatataaaaattggtttccaaagattggaattttctggttatatggttttttgttagcttcaatatctcatctctaagttatgaatattcgaaattgtgacagtgaaccatcgatgagtacacgaagatgtaacgttgagaatgagattatgactttgtacagcgtagtatatgatgaaatattgacgtgacatccacttataggcaaaatgatgtgatagcaaataatatctgcaaagtaaaaacataaacgatctataggactttgttaataatacgatgcaacataaaaacccactcagagaaaatgctggtaaaaagaggaaaagtgtgagttaacaaaaggcagaaggggacaaaaagctttatgcaatcgtgggaaaccactttgatctaaaaaactgtggacgtagtatttaatcattccttatcataatccaaaatgtataataaaaagatatctctacttaacgtggccatatagaaaaccttttaagatgaaggaaagagtaatgtaaaagaattggtaatggtatacatacatactcgtgattttatgaccatggctttttgcatcactagtgagtaatgcccacctacttcgtcaactcaacaacttatgaataactattcaattttttttttgccgattatgtgcacaattttaaaacagaagacaaatgtaaagtatatgactataaaatattgactaaataactttccggcgattttgttagtaaatgttaagaaaatttgttctttttccttgtagaaaaggaatgattctaaattactatcccaaaaaaaaaaaaagtaataacttgtttcgaagagtttgtgtgtgagtcgtatatgccgcttaactcctatattttctttctctttctcacaacttcccctagaaacacttttttcggaattcgaacgcacagcgatcggataatg

SEQ ID NO: 18444 - DNA, 3003 bp, Unknown; identical to SEQ ID NO: 18443
  misc_feature (1)..( 3003): 2750-1469P.txt file - cDNA_ID_1817466; gDNA_ID_1621142; Annot_ID_172866

SEQ ID NO: 18445 - DNA, 3003 bp, Unknown
  misc_feature (1)..( 3003): 2750-1469P.txt file - cDNA_ID_1817470; gDNA_ID_1621142; Annot_ID_56653
taaggctttaatgcaaaccataaagaaacgaagtttggtcacaaacttacgagtataaccatgaagcggttgagtagtccactccgagtattcctacatgtttcttaataccgttcacaaaccgcatgcacacagtatcagcaatcgcacaaacaagaggctgcaccagtgatatggaacatattttatcagaatagcaaatgaataaaccctaaaagatgcccaatataagtttcctcagcaggtgataattagcggatatgcacacttacaactctaattcctttcgtgctgaagtactttgaaacaattatttctgcaacagcctaaaatagaaaatatagcattacttggaaggcaacatggtgagaacaattttggttattgttctacgggaaatatctgtcaaactgcaagctcaattaaaagacacacagtaccttaagttcccctcgagaaaggtaaggcctcttttcaccatcttgtgaaaaacgaacctttcccctttcttctttagattttgtccactctttacatatttcagactgattccacatatcttccatatcttcgggggaagctcgagagtcccagtatgtgaaatcggtgtctgttcaaccggagggtatatttcagttcatatcagaacttataagagaatgatagaggttctccaaatatgagcatagagctaaagcattgccacactgcacgatgctcctagagatctttatatgtttgacataggtgcatgtttatacacgtggagacattgttatatgatacagaacgatacaaaaagagggagagattacttgagcctggggaagcgggattcgtaggacgaaagcttgaagggccagcatcgccatgttttctgcaacaacaattaccaaagagactgaagttttagcttcgcttccctcaacttcttggtgcaactaccttattagtagtatgaacaaaattaacaatatgaaagcccacggcaacacaaaaccttatccgtgcaaccatgcataaaatatgacagcagaaactaggtacatagagcaagcagagataagaagcaacaaccttgaagggagactttctttcactgcaaggtatcgtttccaatatggcaatgtcgacttgtgagtcgccttttttgtcccaccattgtatgctctgacaacaaactcttcacttctctggctgcacatggaaagtaaaatatatttaaagtaattccaagaggaacttagacttgttgtcactgaaattgtaaagctagcaatgtaagcttagggacaatatatatcatacttattctgatagtctgttaaccatttcaggtaagctgccccaaagtacacatttataaagggcttgtgaagaagatcaggattgtcatctacattatatgcctgatagccttggcccctgcaataaagattgaccaaaaccggaacataagatttttttataaacttaagatcttcttgaaaaggagagaaactagaaatcgttttgtacccagccaaccatgctgctgtcttttcgaaaacttgtaaaattccaaggccagtttctttggtctttttgctgtaccgcataatgagaggctttcggtcactttcaagctcagcaattgcacatatcatttcctgcagaggaataggaaggtgcaaaacttcaagatcataaaggggcatagataatttcaataacctaaacagtagctaaaaccaagctcaaaactactagttttctaatgaagcataccgaatccaagatggaatcaaaatgcctccggacagttatatcagaaacagcctgaaaatgtaaggggttgatctcaataagtagaggcagaaagaaagaaaggtctaactagaaatccacatcaatcttgtattggaatgtttgaaatttcttatagattaccctcatctcggtctgtgtaagataaggctgaccatcaggatcccttgagaggtgaaccttctggcctttagtctctccaacatcaatccattcagcactgaccgcaggatccatccacatttcttctaaatcctctggctcaacacaatcattccagaacgtgaaactgttggccattcttgcattgctatacgacctttccattgatatctatcagaaacaaacgaaaaacaagaggaaacagaagcttatttagaacacatcgttaacaacatccataagtaacatgtttgccaaatgtaaagaagaaaatcgaaatatcagacctagccgaaggcttaagcgggaaggaagagaatatcgacgagagaagcagaggaagaaggtttctcggcgaatccagagagaagaagatgatgaagattcaaattaatctctgggaaattcaagagatacagagaattcgacggttcgccatttttgacgggagagccaaaaaagcaaattaatcacacagaggggactgtgagacgagccaactgcagaaacagcacgattctttcgaagaaaatgccacctggcatatcggagctggctcagcctcgtcgtcgtttaagttttaacagtacagaagccatttttagagggagagccagctggacttgacacgtgtcaaactaaatcaggcccattttattttcgcgtggcaaaactcaataaacaacaaaagatacgtcaacgttattcaaatatgaccaaaggcccaccaaatcatgggccttgacgccgatccggtacacgcggctttgtagttttcctccgtgaaatctcaacccttagatctcatcgcaaaagtagttacgatgggccgcgacgcatcagaacacagtcatcgtctttgcagaatcgtaagcatattttacatgagaaattgcaattgcaatttgcatttgtctcatttttttactcaaacgaacattttcgtggctccagagctacactcaaaagccattcagcggaaggggttaggatttttggcggcgagatctctctgtttctggtagcttagcaatg

SEQ ID NO: 18446 - DNA, 3000 bp, Unknown; identical to SEQ ID NO: 7360
  misc_feature (1)..( 3000): 2750-1469P.txt file - cDNA_ID_1817474; gDNA_ID_1621142; Annot_ID_56652

SEQ ID NO: 18447 - DNA, 3000 bp, Unknown; identical to SEQ ID NO: 7359
  misc_feature (1)..( 3000): 2750-1469P.txt file - cDNA_ID_1817478; gDNA_ID_1621142; Annot_ID_56651

SEQ ID NO: 18448 - DNA, 3000 bp, Unknown; identical to SEQ ID NO: 7359
  misc_feature (1)..( 3000): 2750-1469P.txt file - cDNA_ID_1817478; gDNA_ID_1621142; Annot_ID_172863

SEQ ID NO: 18449 - DNA, 3003 bp, Unknown
  misc_feature (1)..( 3003): 2750-1469P.txt file - cDNA_ID_1817482; gDNA_ID_1621142; Annot_ID_56650
caacaatccagagcttagagttccacctgcattgtaagttgatcttttcactttcaatctaaaaaggcttatgcagaaacattatataacttacttaaaatggctggccaagttttctcacatctatatgatccgagaacattcacacactttctctttccacatttatttagatgtggatctctgcattcatcaatgtctacggacacaaaaattccaaacttcacataaggttatatagtacactcaagccctctattcaaagaagttaataggtaccttggcatccgccaggtatgtagggatttccttcgtaaccattgtgacacgaacattgatagctatcttcgaaaaatgtattgcctttgcatagtacacgctttgaagtcatgtaggaaagatcaagacgccattctagctctattgttgtatattcactgtactccattaattcgggaggagtaaacaaggaccctgacaatgtgaattgagtcaagaaggcaacctgacatccttgtttatttggttccagtttctctacggttgcatcaaacacttgaagttgaagaagaggtggtatagtcatctggcagcatttgtaaccaacacaactcgtgttagctcctttgtaagaccgtatctcatttccacatgtcgtctcacatcccacgatttgtaaccctgtgacattcatgaacgccttgttgttgcatccaacagctgtgaacttattgttttctgatatgaagaatgggctgcccttcaaattcaaagacgatgatgaataaccatctctgttgggacaacctgaatgtttcaatggactctggatgtagaatttgttgtacaccgatatggagaaagggtctccaaggttgaaggaagtaactgctcgtcggatccttggcaacaaaagtatcggttgttggtctgatgagcttttgcagacaatctcgaaccatttgttcttgtaacaacctttgcctatcccaaaagggtaaggaacactaacatttccgcaatggtcactgcaattacgaagtgcaagaggaaaagtagaagcagctgcgtattcacagattcgcaacagaagcataacaacaaggaaacgtttcacatcaacacccatttgctctctctctctctctctttctttcaggagccagaagttctgttcaggctcaggcacacctctctctctctctctctttctctaacacagataagtcaagagtcaaccttttcacttttatattaattttgcatgatacatcaacgaagaccttgacccatatgaattgaggccataacatatttcagtagtgggctccgtagatacagcagaaaccacgaaaaaagaggataatgtttgtaattaaatgttttaagatattctttatcaaaacaaaacgaaaaatgccaaagatattcatgttgagcctcttcaaacgaaacacaagagtttttagtttttactgtgagacgaagtttttcattaagcagaacgttttaaaatggatatgccggtacttgagatttttttcattaaaatatagatcactatttgggtgacaattaatgaaacaaaggagcccatagtcatggtcctttaatttcaaaatgggcccaaaattagtcatggtccttttatcctttaatttaaaaatgggcctaaaattcgatatcgaaccaaaataaacattgggatggttacatttacttgtagcggtcgacaaaaaaaaaaaaaaaacatttacttgtagcggccaaaaatcccacagcatattgaaatgaaatttccgaaactgaattcaatgcaaattgaaatggaatcagattaatggaattcagaaaatgacaattcgtgtgggggaaaaaaaaaacattacgtaaggaaatataaagagagaaactttataacgaaaatgagattgaaagtatccatacgcacgttcttctaatttccattaaatttcatttaggatctgatgatattgagagtcccatttaatgcaaaccgtataacataagctacggagagagacttgttgattccatgcttctcacttactccttcacccccaaaatcttattcttctttcatctccgccgtctatttttcatcaacatcgatagatgtacggttctcgtttcttctggttataaagcaaccgagtcgcacggacacgaaccattttgtatttttctttccattacaatacaaaaaaaaagaagcaatttggtcatttttatcatttctttaagcagattttaccattttttgagtaagcaacgaggaaacctagagaaggtgagagaaaatcaacaaaaataaagataaaaataaaaagttagggttttgatgcatattcttagatttgaacaaagagaagaagatagtttttgattgttactagctctcacaatccttcttgaatctattccacctgtcaagctctacattttttctttgtggtattgttctatcagttttggattctttgccattttctgattctttatttttttggtgtctgaagctaattttagcgatttggtatggtgaaatctttcaaatcgagcgaaggttttgtttttcttaaattacttctattgaggtttttggattaattgatttaaggttgttgtagagaaagtttccatttttggaacaaaaagcatgtttttggagttttctggtcggattattcatctacaattgcaaatgggaagaactttgatgagtagtctgtgtttaattgatagtttctggaggattcaacttctgccaaaacttaattatttctcccaattgtttttttttgcagcttaaatatttgggaggggaaatttgtagcctacaatctctgaagcaatttggcatctttaaagttttagcagtgattctttatagttcagtatgtcagattcttgttacaggtcttgtcagttagaataatttgaaggactgttgttgttgttgttgttgttgttgttgtgatg

SEQ ID NO: 18450 - DNA, 3003 bp, Unknown; identical to SEQ ID NO: 18449
  misc_feature (1)..( 3003): 2750-1469P.txt file - cDNA_ID_1817482; gDNA_ID_1621142; Annot_ID_172862

SEQ ID NO: 18451 - DNA, 3003 bp, Unknown
  misc_feature (1)..( 3003): 2750-1469P.txt file - cDNA_ID_1817494; gDNA_ID_1621142; Annot_ID_56646
tacccctgaagagcaagaatcaattgaacgggtacctacacttacattcctcaccaccattatctcaacatgtaatgccatttctcatcccttctaacacttgcgttaaacctttctgatcagcttgaggcaatggggtttgatagagcaatagtcatagaagccttcctttcctgtgaccgtaacgaggaattggctgcaaactatctactagagcactcagcagattttgaagactgagttccgagccttttaacctgaacaaagcacaagattttgttttgtttctccaccccttttatctgaactgttactatgctcagagaatcaaatgattatatcttacacctccatatttaccttgaagaataatctgcgttttccacactgtaaacacaattcattgtgtttctctctactgaaatgattattaacaatatgatatggttttaaataaattgtggtcatactcgcatgttgtgtgattgtgattattccagctcacaggtatccttattaaatcgatattgtctggctatatcatagtgtttatacacaaagcacaagaaacaataagcaatgttacacagtatctctcactaaacatattttctgggaaacaaaagattttcatcatgctctctgccatgcatctccttcttcatcacaccttccattgttctgactccaggttgcatttcactcattagcagcagcagccgcagcctgttttaacaataatccatccctattaatcaacacctctgcctactacttccagagacctttaggtgtgttaactgcaaacttatttgctacaaacgcaagatggattatcacttacctggttaagaggattatctggtgatttcttccacatcttccatatcaagtccttgtactgtgtgtgagttagacctggtttctcagacttgagccttggaagttccacttcttcatatgcctaaatcacaatcatagaaacaactcagtatatagatccaccagaatttggctttgcgtatcatgatcaatctatcaaacaattatcatttcaacaacagaactctcctaatatataacttcaaaaattcatacaagaacaatccggattgtctgctaatatgatccactacaaggagcaactactaatttcctctataatgacggaatctgaacatcaaacacaagtgctatgaatcaagaagcattatagcaaaaggcacacgaggtataccttaaaagaagccttgagcctcttctccgggtgtcgatcaacgggcaggttatctgacacagtaatccgtgcaagagcctcgtcaacggtatgtgcctcgatgagagaatcatcgcgattggtattggtcaccagaaccatcttttcatactcatcttcccctgccatgcgagtctgtttcttcttagagtcttctgctttcttagccagagccacttgatcttcctcgcgtcttcggatgagctcagcctctgtgaccttaggaaccggcacagtgacgcgattcgccttcttgtctggctttttcaaagccttctccaactctttctcctcctgctcagccagacgcttcgcctccaatttcttagcggcggtctctgccttcttctccgcttcctcttctcgcttcttcaccgctttggatttgggaccttccgcctcgcgccagtattgttcctctttctcccgagtctgacgatccttctgctcagcctccgcggcgttcttacgagatttggcgacctccgccttgctgttcagacccatcttcttcggcatattcgattcgctggggttaattgatctctctcgctctctcgattgttgaattcgcttagggttacgattcaactttgtgtgatagataagaaatgaattaaccgtaccgctcagagctgagaattgactggttcgatcttaacagctttgtttggttaaggcggtggctcaaaagctgggtcaacaaccgatcgatcatttcatttgttaaggtcgttaaccgggattctttttttcaaaaatccactacaatcccttgtccaaagtttagagggccgcttaacggttcaaccaacttaatccgagaaaagcccaagttttgatggagtttgggaaatttgaactattttaaattggcaataaccataatttagtttgctttgtaaagtaattgatcacacactatagacttttacttctcttagacattaggttttgataggaggagaatctagtgtatttttttttttttcacaagaaacaacgtatgtaacaattatatacacttgatgcatattcttaggaagagtttggacttcggaaatattgattttttacatgcaatgttagacatagaacctgataaatttggagtcttagactaatcactataaaacatatatacagtgattgtcatttgattgaaacatccgaccagaggcaagagacacgtttcaggttctatgtcaattacgtgaacaattcttgctaatactaaatgtttcagtaaaatcagatttttaaaatttgaaggggcagaaaacatttaaagagtgataaagtggctcacgtgcagtaccaagctgcgacctctttccaatatctctctctctttctctaattctttttgactaaaaataagtacttttttgaatagtcagtcttaacgggagtggagttagtaaacacttttgtgctctggtctgtgttcaagttttgtctcttctcaaacagagaatcctaaacagtttacgagattcttgattgtctctactcactaatgttttgtaaagatgtgatttttgcttctctctatcttagtcttttttcttgttgatgttgaaatggaagctgtgagtctttaaacgggaatttattgccgaccaaaccccagacaaaaaaacaggtctctggtagattctatttctaactatcgattttaagaaaaaggctttaacttgttttgaaagattggggatttgcaaatg

SEQ ID NO: 18452 - DNA, 3003 bp, Unknown; identical to SEQ ID NO: 18451
  misc_feature (1)..( 3003): 2750-1469P.txt file - cDNA_ID_1817494; gDNA_ID_1621142; Annot_ID_172856

SEQ ID NO: 18453 - DNA, 3003 bp, Unknown
  misc_feature (1)..( 3003): 2750-1469P.txt file - cDNA_ID_1817506; gDNA_ID_1621142; Annot_ID_56675
aattggtcaataggttacagatggttggatgaaatctctgcggctaatttaagttcaatattcttgaagattacacgaccaagaagtcaaatagaatagtacaggaatgatatatcaatcgagtacagcgcgggcccttcgtttttgtcgattatttcattataatgaatttctttccatgataactttatgttttgttatctgtttaacgtattttttgttgataaaaacgtttttttttttacgttattaatttttatagtttatctgcccgacaagaattgtaagttcctcaacattacaaataaattttggttagtttaaatgttttaagcacttcttgtctcctaaacgttatccgcatgtttcaaacgtacaatataattccttcttagaaaaaaaaaatcaaatagatacaaggatataaaagacatcgaggcagaaacaaaacatcgaccaatttcggagtcacactagacaagttgttcacgacacacttgtccccatgcgtttttggatatttctaattcgtttttaattaatgaaaatgttacattaactaaacggcatgtttacagaaaaaaaaaaacaaaataaaacgacatacttatttaataattttattaatgttcttcagtacgactttccaactatttccatatttttctatataaataaatacacacaaaaattagcgatatttatagaaaagagaacagacaagtttatgaaaatcaaaagaaagaattttatttttggtttaaagtttaaactgacgtgtgattaaaggtattaaagagtggcaggtgggtttggttgtacggtcatttattcatatagagtgtgacccaccaactctctgcctgtccttcttttctcttacccccagtacggatccttcttattttatcattatttattttgcattcatatcttaaagacttaaaccttgacgtcacttacggaagccaaaaaaaaaaaaaagacactgaaatctgatgaaagaaaaacctgaaacctaaaaaacatatgaaggcctgtcggctcggcctcaaatcattgcgatttatcttgggccttcacaataataaaggcccatcatatttttgaataagactctagtttctgtattcgtttgtactcatgtatacgctaactactatatacactgatacacaagttaagcaaatgtgaaattaaaatagataaagaaacaaaaaataataaacgttaccaagaagaaaatgagttggtggtgattaatttgcggctaattttgggggaatataaaaagaaaaaattaccgtattttaaaaccggtctatataggatcgagcttgctaacaccattttagtaagagtcttgattggttcgctttaatttttcatttttgtatctgactgccgcaaactaagtaatatcaacactcaaaagtcacgataataaacattataaaaccttttcttcgctgtcctacgaacgtaccatattacttgattccgaaccagacaatattagacagacaaccaaactaacacaaatcattattctataagctgcggtctaacctactattcaaaatttagttttacttcacgtattaaagaaaggtacgaataacagcgatgagactggattttttttaacatggtaattaatataacgataagtacataattaaacaatactacaaaataaaactaaaaaacaatttcagcgacatctttgattacagattctaagaaaacaccagagaaagttagattaaaatctccctgagcttgttgtgtatcactaaacctcataaacgatgccgttcttggctcgccgactcgattatctggtgagatattctggaaaatagcgaagaatctgagaaagacaaaaataatcagagcaagaagataacatatccgagatgcgttgaagaacaagtgatatgctgcaacttgaagacaatacatctttttctcttcttcttcttgtctatttcgagtattaaaaggttaaaatctcagaagatgatgtttttttttcttagcatcgagatgtgtgtatatataatagtatacgtgtgtgtgtgatgtttgttgtgtatatatgtaatccgtaatcgcatgtacgcgtgtatctaacgcacacagacaatcagacatactcgacgacaccactgtggtccgaacaaagcaataaatgttcaaagccgatagttgtctctcattgatttggtactgtagtccggtttggatggtataccaggcgatacaacctattacctaagtggaggagattaagatccgattaattgtttaatcgtctgaataattaatgcaaaccggaaaaaaccggttatatgtttatacatgtaaggaaattgaatacacgtagatacgaaattgatatgcatttcaatacgtgtctggtgattctgctcaactgcttagatgtagacatctcaacttgtaaccagaagatactgaaacctttattattgcatttctaaattttagaattctattttcttatatactatatggaatactttaatgccacataataataaatgagagaattcaggtcattatatgtcattttggagtgtaggaccaaaatggcactaacattttcaattttattttattttgtgaaaaacaattttgagaaactttaaaaagtgtattttttttcctctggtttggactttggagggaaaagtaatcaaaagtgtattcttaaaattcaaacaagaaaaattcaaaatagagacaggaaaaagatatgtagccaatgataaaatgccaggtgtaaagttctgttttgtctttttgatttcccttctgcaacaacttacaggcaatcggacaattccagagctaaaaaaccctaatcttctcgggcttgtcatctccaaaattcagggttcaatttcttcaccatagaagatatagcgttatctccggcgtctaaggggactttagggacattcttgtggtggagaaatg

SEQ ID NO: 18454 - DNA, 3000 bp, Unknown; identical to SEQ ID NO: 7388
  misc_feature (1)..( 3000): 2750-1469P.txt file - cDNA_ID_1817513; gDNA_ID_1621142; Annot_ID_56671

SEQ ID NO: 18455 - DNA, 3003 bp, Unknown
  misc_feature (1)..( 3003): 2750-1469P.txt file - cDNA_ID_1817533; gDNA_ID_1621142; Annot_ID_56664
acatgttttcggatgatgggagactaggaaaagccgaaaaacatcatcttgaggtgattttcaacactctaaactgtttgccaggttttagtcccgtggattacgtggaccgatggttaggtggttggaatattgatggtgaagaggagagagcgaaagtgaatgttaatcttgttcgtagttacaacaatcccataatagacgagagggtcgaaatttggagggaaaaaggtggtaaggctgctgtggaagattggcttgatacgttcattacgctaaaagatcaaaacggaaactacttggttacgccagacgaaatcaaagctcaatgcgtcgtaagtaaaatgtaacttttataaaagagtgtatgttatacacagaaattgtacactaaataagccaaacagaaaaaaaaaaaattatgttgaatactatatattgactaaattgcgagatctacacatatataatctaagtatattaattatttgttattctggtgttttttacaggaattttgtatagcagcgatcgataatccggcaaataacatggagtggacacttggggaaatgttaaagaacccggagattcttagaaaagctctgaaggagttggatgaagtagttggaaaagacaggcttgtgcaagaatcagacatacgaaatctaaactacttaaaagcttgttgcagagaaacattcaggattcacccaagcgctcattatgtcccacctcatgttgcccgtcaagataccacccttgggggttattttattcccaaaggtaaaacatatagggaatacatatgttttttatttacataagatttaacgtttatagctagtaagtttatgcatgagcttcgttaacaaaataaaacacatggttttggtttgtggctacatatgatacaacctaaatttttttgtaatacttttttgtttaaaataccaggacaactagtaaatttatacataggtttccttaacaaaatctcgatacaattttgcattatatattaagaaatattgatgattggacaggtagccacattcatgtatgccgccctgggctaggccggaaccctaaaatatggaaagatccattagcatacgaaccggagcgtcacctccaaggagacggaatcacaaaagaggttactctggtcgaaacagagatgcgttttgtctcatttagcactggtagacgtggctgcgtcggtgtcaaagtcgggacaattatgatggctatgatgttggctaggtttcttcaaggttttaactggaaactccatcgagatttcggaccgttaagcctcgaggaagatgatgcatcattgcttatggctaagcctcttcttttgtctgttgagccacgcttggcatcaaacctttatccaaaattccgtccttaaaaacaagacgccttgttttttctctgtgatgtgtttcgacgctttgtcgtttctgtattacttgacgtactgttgtttttagactatccattgcccgaaaacgctatattgttaaaatcgtgtgtcttgtttattcttttgtatctccgtaacttaatcatgaatatcaatcaataccatatgaggttaatgattaccgtgtttaattgaaatggtgtgaagaattaggttaactataccatatgaggttaatgattaccgtgtttataaattgaaatggcgtgaagaattagactacatgacaccaacaagaatgttttcctttatcaggataaacgtgttcacctacccaaggtattatttatttattcaaataatagatattggttatgtttcgcacacacacaacaacaacaaaaattagatgtagaaatatttcactggaattcacctttcaatgttttattgatgaaattgatagagcggagagtattcaaaactttaaaagaatagtttttttaaacagaaaatagataaaaatccaaaagaatagttataagttaaaaaaataattgaaccatagttgatgattttttttccccggatttttggaaatcaaaaatgaattgaagtgaatcaaagttgatgataacaagtgaagaccagtttaagacaaaacaatcggattctttggttaactccgattcatgatccagtttgctgctaagctaagagaaagatcaaaaatgaaattttcgggagtaactggtaggagaatgggagatggaaagccaaaggttggataagtgtataaaaagagagagtcggatgttcataaattttgtaataaagaactgcggttaaaatcttggatccctccactccacggctccactgtgtagagtaaattcttgacgcatgttcatagacatagtaatacgtgaaatgttgtgattcgctttttttcctttggagggaaaatcccccttgtatttgggatctctcatgttccattaaccttatccagattccaatattgaaatatcgaatatatatagtcgtgtatattagtgattaaacatatatcacaacaccactttacagtcacatatacatatatatttgaattaagtgttcaagtttgtaatatgagttttgtggatctagcaaataaaattgaaaggaattatatggataaatttattttgttaattcaatatattttttatggataattaattttaaaaattttactctctttttttttacggctaaaagacgtttacattcaaaatacaaaacaaactgtttttgtgacaaaactaaatcccttgaaatagcagtatagacgtagtagacattaaaaaatctatagagcttttactatcgctactcatcaaactagatataaaatatatataaacgtgattaccgtagtacctacccaaaagcccaaaccctacgtgagcatcacatgcatgatatcgattctataaataatccacacaacaaacactttccagatatcgctagtgttcatttctaacaaatgcacacctcactacacgcatacatacatcatgatg

SEQ ID NO: 18456 - DNA, 3003 bp, Unknown
  misc_feature (1)..( 3003): 2750-1469P.txt file - cDNA_ID_1817533; gDNA_ID_1621142; Annot_ID_172879
tcaacactctaaactgtttgccaggttttagtcccgtggattacgtggaccgatggttaggtggttggaatattgatggtgaagaggagagagcgaaagtgaatgttaatcttgttcgtagttacaacaatcccataatagacgagagggtcgaaatttggagggaaaaaggtggtaaggctgctgtggaagattggcttgatacgttcattacgctaaaagatcaaaacggaaactacttggttacgccagacgaaatcaaagctcaatgcgtcgtaagtaaaatgtaacttttataaaagagtgtatgttatacacagaaattgtacactaaataagccaaacagaaaaaaaaaaaattatgttgaatactatatattgactaaattgcgagatctacacatatataatctaagtatattaattatttgttattctggtgttttttacaggaattttgtatagcagcgatcgataatccggcaaataacatggagtggacacttggggaaatgttaaagaacccggagattcttagaaaagctctgaaggagttggatgaagtagttggaaaagacaggcttgtgcaagaatcagacatacgaaatctaaactacttaaaagcttgttgcagagaaacattcaggattcacccaagcgctcattatgtcccacctcatgttgcccgtcaagataccacccttgggggttattttattcccaaaggtaaaacatatagggaatacatatgttttttatttacataagatttaacgtttatagctagtaagtttatgcatgagcttcgttaacaaaataaaacacatggttttggtttgtggctacatatgatacaacctaaatttttttgtaatacttttttgtttaaaataccaggacaactagtaaatttatacataggtttccttaacaaaatctcgatacaattttgcattatatattaagaaatattgatgattggacaggtagccacattcatgtatgccgccctgggctaggccggaaccctaaaatatggaaagatccattagcatacgaaccggagcgtcacctccaaggagacggaatcacaaaagaggttactctggtcgaaacagagatgcgttttgtctcatttagcactggtagacgtggctgcgtcggtgtcaaagtcgggacaattatgatggctatgatgttggctaggtttcttcaaggttttaactggaaactccatcgagatttcggaccgttaagcctcgaggaagatgatgcatcattgcttatggctaagcctcttcttttgtctgttgagccacgcttggcatcaaacctttatccaaaattccgtccttaaaaacaagacgccttgttttttctctgtgatgtgtttcgacgctttgtcgtttctgtattacttgacgtactgttgtttttagactatccattgcccgaaaacgctatattgttaaaatcgtgtgtcttgtttattcttttgtatctccgtaacttaatcatgaatatcaatcaataccatatgaggttaatgattaccgtgtttaattgaaatggtgtgaagaattaggttaactataccatatgaggttaatgattaccgtgtttataaattgaaatggcgtgaagaattagactacatgacaccaacaagaatgttttcctttatcaggataaacgtgttcacctacccaaggtattatttatttattcaaataatagatattggttatgtttcgcacacacacaacaacaacaaaaattagatgtagaaatatttcactggaattcacctttcaatgttttattgatgaaattgatagagcggagagtattcaaaactttaaaagaatagtttttttaaacagaaaatagataaaaatccaaaagaatagttataagttaaaaaaataattgaaccatagttgatgattttttttccccggatttttggaaatcaaaaatgaattgaagtgaatcaaagttgatgataacaagtgaagaccagtttaagacaaaacaatcggattctttggttaactccgattcatgatccagtttgctgctaagctaagagaaagatcaaaaatgaaattttcgggagtaactggtaggagaatgggagatggaaagccaaaggttggataagtgtataaaaagagagagtcggatgttcataaattttgtaataaagaactgcggttaaaatcttggatccctccactccacggctccactgtgtagagtaaattcttgacgcatgttcatagacatagtaatacgtgaaatgttgtgattcgctttttttcctttggagggaaaatcccccttgtatttgggatctctcatgttccattaaccttatccagattccaatattgaaatatcgaatatatatagtcgtgtatattagtgattaaacatatatcacaacaccactttacagtcacatatacatatatatttgaattaagtgttcaagtttgtaatatgagttttgtggatctagcaaataaaattgaaaggaattatatggataaatttattttgttaattcaatatattttttatggataattaattttaaaaattttactctctttttttttacggctaaaagacgtttacattcaaaatacaaaacaaactgtttttgtgacaaaactaaatcccttgaaatagcagtatagacgtagtagacattaaaaaatctatagagcttttactatcgctactcatcaaactagatataaaatatatataaacgtgattaccgtagtacctacccaaaagcccaaaccctacgtgagcatcacatgcatgatatcgattctataaataatccacacaacaaacactttccagatatcgctagtgttcatttctaacaaatgcacacctcactacacgcatacatacatcatgatgagctttaccacatcattaccatacccttttcacatcctactagtctttatcctctccatg

SEQ ID NO: 18457 - DNA, 3003 bp, Unknown
  misc_feature (1)..( 3003): 2750-1469P.txt file - cDNA_ID_1817537; gDNA_ID_1621142; Annot_ID_56663
cagtgcaacttgatcattattgaaacagatttattatagcgttttacagcatctattgattgtaattttgtacttatcttacaataagatatatataaatatatttttttcctcacaataagattcaatctaagaatatgaatttattgacgaagatgtaaaataaatgaaactggctttttttatgaagatgtatatcaagaaatgataataattcatagaagaaaaaatgataattataaagaagtagaccctaaaataaatagttaaccccaaagtggttgagtgggggatcacatgcagcaaattaacggcggtggggaagaaggtctgagaaattaaccaagagatggctcatcctcagccattcacttagccatcgagagatctcaaacccattaatcatttaacttactgaacatatctaataaatgtgtgtttatatatgtaatgagttagacgccaaaaataaattatagactagagacatgtcctgctagctggatcctagtcatcacggtctcacgagcagtattgcatccaattttcgatcacaatatttacaaaaaattcccaccactctaaagttgtagtttattctctatatatagagtaacataaattgattggacatgcaaatcaagtcaaacataaaagtaaacaaaaccctatctcttcctatatatggccgactcgactcggccgcttctctcagatttcaactcgtccgagtcaaatcttccgccaccaagatcccttgaggagacgatagagcgatgcattggagacttcgggtgggcacagtttctccaagccgctttagtctcattcgcttggttcttcgacgctcaacaaacattcatcaccgtcttcaccgactcacaacccatgtggcactgtgacaactcggaccgagtcgactcagtatgcaacacatcctcctccaacctctgcaccttacccaaccaaacctggtcttgggacttgaacccacacgtttcaatcatttccgagtgggggctacaatgcgccggctcgttcctcaagggatttcctgcaagctcattcttcctcggctgtctaatcggcggcttagctctctctacactcgccgactcatcgctcggtcgtaagaacatgctcttgttgtcgtgtctcataatgtctctctcttccatgttaacagctttctcaacgagcatttgggtttatgcgtttttgagattcttgaacgggtgtggccgagccacgatcgggacttgcgcgcttgttctatcaacggagttagtcggtaaaaaatggcgaggacaagttggagcgatgggtttcttttgcttcacgctagggtttttatcgcttccgatgttaggttacattaatgaagggaattcttggaggaatctgtatgtttggacatcgataccgactttaatctattgctgtttagttcggagtttcgtccgggaatctcctagatggcttatcgtaaagggtcgtaaagaagaagccgtctcaattctccaaagcattgcttctaatgcaatcactatgagcttcacaaacttatgttttgaagtagaaaatgatcaatccaagtcaaatcctgatgtttatgatgcgttaaagatcttggtgaggaaaagttggtcgtttagaagattattagcggcaatggtggttggattcggtatcggtatggtttattatggaatgccattagctttaacgaatctaaacttcaatctttacttaggggttgtgttcaacgccttgtctgagttcccagcttttctgataacgtttttcttcattgataaaatcaataggagagatgcgttgatcggatttacagctctaagtggaatctctagcgctctaatcgcggtgttaggacaacaactagggtcattacagattgtgttagagctcgtttcgtttttcagcgcatgcaccgcatttaacatgacgcttatttacacaattgaaatgtttccgacatgtgtgaggaactcggcgatttcgatggtgaggcaagcattggtgtttggcggcgtgtttagtccagtgatggttgctgctggtcgggaaaatcagttttggtcgtatgggttgtttggtttgatcataggattgtgtggattgtttgtgtttggattgccggagactagaggaagtgttttatgcgacactatggacgaggaggagtataagactttggcaaaaagacaatttattggttgatacttgatactgttgtcttttgttgtaatggttaaaaagtttgcaggcttaaaccagttcggtattgattcaaatcaattctgattttaatacttataaaccacgggttaactccttacattataagtgactgtctcatctgtaccggaccataaaccaaattcaaccaaccataatccccctttcaattttgatctattcaacaatgactcatgcatactttatttcccttatctcatttccatattcgaaatgtaagctctaaaatggtactcttaactgaaactaaaatatatataaaaaaaaaaaaatctacatttcttgaagaaacatttttaaaattaactatagttgctaaattactattttagattgacatatatatatatgtagaccaactaattaacccactgaaatgcaaagagatggtctgaaaatcaaaacagacatctaaacgtggttacctacccaagagctcaccagcctatagtatcccattccctttatattgaatcactttagattatcttttctctttcatctttccaattccactctatattaaagaaatattattttaagaataaacaggatcgtattttcatcatatgccaatatgttatttggatttaagattgttttcgaatctataaatactaattaacacaacaaacaatttccaaatatcgtagtgttcataacgaaacgagcacacaactcactaaacactcaaacaaaaatacaaacattaagatgatgatg

SEQ ID NO: 18458 - DNA, 3000 bp, Unknown; identical to SEQ ID NO: 7401
  misc_feature (1)..( 3000): 2750-1469P.txt file - cDNA_ID_1817544; gDNA_ID_1621143; Annot_ID_56697

SEQ ID NO: 18459 - DNA, 3000 bp, Unknown; identical to SEQ ID NO: 7401
  misc_feature (1)..( 3000): 2750-1469P.txt file - cDNA_ID_1817544; gDNA_ID_2214460; Annot_ID_182719

SEQ ID NO: 18460 - DNA, 3000 bp, Unknown; identical to SEQ ID NO: 7401
  misc_feature (1)..( 3000): 2750-1469P.txt file - cDNA_ID_1817544; gDNA_ID_1621143; Annot_ID_172935

SEQ ID NO: 18461 - DNA, 3000 bp, Unknown; identical to SEQ ID NO: 7396
  misc_feature (1)..( 3000): 2750-1469P.txt file - cDNA_ID_1817562; gDNA_ID_1621143; Annot_ID_56687

SEQ ID NO: 18462 - DNA, 3000 bp, Unknown; identical to SEQ ID NO: 7396
  misc_feature (1)..( 3000): 2750-1469P.txt file - cDNA_ID_1817562; gDNA_ID_1621143; Annot_ID_172922

SEQ ID NO: 18463 - DNA, 3000 bp, Unknown; identical to SEQ ID NO: 7392
  misc_feature (1)..( 3000): 2750-1469P.txt file - cDNA_ID_1817565; gDNA_ID_1621143; Annot_ID_56684

SEQ ID NO: 18464 - DNA, 3000 bp, Unknown; identical to SEQ ID NO: 7419
  misc_feature (1)..( 3000): 2750-1469P.txt file - cDNA_ID_1817596; gDNA_ID_1621144; Annot_ID_56716

SEQ ID NO: 18465 - DNA, 3000 bp, Unknown; identical to SEQ ID NO: 7419
  misc_feature (1)..( 3000): 2750-1469P.txt file - cDNA_ID_1817596; gDNA_ID_1621144; Annot_ID_172973

SEQ ID NO: 18466 - DNA, 3003 bp, Unknown
  misc_feature (1)..( 3003): 2750-1469P.txt file - cDNA_ID_1817611; gDNA_ID_1621144; Annot_ID_56711
tcgctttttgctatttccttgtaacttaaaagaagaaaaaatgagaggtagcggagcaaagatcgccggcgttttgccgttgtttatgctattcatcgccggaacaatctccgcctttgaagacatagagaggttgaggatttggccgttaccggcacaagttagccacggtggccggagaatgtatctaagtggagatttcaagcttgttacggagggaagcaaatatggagacgcctcagggattttgaaagaaggatttgatagaatgcttggtgttgtgaggctgagccacgtcatctccggtgaccggaattcttcaggcaccggtggatctgctttgcttcagggacttcacgtcatcatctcctcctctaccgatgaggttagtttcatctatcaatctacaacaacaatttttcttaatgatatatcttcaagttgatgaaaaaagctttacgtttaatgtcattataagttacaatcatctcattattaccacaatcaaagacaaatcaattgtctttatctttaacaaaaaaaaaatcaattgtctctattggttataaattgtatcctctttttttggatatgtcattttcacaaatgttgcaacatattatttttttcttttattttattttcttttctttttcctaaaacactttctatccactagtccacttatatattatttatgaaaaaaagagaaagaaataatatttctatattatcctaaaaaatatttaatgaatttcatcgatattttggatataatcatttctttaaatattaaaattttgttaatattacagcatgaaaattgtactaacgtttagttcagagtctgtctggttaaagcaaatttttctatatttttatttagaaaatttagaaactaaattagacgaattgacaaaaacaaatatatataattttatgaagtttagagtttataattattttcattatacgtagaactaatctgagcagttttcattatttagtgcattcccttttgattttggttaaattcataccaaaactaaaagagattgaatataatgggtgtatatttttcctgaaatcataagaatttgactaaaatttttagtaaattcacaagtaaaaaaagaagaagtagaaattcttctattgatacgtttattttgtgttctggagaaaaatatttctcattttttttttttccacttttccatcaaagttatgctgaaaactttttcattttttttaatcctggttggtattaagaaaaattgagacatatatttcaattgttttcctctaacatgtttaccattcaccaattggtattatttgttttattgtcttcatttataactatttttcttttgtcaactcttgataaacaatttttctctttcttaacagaagttattttagaatatattttacaaattggatcctagtttacgcaactttgtccatgagaattgagatgtgcgtagatgtatcgattatccaacttcttatcttttttttatttttttgggttgcttggctttgttgattggtgtctggcgacttggttgtgtggtggtccaccaactcacggacatcctcgttatcttcaatcagatcattgaatatatatttgttctattttaagatcattgagaatattttattccgagatccagattttaatcagatcatttcaagatttcacgtaatataaatcacaaataagtggaaaaaaactctataaaattatagtcacaagtggtagctagtaatgaaactttcatattggttgaaatacgtatcaattatattaattaagtcttttgacaaccatacgatatagctggtgcaagtgtgcaagattattctagattctggtcctaaataaaaaaatatttatctatttataaagatatgaaagtttaatagtacaaccatatatcattgagaaaatatgataatgtctaaattttcatactaaaatagtatacatcatggcctaatcttaaatcttaaatatgaaactaatttcattgtatatacattatttcatgttcttgttatgaaattaatcatctgaacattgacgtaaatttaataatatttaaaatgggaaacccccccagtaaaaaaaaaaaagatgattgaataatatagaaaatattgtttgtactaaaaatccaacaaaggtcgttaaaatttgtgtaattttcgtgttgcagttggaatatggagcagacgagtcgtacaaattagtggttccatctccagagaagccgtcttatgcacaacttgaggttagttggtaccattgaacacctaaccccagcttttgtcactttctctaactacttatatccataaagatttaaatgtaaattcagctttataaccataaaagaacctaactttgaagattttgttttctttaatagttgagttcgacatgcaatcaaattttcaccgtaaaatacatgtttcagaaaagaaaagaaaaaaaatgaaacacttctgttgtgttttgttttatgatctagtacttttgcagcttccttttaaatgtaatttttttttcacccactatagagacccatgtaacataggtagggacatgaaatggtgtactccacgtgagctgtattaaacatgatgggataattagtgtggtcatattttgttttttcctctataagaatacaaatgcttaagcacaagtcgttagctatttattatgtcaatatagagaaaggtacaaaattattgtgaaagataagtgtgattcccactagtgttggactgttgtgtttaatcaaatattatatgaaaagaaaaataatacaatctccattgatatttatgttaccacgcgtgcaggccaagagtgtttatggtgcattgcacggtctacaggtttgtgtttgctatttttccaatttggttatcattatagttaattaaagatttgagttactgaagaaaatgaaattattgtaaatg

SEQ ID NO: 18467 - DNA, 3000 bp, Unknown; identical to SEQ ID NO: 7416
  misc_feature (1)..( 3000): 2750-1469P.txt file - cDNA_ID_1817619; gDNA_ID_1621144; Annot_ID_56709

SEQ ID NO: 18468 - DNA, 3000 bp, Unknown; identical to SEQ ID NO: 7415
  misc_feature (1)..( 3000): 2750-1469P.txt file - cDNA_ID_1817627; gDNA_ID_1621144; Annot_ID_56707

SEQ ID NO: 18469 - DNA, 3000 bp, Unknown; identical to SEQ ID NO: 7413
  misc_feature (1)..( 3000): 2750-1469P.txt file - cDNA_ID_1817639; gDNA_ID_1621144; Annot_ID_56704

SEQ ID NO: 18470 - DNA, 3000 bp, Unknown; identical to SEQ ID NO: 7434
  misc_feature (1)..( 3000): 2750-1469P.txt file - cDNA_ID_1817658; gDNA_ID_1621145; Annot_ID_56729

SEQ ID NO: 18471 - DNA, 3000 bp, Unknown
  misc_feature (1)..( 3000): 2750-1469P.txt file - cDNA_ID_1817670; gDNA_ID_1621145; Annot_ID_56726
agcattccaggtttgatccagtttgtatgcatgtggataccagtagaggcacaacacttggggtgctaaaataacctcgaattaacatggttcatatttctgttgtaccatattcaggtatatacaaactttatgatctagatttaattctttgtttacatagttcctggcaattaaattcgttgttagtatttataaatcgttataaaacggtacgagttcctttcaaataatcttgcaaatgattcggccagctgaggaagaaagtatgtttggtgggtttagaaatcaattgatctgtgtttttgatgatataatgagatgtaaatttaaagagtatatataggttctacacgattaggtcaatcatatcttgatggccaagggaaatttattggtactttaactaattaggaattaatcattaatgaattttgtcaagatttaaggaagtgattatgcaatagtttttagtactacttaataatatccattttagtaagaaattaatgcaatatttgaattgttgatgaaaaatttgttcattgtcctaatgagaactaggttttaacacgcggtttaccgcgggcaatcggtttatttggttcttatactaaatatttgaataaatttgatatcctaaacttataaatataaatttctagtgattagtgaagaatcgtaatatatgatttagatattattaattattgattttgtgattgaatatagtgtttttagggatggaatgtgattatattttgatttcaaaaacgacatagattccttatttttgttgaacggtttagattgaagggaattaattttattgaatggtttagattgaatcggatcatataaagtttaggagattgttaagaccaaattacccttaatgattttgaatagcaaagaataaaatccaaatttgaaatcaaaattgaggccaaattagacaaaatttcaatttgtacttcccttttaataataaagggatatcttgtttcattaaatttgtaaggactaaacatataattaggaagttgactaaggatttttcaacccagaatacttactaaaaatgtatatatggataactaaatttaaatacatctttcttcaatatattttcttattttacatttttataaaaaaaaattaatataagaatcgtaaattttaaaaatatcattcaatgagataggtattgtgattaaatggctatcgtacttaaagatgaagtactaataaatttggagagattaataatcaattattttatttttttacaaatttaataaaatagaaatttatatgtagatactttttatattatttagtgacaaaatatttagaaaactttctatattttcaaatcttctttaattttcatatattgttttttccattttacaaaaaatctaaaaaatagaagataataataatttcataaatgaagtcattatcctaataaagttttcgatctactaattctctattgagaatctctaaaatccagtattttggtgtcccttgacactaggggtggtgtcgattgacacctacgcaaatttacgtctccaaattgcttttgcatcataagttctctgttttgatccagaatgttccataatctcaaaatgcatcccaaacatgtaaagacctgaaaaagactataaaagagtctagaaataacaaaaaaactctaaaaaccagtatttttatgcccggtccgaccggttgaaccgtgacccgaacatttttttggtttgggtttagtgctaaaacctgacaagttcaaaaccgtaaaaacccacaaaaactcaccattaacccgtgactcggttaaaccggacgggtgtgggttttaaaaattctcttgattttggaataaaatatgagatttaagactttattcaatcatttgtagaaatgttttcagttcttaaactcatttgatgttttagattttgatgaagacttcacaatgccgccttaaaaaatgaatcgaatggtgagtgagacacccgatattagttgtgtgaattcacgatgttttattaatttatttccgtcattggtgatcttctaatatatttgttacggtattagacatttagttagatttacaaaatttaatcactttattattattgtttggtataaaggattttatatttattaaacataatctgattttatattttataaacatgttatgattatttttgtttttaaattataagaactcttttttttttgtgtgcaaaacatgttttcattcattctataacgcccgtgaaccggaaaattggttagggtttgtatttaaatcatccggtttaatcggttgggttaattgaaaactctatagtgtgcctataaaagaaataaactcgaaattagggctttagttatccacttttcgttttataaaggagaaaaagtcagagaaggagaagaaccagaatcgttagggtttgggaggaaacgttttcgacatataaaatcactgtcaaaggtaacgaaatttggtagggttatttccaagtcttttattgttactctccagtttacagaagtgattttggattacaattggttgagttattcgcagttttgtgagacacgttttctcagacgcgaattaggaccagcggggattgtaactgcgatcgtagtctcatctggcttccgatcggcacgaatttttgtgggaagctttgcgacgtctaaggctagcgtttcatcggagggatttaataattaacagttagtgtgtattttagggtttcatctttgagactgtttgtttttgttttttatgtacagtttgcttcaaaggttacttttggttgtgacatgttgtaggacgtttctggactgtttcagacgcaaggagagtctctcctggctttaatcgttgttagaataattttgttaaggagagtctcttctgggtttaatgactcgagagttggtttgggttgtgttctgatg

SEQ ID NO: 18472 - DNA, 3000 bp, Unknown; identical to SEQ ID NO: 18471
  misc_feature (1)..( 3000): 2750-1469P.txt file - cDNA_ID_1817670; gDNA_ID_2926138; Annot_ID_138930

SEQ ID NO: 18473 - DNA, 3000 bp, Unknown; identical to SEQ ID NO: 7465
  misc_feature (1)..( 3000): 2750-1469P.txt file - cDNA_ID_1817699; gDNA_ID_1621146; Annot_ID_56766

SEQ ID NO: 18474 - DNA, 3003 bp, Unknown
  misc_feature (1)..( 3003): 2750-1469P.txt file - cDNA_ID_1817711; gDNA_ID_1621146; Annot_ID_56762
aacgtcgtatcccggaacagtctactccgacgaaagattcaaaatgttaaagaatccgaaaccttcaaaaagagtgagagagagagatttgaatttgcatttaccgggagaggcgaatcagtggctttaaatttcccttgccgtctcttagcatcgacgggattaagagccgccgcaacaactttaatcaaaacctgatcttctttaatctccggcacaacaatgttactctccagcttcagaacatcaactccgccgtagtcactatacacccacgccttcatctctttcggaatcgaagcatccgccgtgacattgaccgccgctgaagcgctctgagagctcgccgagattttcaagaatttcttgctgactgtttgcacgcaagatccgaatctaactctgttgatttggtaaaccggcgattttgttgtgagagaacaataatgaagaagaggcgtctcacggcggagtacgggagttgtggcggtggttgttgcaagcgctgcgttcatttttcagtctgccactagttttgtctaaaaggcttatctctttcgctttcctctgtttttaaaatactctgtttcgtggctttctttgattggttgatattttcttgtggttgtcattttaatgtttatatcacaaaaattgtggcccataatcgtttttgatctggtgctgattttgtgattcatctttgtttcatttcttttagaactacagaagtctagaacaatcacaaaacacttcggtttttgaacattacaatgtacaatttttacgtaagaagatacaatcgacattaatgggcctaaactttaaattgggctttatgaataagcccaacagttgagaaaacgcagtactaaaagtcgatcatctaggcacgatgagattaaccatagaaaccgcgcacaacgaagcacgatcagtacacgtgttaaattatgattgggtccttggtagagattaaagatccaccgtccatttccccagaactagaaaaaagagaagggagaaaactttctccgagctcgattgtttttggaaatcgtcaatcagatatttctcgttcgtctccgccttcgatttatccaaaggtaagctattgataaaaaaaactaaatccctgatatttgattttgaatctcttatactcatacattgctgttcatgtgttgttgtcttgatttcaaatctgcccagctttttgtaataatgatgcatgcactatgtttaatgcttgagttcgatttccctttgtttcgggttttgcctcattgttataactcggtcgaaagtcatctcctttacatgaaatttctgttgttaagattatatggaatgtccttcattgttctgctttctaattcttgtgtcaatcttatctaaatcttataaatcagcatttgcattagaagatttgatctattttaaattggttaagaagtgaaatgattgattgtcaatgcaggctcttgttattgaaaatggcagattccaccaaagcagggttgaagaagccagctttcactaaggttgatcagctgcgtcctgggactagcggacacaatgtcaatgtgaagattgtcagcacgaaaatggtgttacagaaaggtcgtgctgatggtcctcaagctcgccagttgcggatttctgaatgcattgttggtgacgagacaggagtgatcgtctttaccgcaagaaatgaccaaggtactttacttcagtcaataaatcatttgaaaaacaaaacgttcatataacggtttgtgtacttgattctagtaatgttacagggtagctagtaatatcttgatttggttttgtgtgtagtggacttaatgaaagagggatcaactgtaactctacgcaatgcgaaaatcgacatgtataaaggatcaatgaggctagctgtagacaagtggggtcgtgttgaagtcacagagcctgcgagcttcaaagtgaaagaagacaccaacatgtcccttatcgagtatgagctcgtaaacgtcgttgaatgagtgacaaattcctcgaaataccactaggagaaacgccctcaagaataaacaagtcaaatccgtaaccgtttatgttagcgtcaagaaaagagttaaaccctgatcagctgatgtcttgcactaagctatgtaagagtgatgatggctctaaaagttgaatgcagagcttttggcttaggttatgacttcgtgataccttttcttttgtaatgtcatcatacacgctaaggcttttgtgctacattattactctctttgtctttgcctcgtttcaaaaaatccatattcttagtgaagtaaacagtaactgcaagcctctgttgatcaacgaccataatgattatctttctattttggggttatatataaaaatagaagtttaaccaaaatgcaactcgagatgggcttgaatcactttgttaatgattgtggagaagaaatgttgtcgtgtgaagtgatgggacttcaaatgtgtgtcatcattgcgtcatgactgatggcttcttggtttcctttgtcttttaatatgtttatcttcttacatttttatatgtttgtccttgtcacgtatcggtaatgaaacttcaaacttgatataataaacgaataataggtatgaatactaaaatagttagtgaagaaacagtttctaccaacaaaaagtaatgtatcttttcatgagtgttaagtgggcaatgtttagtgcgtttagtcctttttagtctttagagctgtttccttatctcttcctcttaatcaaaattttctaatacgatttattcagagattttaatagagtaaaatgtgacatttcggtattgattgattcatagattaaaaactatataagccttggttccaacttccaacttccaacttagaaatgtgtatatacacacatttgcatcgataataactcaccaacactctctctgtctccatcgaatgtttcctctaactctcaacaaaaatg

SEQ ID NO: 18475 - DNA, 3003 bp, Unknown; identical to SEQ ID NO: 18474
  misc_feature (1)..( 3003): 2750-1469P.txt file - cDNA_ID_1817711; gDNA_ID_1621146; Annot_ID_173050

SEQ ID NO: 18476 - DNA, 3000 bp, Unknown; identical to SEQ ID NO: 7443
  misc_feature (1)..( 3000): 2750-1469P.txt file - cDNA_ID_1817729; gDNA_ID_1621146; Annot_ID_56752

SEQ ID NO: 18477 - DNA, 3000 bp, Unknown; identical to SEQ ID NO: 7459
  misc_feature (1)..( 3000): 2750-1469P.txt file - cDNA_ID_1817733; gDNA_ID_1621146; Annot_ID_56751

SEQ ID NO: 18478 - DNA, 3000 bp, Unknown; identical to SEQ ID NO: 7445
  misc_feature (1)..( 3000): 2750-1469P.txt file - cDNA_ID_1817754; gDNA_ID_1621146; Annot_ID_56745

SEQ ID NO: 18479 - DNA, 3000 bp, Unknown; identical to SEQ ID NO: 7445
  misc_feature (1)..( 3000): 2750-1469P.txt file - cDNA_ID_1817754; gDNA_ID_1621146; Annot_ID_173033

SEQ ID NO: 18480 - DNA, 3000 bp, Unknown; identical to SEQ ID NO: 7445
  misc_feature (1)..( 3000): 2750-1469P.txt file - cDNA_ID_1817754; gDNA_ID_1620832; Annot_ID_169719

SEQ ID NO: 18481 - DNA, 1588 bp, Unknown; identical to SEQ ID NO: 7435
  misc_feature (1)..( 1588): 2750-1469P.txt file - cDNA_ID_1817788; gDNA_ID_1621146; Annot_ID_56733

SEQ ID NO: 18482 - DNA, 3003 bp, Unknown
  misc_feature (1)..( 3003): 2750-1469P.txt file - cDNA_ID_1817799; gDNA_ID_2926128; Annot_ID_138672
ttttgatttacacttttagtaatagtagtttgttaagaaaacatgcataaagcataattctatgtgtgtgtatttcacttcacatatagcatatatatgaaaacttctctctatttcctagttaaaatctctacagtcgtagttaattggctaggattaaggaagttaagcgatcatttagcacatatgtattgtgaagttttgttgaatgtttacaaggtttgtttccaagtgattgagatgacaaatcttcctctgttcgcaacaaccacgttgttttacacttattcccaagcatcatttttttttttggtttatcttttaattgcaatatacatatatagtacacacatacacgagatatatacaaacgtatgcaattgcattctataaattgatgttagtgaaggatatttccaatattacaagcaagcatttatttatatgttatgtacaatgtcttttgtgttataattagattgttttattcagcatatatttttctaaatcggtggtcttgattgatcaattactcctgtcgtgtttttttggcattattgaatcaacaacatttgctcgaattcggaaactcttccaattattaaagattgctgaaaatatcattttatctagattcttatcactctttcatatttgttggcattattatccatttcaatttcgttataaaaaaaacaggtggtaagtttgcaaactgagctttcatatctacaagcacacttagcaactctagagctgccacaacctcaaccaccacaggttccggtgtcatcttcaggatctctacaggctctttccataacggacctcccaacaatatcaccgtcggtgtacgacctctcctccatcttcgagccggtcatgtcctccacttgggccatgcagcaacaaccacgaccgtctgatcatctcttcggcgtcccgtcatcgtccaatatgggcggaggcggtgagctccaagcactggcgcgtgagtttattcacggtgggcaaatgccagctcagccatcgccgggaaccagtggttctgcctcgtcagtgataaaacgagaatgaagttatttttatcgtatgtttgtttatttggaccgtaagagatctatagttagccatatgtttctccttgtaatatatatacttggtcgaattcgtatttaaattgttgtctagaatgttaatataagaactatatgatttacattgattaaatggagtatcttataggccaatatgttgaagttgctttggtctcttggaccatcgaatatgttgttttaatcagcctagagtacaccggttctccacaacttgggtggaatcttgagcgtgaaggaggcttgattctggcgcgagacacgaaccaatgagtctcatttctcattttccctatcacttatattgggccttaaatgggttcaataaagtttttttttcttatatcaagcagcccaaaatattatttaaacccgactcaattgagtttgatactctggtttgctttgtagtccacactattttaacaacatcttcgaagcatgcatttgatttaacaatcttcctaatttactagagaatttgagccaattttgtcttttttttcaccatttttataaaagctggttttcaacttgtgttctcttagcatttcccgcctctacatcaactagaaggccctacacggaccttgaacatgatcttagcgatgtctaaggactaagctacataaaccaatgagtaaaatacatatggattggacaataatcaccaatcaaaaccccaacgtcgattgcatagccgataagtagtaccacaatggtgagaggaggatagtgccagcggctatgaagggtcgacgtaaaccaaaccttgatgagacactgtaaaacacgactattggttgaacaatcagttccaatcgaggctcacaaagtcaaagcatgcttgtaagatatttggagtaattgaaggtacggtgtaatcagagcgtttcttgaattgccgaaatgaagtttagccctatggctatagaagcaataagccatttttatattcataactttagaggtattaataagaaacatatataaatttttttataaatgtattgacaaaaaatcaagtaaaaataagcaagatgcaaaacataagcaacatttctaattaatattatataattttttataatgattttatacatgaaaaaatctctaattaatagatatgacacatgtgtgatcatgtgagttatcaattttgaataattttttaatactaaattgacatattgtttgatcagaaaatgtcattttttgaaactaagtgaatgaataaagggttgagctaagcaatatataattgttgatgatgaaataataacatgaatacaaattatatttatatgtgtgtatcaattagtgtaatatttaagagagaaccattggagtagagccttacaagacaatatatgatcaccattggaaaactttaaagctattactatggtaaaaactcaattgcttgaattcgaattcaagtaatcaaaatcttattattagctcaaatctcaagttcctattactactctatacatatacatgtgtattaatctatgttatcaccaaaatagaaacaattagatatagcaagtgaccactattttccttctaagacaccatacgaactaatttttatcaaaaacaaattatcaagctctattacaattccgcatgtgtgctatacattagattaattaaaagaaattaaatctgttttcactccatttatcaaaagtaacatctttaacgaatcaaacccataaggtactcttactctctattaatagaggagaatgtgtcatcttctcattactcaataagcatacttatcatatacacaataccacaatgataaggtcaaaatgttcttgccatcatcatctacttgttcttgttatggttgttctttggatatcaccaagatatg

SEQ ID NO: 18483 - DNA, 3003 bp, Unknown; identical to SEQ ID NO: 18482
  misc_feature (1)..( 3003): 2750-1469P.txt file - cDNA_ID_1817799; gDNA_ID_1621147; Annot_ID_56793

SEQ ID NO: 18484 - DNA, 3000 bp, Unknown; identical to SEQ ID NO: 7473
  misc_feature (1)..( 3000): 2750-1469P.txt file - cDNA_ID_1817809; gDNA_ID_2926128; Annot_ID_138669

SEQ ID NO: 18485 - DNA, 3000 bp, Unknown; identical to SEQ ID NO: 7473
  misc_feature (1)..( 3000): 2750-1469P.txt file - cDNA_ID_1817809; gDNA_ID_1621147; Annot_ID_56790

SEQ ID NO: 18486 - DNA, 3000 bp, Unknown
  misc_feature (1)..( 3000): 2750-1469P.txt file - cDNA_ID_1817817; gDNA_ID_2926128; Annot_ID_138667
aatgtttgtgtgtaaggtagattgagatatatgaatggtcaaatcggaaataaaacagtatatgttcttaaataagcttctcctttgttcaacttttttgctttcatttccgttacatgatttcgcgattaattactttttataattagtcaacttcgacgccttgtgtcgtcctcgattttaatgttctgtctttctctgcattcatagtttatcttatttcatttcatatccttacttcttttttctacaaacaataatttctagacgaattgaaacaaatttccaaaactttatgagtatatataggatatttttagtggcaaaggacgacttaaattgtaacgaaaagaatttgaacttttttccattagtccctacgatgaatatttcatcctatagaacatcatatgaattgattacttaatgaagttaaatttttgaaaactctattagggacaatgtcccacatcggaagttgagtaggatcttaagtggtatatataagatatgagcctctccacctattgccaattagttttacgttggaagcccacagtctgatatggtatcagaccccgatccgcacatactcaacccgatccacatcggtccggcccaatacttggcccgccgatccatgcccaaacatatcgagatcaatggctagaagaaccatcatctcgagggggcgtattagggataatatcccacatcggaagttgaataagatcttaagtggtatatataagatatgggcctcttcacctattgccaattggttttaggttggaaacccacactctaatatggtatcagagcctgatccgcacatactcaacccgatccacatcggtccggcccaatacttggcccgccgatccatgcccaaacatatcgagatcaatggctagaagaaccatcatctcgagggggcgtattagggacaatgtcccacatcgaaagttgagtaggatcttaagtgatatatataagatatgagcctttccatctattgccaattggttttatgttggaagcccacactctaataaactcaatacaaatactaaagttgcaaacaactatactatatttgcttgaagttctattgtgataggattttgacttacaaaaatcatattctatgtctacactatatattgtgaaaccggatagccataatatttacaaaaacttaaactaatttcagatataaataaatttaaatttcactatgacctagtaattatcacgaacaattgggaagttaccacaaaatggtggtcctgtattatggaatttagcgaaaccacacacttgcgggtaaaaataatgatgacaaaatgatatacattggaatgtagagaaagtatatacaaatactaataaatagaaaagggcatggaattgacgaggatcgagggaaagtgtggtgtggcagaaatgttattaagtgtgaaaacaactgatgaatgagcctttgcttaatcacttccatgcacaagtccctttcctcttcctctctctcccacttcatcgaactttgcgtcctttaaagaaaagaaaaaacaaaacatttttcatccaattgaattcaaaccgtaaccagattagatttaacttcgtttattttacattatcttcttcttcttattttgcggagaagacttgtacaatgacctcaatacgctgaagagttggattcactgcgagtgtatatgtgcatatagaaacaaaatatctagctatatgaccacttttaactctaaatatgggtgtaatatgccaaggactttctggagatccaccacaacacacattcaagttcaagttctgctgcttttaggtctatgaaaacaacaccaaccttattttcatattgttctctctttatctcatgcataagtatattttcatattgttccctctttattttcatgcttttagttgatattttttttgttattgtattatcattagtgcgacgacacaaagtcacaaaccatgtaacaaaatgcttaaccaaaatagaaaaccttaacaattccaatatattttctgttattgcattatcaattatcatcaaatttttttccactgttgcattatcatcattgcgacgacacaaggtcacaaaccatgtaacaaaatgcataaccaaaatagaaaaccttaacaattccaactttaacatgtgaattaatattatcttaatttttggatgttcgacattcaaataaactcctaattaaaccctatagatatggttaatcttctatacatgtgtcacgtacgacacttattagccaaattgaagttttgttttttccgcaaatatataagcggtttaaatagttggtaaaaaaaaaaaaaagttagcatgtttgtcgtatgtacatgtttgatgctgcacaaatcttgtcgttataaaactttgaaatctttatatctattattcctcaccgatcggctactaattcaatggtacttgataatgataattagtcccaaagtagagtttttatctgattatatagaaacaaagactagttccggtttgatatatagaagaaagaaaaaggatggataggaataataaagaagataaaccggttcaaaaggtagtaaatgagaatgcaggtatgcagcttatctctacaatggcctcttcatcacatgtcgccaatttgtttaggtacagtgtctcttcatatttacataaatagatatctctctctctctctctctctaaaccacatcttcctctccaccgttctttctcttccttctctctctggacttcaacttctggagaagtacaagacatttataaagtactgctcatcacccaacactaaacacaattgtcaaaagggtgtggtggaaggagaatctacttctatctgaacatcgatcagtcatatcttttcaatcaaatcaaagccctcctctctctcttactccttttttgttttaaatcaagaaaaagactccatg

SEQ ID NO: 18487 - DNA, 3000 bp, Unknown; identical to SEQ ID NO: 18486
  misc_feature (1)..( 3000): 2750-1469P.txt file - cDNA_ID_1817817; gDNA_ID_1621147; Annot_ID_56788

SEQ ID NO: 18488 - DNA, 3000 bp, Unknown; identical to SEQ ID NO: 7480
  misc_feature (1)..( 3000): 2750-1469P.txt file - cDNA_ID_1817821; gDNA_ID_2926128; Annot_ID_138666

SEQ ID NO: 18489 - DNA, 3000 bp, Unknown; identical to SEQ ID NO: 7480
  misc_feature (1)..( 3000): 2750-1469P.txt file - cDNA_ID_1817821; gDNA_ID_1621147; Annot_ID_56787

SEQ ID NO: 18490 - DNA, 3003 bp, Unknown
  misc_feature (1)..( 3003): 2750-1469P.txt file - cDNA_ID_1817861; gDNA_ID_2926128; Annot_ID_138654
cgtgtttgtgtgtcttggtgatgttaggcaaaagcacaactgtcaagacacgctacacagtcatgtcacgggagacgctgcacaaataccctgaactagcaaccgagggttccccaaccatcaaacagaggcttgagattgcaaacgatgcggttgtgcagatggcatatgaagcgagcttggtttgcatcaaggaatggggaagggcagtggaagatatcactcatcttgtctacgtttcctccagtgagttccgtttgcccggaggtgatctttacctctcggcacagctgggccttagcaacgaggttcagagagtgatgctgtattttcttggatgctatggaggtttgagtgggctgcgcgtggccaaagacattgctgagaacaacccagggagccgtgtgttgctcaccacctctgagactaccgttctggggttccgcccacccaacaaagctcgtccttacaacttagtcggggctgcactctttggagatggagcagctgccctgatcatcggagcagaccctacagagtcggaatctcctttcatggagcttcactgtgctatgcagcagttcctgccccaaacacagggggtgatcgacgggcggctgtcagaagagggcataaccttcaagctaggaagagacctccctcagaagatcgaagacaacgtggaggagttctgcaagaagctagtggcaaaggctggctctggtgcgttggagttgaatgaccttttctgggcagttcatcctggtggaccagccatcctgagcgggctggagacaaagctgaagctgaagccggaaaagctggaatgcagcagaagggcgttgatggattatgggaacgtaagcagcaacaccatcttctacataatggacaaagtcagagatgagcttgagaagaaaggcacagagggagaagagtggggtctgggcttagctttcggaccgggaatcactttcgaaggctttctcatgaggaacctctaaatgtatatgaactggacatttctcaacaaataaaatatacaggaaccgatgctaacacacatacatcatgtaatggttgcattagttttgttctttaatggtaaatcacagaaatacatcaatacagtaagtttatatacataattgaagtattcttcaatggcatcttacttcatgcatccaaaaagtaatttcaaccttacataattcagatgtcgttttctctggctttcaaagattcactcgattctagcaaaggaacatacgtaacatagtgtgacacactagtctatatatacatttttgcaatatttttaacaaataaatcatagagttgagacttatttacaactcaatgctattgacattttattattatcaattaattaatattcctaattattaggatttccttatctaatatatctccatcaattctaattatttaaaaaaagagaaattttaggacattattaatattatactttattaaaccttaccaataaaaaatatatactttattaaaggtaaatattttagttatttaaagtttattaaatattttcacggaaaaaacgtttagaatatttataatatggaaaatctataaaattaaataaacatttgaaagaaaactttttaattgatttaaattataaatcttttaataaagtattattaaaacaaaaaataaaaaataatgtttaattacaccgaactggattagatggtataatgggtttagaatattataatatatgaactttagaacaattaaataaccatttgaaagaaaactttttaattgatttttgaattataaatcttttaataaaagtattattaaaacaaaaaataaaaaataatatttaatttcaccgaactggattagatggtataatgggtttagaatattgtaatatatgaactttagaacaattaaataaccatttgaaagaaaactttttaattgatttttgaattataaatcttttaataaaagtattattaaaacaaaaaataaaaaataatgtttaatttcaccgaatggtatagatggtaggacgggtttagaatattataatatatgaactttagaacaattaaataaccatttgaaagaaaacttttatattgatttgaattatatatcttttcgattaaagtattattaaacaaaaatgacaaaataatatttaattttattgatcgggtttagatggttaggacgggtttgagtcgatagaaatacaagacgatatatcatgggtgaaatccataagatatgtttgatattcactgaacgagattagattgtaggacgggtttgagtcgatagtaatacgagacggtataccacgggcgaaatcatatatataacaatcaaaatacaattatattatcttaaacactatacaaaacaaacaatattaacaaaataaatataatttaaatttaaattatttagttataatctaaattttaacttaatggacggtatgttattgttcctatatctttaaatagtaaaaatcaaacaagtaattatacagtaaataatatataaaaataagagttgtacatttagaaaatataaaacattaaatcatatatattttaatctactaaacaaattaaatttataccgcgggataaaaactagtattatatgttagcgaatcctactaaactatgacaacaaatatacatgcgagtcgtatacagaattgattctcacatttaagctgtcaacaaaacattcaacaagtcttaagcaagccattaaagaagggacctgaacaatttaatatatatggttaactatttaagtatcatgtccccacttgtccattacgtgattactacaaaagttcacataaaagttcctttttatatatataggaaagggaagaagatctcaataacacaaaaccttttaaactagtaaaatacacagattttaggatgagccaatgtgttccaaactgtcacatcgatg

SEQ ID NO: 18491 - DNA, 3003 bp, Unknown; identical to SEQ ID NO: 18490
  misc_feature (1)..( 3003): 2750-1469P.txt file - cDNA_ID_1817861; gDNA_ID_1621147; Annot_ID_56775

SEQ ID NO: 18492 - DNA, 3003 bp, Unknown
  misc_feature (1)..( 3003): 2750-1469P.txt file - cDNA_ID_1817865; gDNA_ID_2926128; Annot_ID_138652
cgatttgggccgaaattaactttgggcttggttttaacgacataacgtctcaagacaagtgagttaatgccacggccttttattgaggtaaaaaaggcacgaatgctaaccgaaaatcgttccaaacaacaattgcttacgtggacattttaaaacatctgttcaatggtcattggtgactgacttcaatgaaaattacattgcaacaatagccaagtatcacagaaagttacattgcaacaatttccacgtcaaatttctaaacatgcagaacggtaatttacacggggaaggcgctgaggaggcggagggtgctacggaggggatcgcaggaacaccgatgaatgagaagaatccagaggcggcatgatcttgctcgtcgaggagagtggatgatgctctataaacggccaacaatatggtcgacgtacacctaaaatgtcttgctacgtggatgcaccactaaacctttcaacttttttgtgttttcttttcttaattaaacacaagattaattaggaaatcttgtgtttcgttccgtttcgtttcgatttctggtttcttgtttctattactcaaattattgctcgagtgttaggtttgcttgtatctatccttgttttttccgtgattatgtaatttgattggcccttgtagtcgagatgtttgtagccttgatggctcggggaaactcagagagagagttggtcccggttgcattctccgctgtcttactgataccataaacaccgtttgatccatgattgcctctattgtatacttgatgcttcatgatatatgcattctccatgtctctgtttcatgtttacgcataaaaatattatcaagcctcaaacttgaattcggttcaaaatcctagacatccccaagaggatcataaacacagtttagacttgtttttcaattagcaaacagttgcttgataagaagtcattcctacagctcatgtgtaacacaattctctctcttttctccaacaccccaactaaaacaatctaagccgtttctgaatgttttccggatctgctgagtcataaatacgagtgctttaggcaggcaaataagactccagcatcaatttggctggggaaggtgttaaaatctctacgatcaggtacgtgtatttccattccttctctgccttgtctttaaacatctccgtgtacactttccctgctccttgaggcccacggatgtagaagtttacctgaagcatattcaattttgatcatgttaaacctgcaaaactctagacaatttatatagcaagaatgtgaatccaagcgcaatagaggttctacaatgaaatacctcaacatgctccactccgtcttcatctgtaaatactctgttgggtatacgttgacgagcagctcggtttctagtttcttgtccatagcctttgatgggggatccaatcctaaccctcacctagttaacaagacaatcacagtcacagaaattgtttcattttataaacagatgcttttgtttcatacaccacccctccgctatgatcaatctgtagagttagtttctaattacctgaccatcatcttgaattctcttcaaggctttgtcaaagaccttgtacctagaatacataatggtgtctttagattactcaaatccaagtgtctgagcagataaatcaaattagatttctgaagcctcactcttttggttgaaaaatgagctctttaaacacaccgtagccagcagctccagcgacaccaagcccagccagaataacaagactgtaggacgcaccttctgtaaaggtcaccggcttctccgggatgtggtatgtaggagaatcaaaaggatcctccacagtcgtcacctctttcttagcctgtaaaacaattggcaaagcaagcatcattattagatgacagaagctgtctgtcgcttttgacggcttgcgttgtgataaatggcaaacacataacgtagacattaagtagaaacttgtaggaagaaacaccttattctgctgattcccaggttcttttgaagttcttgatgcaaaagatctggtaaagtaagatgagttgatgttctttggacgagcttccgtacatatacttgcttgcgggtttcggaagcgaaacaatagtcctgtataacagacaattgtcagaacaacaaggtacacatcaacactaggatttgaagtttgattacacaattatcactgctgaccattagctccagtagagtcctgcataagaaaaacgatgagaggtatgagactaacatataagcccaaaagggtgtaaagagcaaagaaaatgttgtcgaagcaaatatttaacaagtaaagggaagaaaatacctttgaaagaaatgagttgctaaaaaccctcttggactgatatataacaaaagtaacactgtaagttttccccagatcaaggacactagagagattcaattcaaacaggactagagacactgaaaaaaacgacctcaattttcacaagatcctaaacaatccgtgtctatgtagtagaagaaccaatagcttttagccaatattatatagaaatgccggcagagtgagatggaatacgaaagccttaccgattttgggattccggaacaaggttgtgtagcggaggaaaacgacgccagtttcgattttgattggcggccgatggctatcgctgatctccttaaaagattcatcatcatcatctctgaaccaccaatattactgattgaaaaatcgaagtggagacgacgacgacgacgagcgaggttgaatgagcaaggcaaagccgctcgccgttgctggggttttatcgtagacacgtgacgcgcacgtgcaagctatttccttgggcttgggcttagactcatgagataaagcaaataaaacccaaatgggctttttagaaaagaaacccaaataacagagtatctcttcttcttcttcgtgcaacaacctaaccatggaaattgcaatttgcaaacatg

SEQ ID NO: 18493 - DNA, 3003 bp, Unknown; identical to SEQ ID NO: 18492
  misc_feature (1)..( 3003): 2750-1469P.txt file - cDNA_ID_1817865; gDNA_ID_1621147; Annot_ID_56773

SEQ ID NO: 18494 - DNA, 3003 bp, Unknown; identical to SEQ ID NO: 18492
  misc_feature (1)..( 3003): 2750-1469P.txt file - cDNA_ID_1817865; gDNA_ID_1621147; Annot_ID_173077

SEQ ID NO: 18495 - DNA, 3000 bp, Unknown; identical to SEQ ID NO: 7495
  misc_feature (1)..( 3000): 2750-1469P.txt file - cDNA_ID_1817880; gDNA_ID_1621148; Annot_ID_56817

SEQ ID NO: 18496 - DNA, 3000 bp, Unknown
  misc_feature (1)..( 3000): 2750-1469P.txt file - cDNA_ID_1817884; gDNA_ID_1621148; Annot_ID_56816
tcaaatcataaaaaattataatgtgtgtacttaattcacattatttaacttattcttgattttcaatctatgactaggtgcaatcccatgtggtatccaaatgatatgtttattttttattcctgaatcacctagatggctggtaattcacacacttaaagtttgttttttatttgtttaattggtaatattatatttaaaaggtacagtctacatattaatgttcatcttaggctatgtatggtagagaacgagagcttgaggttactttgaagaggctaagaggagaaaatggtgatattctcgaagaagcagctgaaatcagagtattattgtttgttccgaaaatactactactactttggctaacatatacgtattttggttaactattaattcggtttaaaatgtgaaacaggaaacagtggaaacctctagaagagaatctcgaagtggactaaaagatttgttcaatatgaaaaacgcacatccgttaatcgtaagtctcatcaaatacctatcatttatacaaataatttagaagagatcgagttcttatctagttttgtgacctattgatgatcaacttaataaacagatagacatgtatttatgcgtatgtagatctaacattctgcctatacgtatgaatgaaatactcccaagtcctaacggaaaaaaatgttttaacttgtttagtgaaataaataaagattaatttgtttttgtttgtttattaattcgttgaaaacgattagattggattgggcctaatgctcttgcaacaattttgtgggagttcggcgataagtgcttatgctgctcgtattttcgacacagccggtaaaccatgatttaaaaaaaaaaaaaaaaaaaaaaatcattggcatgtcatatcttgtttgattttgtatcgcatttcatctcacgatttttgaatatattgtcttgggtatttaggttttccaagcgacataggaacatccatccttgcagttattttggtaaatcaaaacattgtctttttagtatttaacattttataatcgaaaatatagtatttcacattttcactacaacttattcttgtttttaggtaccgcaatctattattgtcatgtttgccgtcgaccgatgtggacgccgaccacttttgatggtaatcatttcattaccttcgttatatataatttgcgtaattgatttccctagataaatattttatttgtggtttgaaactttttttgcagagctcttctatcggtctgtgcatatgttcatttttaattggcctctcttactatcttcaggtttagtcatcttaactattttattctttgtaacttcgtttgatttttggttattatagactaaatattatttatcccccacaagcagaaccatggtgattttcaagagttttgttcccctatcttaatcgtcggtttagtggtacgtgaatgccaatcttgtttcagtcaattactatttttggtttaattcatatattactttgttgaaaccacaacactaatcaaccaagtcatactatataccagggttatgtcttatcctttggcattggtctaggtggactaccatgggttattatgtctgaggtatttgtttttttttttattttaaactagaaatatttcataatgtaatcattatctttttttttttttggacaacaatttattcattatctatggcaggtgtttccggtgaatgtgaaaattaccgccggtagtcttgtaacagtgtcaaactggtttttcagttggattatcattttcagttttaatttcatgatgcaatggagtgctttcggtaaatttctatccattaatttgacatttttgtttcttcagaatattacacatctaacacaaaaatgctttatttcgacagtatttaataattattacaataaaatgaaaataaataaataaacaaacaaccagctcttaaaattgtttaaagagtatagggttatgtataatcaaatcatggtaaatatatcttttaaattattaaaaatactaaaacgggaagattagagaattttatgttaggaatgtcccctcgaattaatattttcattatataataacttagatatgaaattaaagagaatgattatatagttattttgttttattggaatttgcaggaacatatttcatatttgctggagtttctctgatgtcattcgtatttgtatggactttggtgcctgagacgaaaggccgaacacttgaagatattcaacaatcactaggccaactttcataaatccaaagttgattctttactccacaatgccagacattgttcttttatgttacatttataagtcatgtattatccgatttggaggggggggatatggatttccgaatttttttactttgataaattttgtcaatatattttgttgacagaaaaaagaataatcaatatactgtatgtggtattattctaacaatattttttaaacgtataatatgattatgtaccaatatttataaccatatcatatgattatgtacttttgtaaaaaaaattcacaccccacttaaaacttggttactactaattggatcttgcaactcaattttctaaatcgcattacaaaatactgaatgagcaaattaataaaagattagtcaaatgtgacaacgaccaatgaggcatggccaaataaaagcttgaagagactattcaaagttaaggataagaatcaaagaaagaagatggaatctgaaagactcgaatcacatcttctgaataagcaagaagaagaagcttcttccttcacttctggtcttcttctcagcacatccgtcgttgtcgctggatccttctgttatggctgcgccgtgagatctcttcctttctctctcaatttgctatccactgattttggatattacagttttagaatcctaatttcttcgtgcataattttcataactataacatactttgtagatg

SEQ ID NO: 18497 - DNA, 3000 bp, Unknown; identical to SEQ ID NO: 7504
  misc_feature (1)..( 3000): 2750-1469P.txt file - cDNA_ID_1817892; gDNA_ID_1621148; Annot_ID_56814

SEQ ID NO: 18498 - DNA, 3000 bp, Unknown; identical to SEQ ID NO: 7492
  misc_feature (1)..( 3000): 2750-1469P.txt file - cDNA_ID_1817896; gDNA_ID_1621148; Annot_ID_56813

SEQ ID NO: 18499 - DNA, 3000 bp, Unknown; identical to SEQ ID NO: 7491
  misc_feature (1)..( 3000): 2750-1469P.txt file - cDNA_ID_1817900; gDNA_ID_1621148; Annot_ID_56812

SEQ ID NO: 18500 - DNA, 3000 bp, Unknown; identical to SEQ ID NO: 7491
  misc_feature (1)..( 3000): 2750-1469P.txt file - cDNA_ID_1817900; gDNA_ID_1621148; Annot_ID_173140

SEQ ID NO: 18501 - DNA, 3003 bp, Unknown
  misc_feature (1)..( 3003): 2750-1469P.txt file - cDNA_ID_1817912; gDNA_ID_1621148; Annot_ID_56806
gaatttccaagacggaagtctggatatctcataaatcacatagttttaaatgttttactagcttctcagtatgaaatttcactcttgagtataatagcaaatttgtaaaattgcagcttggaactcatggatcaaacttgacagaggaagagcttgagacgcacacaatagcagcctggaaagaggggaaggctcatattagccggcaatatgatggaagtgggagaccatatcctaggccacttgttcaggtgagattttcacagttgatttgtatcgctgttactactaactttcttctgtttgcgtaatctctgaacatagccttatcctagaactttctattgcatgttatattgaaaagagctagtagtatttctctcttgctattaatggttttatatatggctatcaggttggaccctatgataatctgaaagacgttgccctgaaaattttgcaaaacaaggtggcagctgttccggttatatattcttctttgcaggatggttcatatccgcagttactgcatcttgcttcgctatcaggcatattaaaatgtaaggtcccttcatttgtgaataagacactgataagcgcgccaatttggcatttctcactttttaattcatgacgtgcatatgattctgctatttccaaaattttcccacttcttcatttctccaaattctgtgaagggatgggatctttaggagggagggaaattagaaactaaagttgcaattgactttaccaaactttttacacagttttccctgttaataattcctttcgaaatttatgcctttatcagacacttaagctctaaattaagcataatcttccaggtatatgcagatactttagacattcgtctagctctttacctatccttcagcaacccatttgttcaattcccctgggtacgtgggtccctagaatcggagaatcaagtagcaaacctctcgctacattgagacctcacgcctctttgggttctgcgctcgcattattagttcaaggtaatcctttttcttatcttgttgcagcaacatcttattcaaagctcatctgcaactcagactatcaacctctacattacaatcagattttcagttttaaatattttgtctagatggtaatataatcaagtagctgaacacatgggtatactcaagtcaatgcagaccaacaaaccaactttagatgttacgaccacttttattatttttatacagatgtaattgctgcaacatgagtaaactaacgaggtttaaaaacatagaaacatttttgtcaatcttaaagcagatatatttatagaatttctcgtgatcttttccctggttcctcatagatggaaatgaatgaatgagtcatgcttaatttatgtttcctggttattacagctgaagtcagttcaattcccgtagtggatgacaacgactcgcttattgacatatactctcgaaggtaaacctctatccatcaatcgacatgatgtcttatgcattccatctttgacgtccttgtgttctgatgatatttgtaattggccagtgatataactgctctggctaaagacaaggcatacgcacagattcatcttgatgacatgacagttcaccaggtaaacctctcatcagaaaccaagatccatcacatgtctcatcaaattacgagttttacttaaatgtaacctgcctatctatcatggaaattgcctcgtttctgatttatttgaacatacatctttacaagaatgaaagaagagatgaaacgttataataaagtggaggataatgtgtttgtgggttttcaggcgctacagttggggcaagatgcgagcccgccttatggaatcttcaacgggcagagatgtcacatgtgcttgcgctcagactctcttgtgaaagtgatggagcggttggcgaatccaggtacacactatctcctatatacaatcttcagctttgttgcttgacacaggaacatcagatgagatgtaactggggtttgggtttgtgtatataaaacacaacaggtgtaaggaggctggtgatagtggaagcagggagcaaacgtgttgaaggtatcatttcactgagcgatgttttccaattcctgctcggtctttgactcccacagcaaaacaacctccccaacctctttttctcatttcccctcaatcaaaactacccaacaatttgcttctttttttttttttttttttttcttcttgcaaggaatttgtaaatttgctacgaacctctttcatcattgttttcttattatttttgttgttttagttgaacgggtttccattcttgtgaagatattggctaccggaatcttttactagtagcttccctcagctttttcttccctctttttttttccatttttttttggttttgagtttttcacttcatcgactcgaaaagcaacacagcatgagaaggccgtagaagtgtaggacaatgcactggttgacaaagatgaattgtcaccagcgagaataagccttatggttgaagtttgcaagtaatgattaatacaattacaatcataacgaatcataaccttaagtacaataacaagtaaaaaagtacaatgacaagtaatattcagtaatggttaatcgagtgatttgatcatagcattatcgatttctttcggatttttcaatagctcttaaaatatatcaataaaagtaatacaaaattcaatcaaatctagtgacactaaaaaaaaataaaaaaatctaatgtcatttaaaaaatatttgagcaaaaaaaataaaatctaatgtcattaaaaataagtgttaaataattgatgacataataagtgatagagaaaaatgtatttactctatttacttatttaggcttatccagacaataaacgttttcgtttttccagtccaacaagtttcttcatcaactctctcaactgttttcgacataaacattccagaagctgagatcagatactaaaatg

SEQ ID NO: 18502 - DNA, 3003 bp, Unknown
  misc_feature (1)..( 3003): 2750-1469P.txt file - cDNA_ID_1817916; gDNA_ID_1621148; Annot_ID_56805
gactaagagaaaaatgtattcagtggaggctaaagaaattcttctcgaaatctgatgcaaaacccataactgaaagaaaagaagaagaaagaactctttgaattagttcccgagccaaagatcatatacataaccagaattacgacgaaggagttacggatgtttaggacgagagccaaagatgttctaacaatatgtaaccaaatgaagactttccaaatattaaaaagagcccttatgagataaaaaaaaaaaactttgttggcctgtttttcaatgcccaaatatagcgatcaagattttgagatgaaagttatgaccattaaaggagtatatatatccaattgtccatactagccagcgaccgtgaatgctgcccaataaccaacaagccaaaatgaccattgtttacaaatgtctttctcatttgctgttttccgacagatagagtaagtgtatatatagaatagtactgaaagagagggccgggggacttatatacgttttgaggaaaaagataaacaacattagagtaagagcgagatatatacacttatataaagtcatgtctataagaaagttcaaatccaacttaaaaatatatactcacaacaaataaaagttacatcacttcgattatttagagtttataaaactaattagaaaccgaactctttttttcttcaaggtcgtgttttggttttaggcttttagccctaatttacaggtctttctaaggctaaatctactataaaatgtaattgcatgcctagggttcaaacatgaagtctcctctccctcaaataatgtcaacttggaagacaacacgattgtctccctgtattacatgtctaccgagaatagatgtacaatgtaatttcatggattatgtttaacccgataataaattggtgtgggatgtaatgatttattttctttaatttaagaaattataagagttgacacaataaaaattagagaaaaaaaaaacatggcttttctttttactttatttatttaccctgcttcaaaacacaagagaataagagaaaagtgtattttgaaacgtttttgaatgttagtttggttttgtttgatttatagtactgtttaacatcagaaaagacaaatgagtttaaaaaaataataccaaaaaaagaatttactagatacaattttaaagtggaaatatttttaataacttggatcctcgtctaatttattcataacatttatgtgatatattatatatataggaaatgatttattagatagttgactaaaactatatattagatgctattatttgcataattcatatagttatttattatgaaaaaagagaagaataatcagttatgtaaaagtagaattttttttttttttttaaatgttatcggaaaaactgtatacagtaataaaaaagagaaaaaaaaaaaaaaccatatctttgtcgatggattaaaaacaacattttcattacgcagcgcttcttcgccctcagattcttcttcaccttgaaagaccattaacatcattccttgcccagatccaaacaatgccatctccactctctctatttagggttctctccaacttttcaaatccctaattcttgctccctcccttcaatcaattccgatcatcatcgaggtctctctactccccgaatttaaagatcagagccgcgacttcctctgccttcttttcctcggaatttttcagctacgttttccaggtggtgtgtattgtcaatcagttgacctttgcttttgtagccagatcgttcgtgctttgagtttagggctcttttacaaggtttcgtgttggtggaatttctctacctaggtttgggggaagagttcagtaatttcgttgtagatcgtgatttgggcttttagggtttcggtttactggttgctggaatttatggtagcgttattgaattcggactctctgcatgtgtaagcgttgaagtttgaagtttcaccgggttttgtttcttctgctgaagagtcgagattattttacgcattaagaatcgattcagaaggtttttaggaattagtttctgtggattgtaactatataactactgggaggggatgtttggttctacattggatagcagccgtggaaacagcgctgcctcagggcagcttcttactccgacacgcttcgtgtggccttatggaggtagaagagtcttcctaagcggatctttcaccaggtgagatgactgagcttgaactaggatagtttactttatatttcagttaagctatttatcggggtttgtgtagagtatgtgctctgtatagtatctatcggggttttgcagtccatggactgatttctgaaatgggcatttgaacaggtggacagagcatgtgccaatgtcaccgctcgagggctgccctactgtttttcaagtcatttgcaacttgacgccaggatatcatcaggttaataatcttgtactcgacctgtatcatggcaaattctttgttaattaatccctgcagaagcatttatgtccttgtagtgatttagcgatgtccataattgtgcttcatttagtctctggatacttaacctatgcaatgagaatcttatatacctctgtcatatttgtatgactgtggctgaaaattgcaaatttccttgctaattgatcaaaatttgactttatacatcaccatccacataacaaaagttggggtcttcatgctgtgtgatacctaaatcacttcttttaataaaggctacagtgtgtgtatagagattcatatattttggcagttggatgtactatatataacaagattttaattattacaatgtgagatgcttaagaagccactaatgttacatttatgttatttcattctcatgcagtataagttttttgttgatggggaatggcggcacgatgagcaccaaccatttgtaagcggaaatggtggagtagtgaatacaatatttataactgggccagatatg

SEQ ID NO: 18503 - DNA, 3003 bp, Unknown
  misc_feature (1)..( 3003): 2750-1469P.txt file - cDNA_ID_1817932; gDNA_ID_1621148; Annot_ID_56801
acgggctgatccatagtcttatgatccatagccgaagggaccggcgcgtgaggaccactcgaagatccataagtatacttttccccaaatttgaacgagaatttgagagatcctttcgccttcccgttaggcaacctcacggcgtaagtaaccgttttctcctcgtcacctttattctgatccaaaagctccttcaccggaacgctaacctcaccgacaggtttatcaccagcgatgggacgatccgccacgatctcgaaaacaagagtaagacgattgtcacgcgccgctgcgtcatcgacggtgagcttcatttgatgcttccatttaggtttggtgccgcaatctttatcaacctttgtcttctgcttcgtcctagcgtcgccgttgatggaaacgacggcgtacaagtcttgtttaccgatcaattgaacgtctttgagatcctccgcagatataatcgtcagatccaatgatctacactccatggttactcggatcgaaattgaatgaaataaacttgaaatttgctctgagaatgttttttatgatgaggaaaagaaaagtggagagggcaaaggatatatatgcatttatgataaagtcggtttaaggaacaaagagttttttttttacacacgggagggacacgcacgagattttttttgttaaggacgcggtttctttaaatgcaaatagcttttttccttctaatattagtttcttcttatctgaagtttaattatcttgctgtttttagtaaattattatttgaccatggttcaaataataaactcatgtgtatctaagagtttagtgataatggcaatgtaaacgttcaaagatatggaaattataaacgttttaaagaatgtctcaaatgataagaccatgatcaattcggtgttctccgtaagcctggttacttgacaacgtaatcaggtacgtaaaataggacaaagacacgccggagagttagacttattattgtttgatgttgatatcatgatatgtagtaatcatatcgcattttactctgctaggattggatatgatcaacatcactaacatattcgaaaaagaatatcaagtggacgagtacgaattctacaactttaccattcgaaagtttaccgtaaactctaaatgaaaatgttttaataaatttacattgaattacagtttaacaaaaccaactaatggtggtatatatgatggtaattagttgaagattagttgtcttcggaaaaaagttactaacttaaaacttggaaccatgcatgtattgcgataatgaatgagcatataaggtggaatcttttgaaatgtagaataatctcaagcatctttcttggtttcttcttcagtagtcaagagcaatacgcgtggaataacccatacgttttctatttttgcttattctcgaaggcgattggttctcattttctcgatcgaatcatccttttaattcaacgatagcctcacgtcgcgtggtcctgacgcactatccatattctttgccactttattctccttcacggaacatttaagttaaacgcaaatatacacgttagtccatatattggaggagaccatattcacaaattttgatatataacacaaaaaaagtttacctgatttttcttctagtacttgatctcatcactcaactacttgcaagtcttgaaactaatcatcaactcaccattcagaatttgtttagcaaaaaaatcactcaatgataactaaaaacccaacaaacatacacgatcatatttcaaacgacaccattgccaatgacttaaaagtttttgaccaatgaaaattttagcgttgagtattttgaatcacgttcagttgctcatcgttattttcagtaactacaaaatgaacacaatttaatcgttagtcgctgaaaattagaaaacgaatatgacatagtcattaatgttaattaccattagcaaatacgaaatgaacataatttacattagaaccaaataattctttctatgaaactatccgaaatccaaattccggatgcattacaagtcaacaggtttagaatcaaattactgtaaaacaaccttatcaaggacttttttttttgtgtttcatcaattggtaagtttactttaataaaattgcaatattaatatatttatatataattctttgacaacatatcaaaatattttaaatttgaaatttgtatacatatttcccttaacttttgtttgtttatatccatatttggtaactgtacaatggggatccacttttgaatcaaaaaacaccacactgaaacaaaaataaagaaaagaagaaaaacaagtgaacccatatccatgttctgtctgaatccgagtttacttcttcttagttacagaggaggaaaaaaggaaaacctaagcggaaagggaatatccaaaaaaaaaaaaaaaaaaaaaagacagaagtataagaaaagtatcctgaacatgataggtctctctcccatctataacctctgcaatttctctcgaccaaaaccctaatttcaggtttggggttttccttctttcactgtaagtacgagcaattattttcatatatatatgtacctatatatatatacacacttatatacttgttgatgagcctctcgaattccccaatcttaaacactcttcttcaattctacgttcgattttagcgatttcggagttctcttcttctgtcttcgaatttgtacgcacttattagttctatacatatatcgatcgatatagcatgtgtttctagagctcttaggttcagtgattgatcatgtgtgtgtgtgtgttcgttgaattgggggatttaacgggttttgcttacaaatattggattttgggattgtaatttggttgatctctctctcaaattcgagcaggagtgtataagctaccaatttagttttctttccctttagtgagtgctcaatttctgattttagtttgaaaatctagtgttttgacaatg

SEQ ID NO: 18504 - DNA, 973 bp, Unknown; identical to SEQ ID NO: 7483
  misc_feature (1)..( 973): 2750-1469P.txt file - cDNA_ID_1817952; gDNA_ID_1621148; Annot_ID_56795

SEQ ID NO: 18505 - DNA, 3003 bp, Unknown
  misc_feature (1)..( 3003): 2750-1469P.txt file - cDNA_ID_1817960; gDNA_ID_1621149; Annot_ID_56843
gttgcttattacaccaaactccatccacatattaaagaaaaacaaaacaaaaggaaaccaaataagtcaaagcaagtaaatgattggaacaaattgataggtaagttactagagacaggtacttaccgttaaaccagtttagaaaacacggttctttttttagcagatatgaaaatgagaaagagacaacatgagctatttcaatgttttttcttgggtttgcagagtgaaggagatataaatacgaagagggtgatgaagaaatgacagaggaaaacaagcattgaattaggccaacaacccccacaacaaaaaggaagttggttgtattaaatttgaaaaatatgtttgtttaagaaatagtgaaatacttttcgaaataataaatatcaaacaaaatatttaggtcgtccgttacaaaaaaaaaacaaaaaaaaaaacattgaaccacttttaagaatttcatgatgattgcttgctagttcttgtttattaaaaagtccataagaaacagctaaaccattatagacgtttctctcttaaaaaaaaaacaaaatatacgacaaaatatatcataatgattttcttataagccatgaaaaagttactattttgtgatggatattctctttgagtctatgattacaaatttatcgcatacttctaacacaaaaaaatacgtcacaatttttgttaggtggaaaacgtgagaatgtgttaaaaatacgttatttttgcgattttagttttcatttgtttaactttatttataattggattccatcctcatgaaacttgtgaggcaatatttataaataatattattacatcttgcatcttgcatgtattatgaattatatatatgctcttgatctctctcctgacctacgtaacgcctcgacggggaaatcggaacaataactacatgatatgttcatgcataagcttgcttggtctacgcattgttcttaaatctgtttgatgtcactatgtcacacatgacacgtccatatctttgatttactattttaactctaaaacgttaacatagaagttgaaaaagtagtcagttgatatttgataagaaaaacagcatttataaatctcataacgatattcaagaggaacgtaaaatttactcaattaggtagctttcatctccaagtatatacacatgggtctatgaatagtgcatgtacatgtagtatatgtacatgtgactttttatgtagagaggtttgtagaataaaatgaaataaaggaacaaggaatgccatagagctttcaaaatcggtatttatgaggacttgtatgagagacaaaggcatgttggtgggctctgctactcccaacatctatttgaattttgaaactaatttggtggtttcatttttgaaatacatctatacttccctcttaattttacctagtaaagtttctaggcctgggatttcggctaaacccgaggaaatcgaatgtttcggttctcggcgcagagagataaagagaaggcaaaccgttcggcaaaaataatattgtgattcggattacggttcggttcggttcggcaagctaaaccgatcggttttctcggtttagaggtacaccctataaaatagaagaaaccctagatctatgtcaacaattcatgtcgtctccttccttttctaatcttaaactcttctcctcaagatccttctttgatcttcttctccttcttcagtcttcttcttcttcgttctcagcttatcatattcgtttactgctgtgaaaccaacactctctggcatcaatccaatttttttttttttctcaccgccgcgacatcaaatctctcgtctagttgccggtggtggcaaacatagacatctgcactatgtaggaattacagatctagtcaagccgctaattattctttctttccctttgaaagtcggacgcgcatgagtgaacggcgtctccgtcaccgtcatcattcttcacttgtcaaaaacctagatttcagatgggcttgggcatgttgtttattttggacttggacttttattagatttagcccattattaatttattattgttggtttataattgtaaatttaataattgagcccataattttaattttggtctaattcggtttgaattaaccgatttagaaaaagggtcggtttagttcggaattgattttaatccctgtaaccgaaccgaaaaaaccgagtaccaaaccgacccgaaccgaaatttaattcggtccaattcggcagaatttttaaaaccccaaaaaccgatttaaccgacccgattaaaccgacaaaaccgaactcccaggcctaaaagtttctatgaaaatccactactaaattaaaaaaaaaaaaaagaaaaggaaagacaaatgttaaattgcatcaaccaataaaaataaagtttttgttttcacattttctgtaccaagcatattaaagtgtagactttaaatggttgcatgcgacctaattcgtaaacaaaaaaaaaatcgtataaattttttgttttgtatcttgtaaaataaaataaatcaaccaaattaatgagtcaagacaaaaaagttcaacgagaaccgaatgttattctaaaccaaaccataatccggtacaaatttccggttctgcagcaggacaaatggcaacaaaggaaagtaacgatgataagtttgatcgaaagtttcagacttcaataagttttcagtttcgtgcatagattaggaatctcgaaaccctaattctgttttctacacgaaacccatcaaaatcgaattttgatcgtttctaatttctgccatttgattctcttcatcagtcacatttaggggaaacgagaagccctaatctttggtatgttgctccctctgatttcgcagtttctgggtttttgttttcctctgcgaaatccctaattgaatatcagatttcatagattgtgttgattgattttggtgttttaatttcagattctttaatcgccatg

SEQ ID NO: 18506 - DNA, 3003 bp, Unknown
  misc_feature (1)..( 3003): 2750-1469P.txt file - cDNA_ID_1817967; gDNA_ID_1621149; Annot_ID_56841
cggtgaagaagaagactgagtttttggtcaaggagatgaattggccagtaaaggctgtggcttcaatccctcaggtacttggatacagcctagagaagaggactgtcccaaggtgtaatgttatcaaagttctcatgtcaaaaggattgcttgaaagtgaactccctccaatgtcttctgttttgacaagtactagtgagtcgtttttaaatttgtatgttagcaaacatgatgacaagcagcttgtggctgagctgatggcaatcttcaccggaaatcgtgtttcactcaccgatcagaaggcacgcctagaacaatgagcaacgttaaggattgttttttgttttctgttaggtttagattcattagtgagtcttgttgcttgacttttggaagtagataatagattttgtgtatgagtgtctaagcctttgaccctgaaggatgatgaatcagtcttgtatgaaaaaaatctttacaattatctttctttgtcttgttgatatgaattatggttaagatctttgtgatgtgctttgttctgttttggaaattaaacagagcatatgatatatttcattttactagtttcgtggcagaaatctttcctgtttcgcaggatttggtagacaactctgaggagtaagatccactcgcaaacgatggaacggtttattcaaattcctagtttgctttttctacttgagtccttaagtttgtattagagtcttcagtatacttcataccttcttgttcaacccaattccaactcttcagtctctgctacatcttcaaactccatcaagcctcaaactaataatctttcaagtgagattataaatcttcaagcttcttggattggatatatcaatagactataaaagctagtagaaaagagtagaaaagctagttgaggatttataataaggtaaataagtagaaaagacttttatagtctattgatatatccaatccatttacttgatccatctctgtatgcaatctgactgacaaattgtaattgttaaactcttttttactagctttttttaactcttcaacattaaaagtctagaaacagaagacaactatttactacatgatatttttggttatttgttaacaagaagcactgtggtaaagcagccgaggatgaataattttagtgtttgtttgatgagtgttaatcttcatggaatccataaccacaaagatttggttgatccatctatataaagcaaataggtgtagttaatcaattcaaggtcttttagtgttatcccttgccaaggagggcaacactagagtctagagtttcgttttccacttgagtccttctgttggagacagtgtcttcattacacttcctaaccgattccaaagcttcaaatttcatcaaacctgcaacataatgatgacttcacaatggtgtcgagtgagctccattaaaacatgtataggcctaggattcagcataatgatgatcaagcgctatcttgagtgcattgtaatttgatgaaagaagttgacttgaccagtggcaactagaggctggagaagaggattgtcccaagttataacctaatcaaagctggtacgtctcgaagcatgatgataagctggtattggagattactgtttttgctccaaggaatgtcatatcaagaaactgtgcattgttcttgtacctcgctagcatcttcctttgttggttacatggtttgctattccaaccaagctctggtactataaggcaaaaggaaaggagaaggagaccattaactagtctatattacaacaatacattatatgtttcgtggatatctctttttcttatcttctctgctgttttcctttcttttgtaaagattgttctttgaacatgaatcaatacactttagaatctattaagatagcaaataagttgatgcaaagagcaagtgtgagatggataattgaacgggagtgaatgaacctgtcactagatctctaatggttgttgttacctcctggctcctcctcagctgcctaaactgcgtttagctcggccgcctatcactttttttttgtgtgtaggtttgattggtctctctcattcagaatcatatgatcaatttgttttcaagttttgcaatgtttttgaaaacattacatttacgctaattggatttttaaactcgataaccgtgattacaaatagagacgtaatattttttagattatttctcatgtttttttgtgatttgttcatcttatgcataatttatttttcacttatgttcaacaatagtatacaaaaatttagaaatgctcatcatatataaaatcacttttgacgttctgaggctccaatctattaaaaataaacgatatagatgataatatatacgtcttttaatcaagtgaatgaatatttagtttttttttttttaataggcttcactttgtttcttactcagtttaatttttatttggtttttataaaattacaacttagttttaatcaaaggttctaaattaaatttgaccaaaaacataaaaaaataattacgtaagagcttttttggcagaaaataatttagagtaattatttattccttcgacgttaaaaaagaataggaaaaaatatgtttaaattgcatcattcgaccaataagattagaactcatcctttttttttttaaggatatatagaattcatcactgaatacatgtttttatcccaaattaacgcaaaagagagaactcgagatctgggcatagcgactcactcagatctatacaccttcttcttcttcttcttcttcctcttcctcttcgcttcgttcgtaaactcatctgatctgtggtaaccaccattgttcctctccttacgatttcgaatttctgttttgatctcactaccattgttgcaatttagatctatttctaattgttcgtgattcgcttttttttttctgtgatctggtttttgtagagtgccattatcgttgagagattatg

SEQ ID NO: 18507 - DNA, 3000 bp, Unknown; identical to SEQ ID NO: 7513
  misc_feature (1)..( 3000): 2750-1469P.txt file - cDNA_ID_1817989; gDNA_ID_1621149; Annot_ID_56829

SEQ ID NO: 18508 - DNA, 3000 bp, Unknown; identical to SEQ ID NO: 7513
  misc_feature (1)..( 3000): 2750-1469P.txt file - cDNA_ID_1817989; gDNA_ID_1621149; Annot_ID_173166

SEQ ID NO: 18509 - DNA, 3003 bp, Unknown
  misc_feature (1)..( 3003): 2750-1469P.txt file - cDNA_ID_1817997; gDNA_ID_1621149; Annot_ID_56826
atttagatttttgagatctttgggttttctttttctaattaatgtaaaattaacaaaccatttaccaagaaacatttgttggttcaaaagttttaggaaacaatgagatgattatgtcaaatcatcattatttataaacttaaatatatttgtttcctaaataataagaaaaaatattaattctatatttaatcccacaaaatgaattaggaatatgtattaactaaaagattttttatccttattttctatagcatctacataacatatctttaaattataaaaaaatcacataaatattttcgggattcagatttcaataattaggatgtgaacaggttttctaaaaatatcgttcgaatatattgaagataaaaaaaatacaaataggaaatataataatttaaaagatacaaaatatttataaagaaattttgttttaaaaaaaacaaatttcaatgaattcaatataaaatcttcaatacgaatccgatattgattcttaaataaaaatattaatataatatacaatttttcttattagactgaaattttaaattgactcgaagtatcttaaataataatattattaaaaatagaaaataaataatttgatttttagttatcacgggacggattatacggtggaacgggtttagatgagacatgacaaaatattatcccgtggtgtggtctatcaccagtcaaattctataagataaaataatatatattaaacttactaatatcataattacgactcactaaaaaccgtacacaaccttatcgagaattattaatcaacacaaacaacaacaaattctttatcttataaaaaaaaaaatatatatatttaacccgcggtataccgcgggtcatatcttagtacgttataaactttatactacgggtgaaatcctagattgatattaatacaaattatatactatgggagaaattaacaatcaaatacaattataaaatcttaaacactaaataaaataaacaatattatttaaacaaatataaaattaaaatttcaaatttttagtttaaaaaatatagttttgtgatgtaccatacatttaaattaaacaaaataaaaacatatatttattgatcaacttaaaaataaatatttaattttttaataaaattataggcatgcagtataccgcggattaatatctagtttaaaaacttaaaaatattataaattaaaatttaataatcatattgaaacgaatgacgacgttttgtaactcccataagattatcgagttaccaaaactcaggcgagagagagagatcagaaacggaagagaagaataattcagtgaagaatgagactactctctcctctgatcatcactcattgatcagatttgcatttttgagtctccatttctgaatcatccaatccgatcgacgttctccggtattgatttcgttgatcgggtttttgttaagtttttaatatcgatagctccgattccttaaccaaaccagtacgtaccatacacgagagagactagcacatcactagctcagctcacattacaccatacgagagagactagcacatcactagctcagctctcaagtctctcatgcgagactcgcacaattcaacaacaacaacataaagcataatccctctaaattgatctctttccttatttatactagaacggagtttgttagagatatttttatatcttcttcaagcaagcttccttctcacgtgcctcttcacttgcacatgtcttcttttgctttgtctcccattcacatgatacaccaatcgtatcagttttcagtcatacaatcctttgtcagcaaacacactttgttagccgatccaaaataaccaattcggtttgaagttcaccgattttcgttccacctctacacggttttttgtagtgaaaaatcgtcgagaaaattatgaaaattgagagcatcgtctcgtgggagagttcaactagatctttatatttacttatgctctttttattgtaaaaaataattgattatatacttcttcattatatacatattttgatttacactgtttcactaattgtagtttccatggtatgaaatcacttttagaaatttgaattatttctatgttttttttttttggggtaggagatgggatcgaacccccacttttattaataactaaaaaaacaatcacacccgaacattcagagagcccgcatacccatttacatactcaagaacaatcgacataacactatccaaagtagaattaaacaaatgaaaatctaagggtaaagtgtaaatatatagctaactcattcgcaagacgattagcctttctatacgcatatgaaatccgtactacccattcctttgaaaaaaagttatttatctatgtccaaagaaaaccaaccaccatctctaagccaatctccagctcgaagtgtatgataccgcgatccagctatatgtgagccataatatgctccccatagttccatggtatcacttttagaaatttcatttatttctgtcatacatattttcccagatgtaatgcatatttttttttttctttttggatattcgaattattcacctttcaagcgaacgacgacgtttggtagcgtcacattgattattatcaagtattcaagttactccaaaacttccaggcgagagagatcagaaaacggaagaaaaggtgatgagagagttagtctcttctgatcatcacttcttcatcttcaaccattgatcggatcacattttgtttatcgaattcaatcgaagattaccgattttgattcgaaattctcctgttttgatttcaccctccagcggtgatcggagaatttcgccatgtcgtggggattaggatggaagagatcatcggagagtttccgtttaagtctcagctacggcgccgatgatctgaacgacgatccgattcaatcaccgtcggcgtctccattcggatctccaacgtcgatg
